United States Patent Application Publication US 2017/0114356 A1 - sequence listing, part 22

SEQ ID NO: 28933 - DNA, 2315 bp, Zea Mays
cgcaaacgcagcagcagcagcagccgcggcacggcccgaggtcagaggtcgggtcgccccgcgaaatcccctcgcgcaccacagaaaatcctccagccacctccaccgccggcgctacgctctctctccgctcgccgcactttggccggcttcgcgctcgcggtagggggatacagagggagatctgggccccgcgacttggatttccgcccctcccctgcccgcccgccgcgctggattccgcggcctccgcctcgatcccgccgcagggcccccactctggtattatggtcatgaagatggagcttgaggacgatggtgccttgggaggaactgctggcacgtggacagaggaggaccgaggtctcggcgctgccgtgcttggagccgatgcctttgcatatctaacgaaaggaggtggtgccatatccgagggccttgtctccgcgtctttgccggatgacttgcagaacaaactccaggagcttgtcgaatccgagagccctggtaccggttggaactatgccatcttctggcagctctcgcgcacaaagtctggtgatctcgtccttggatggggggacggctgctgccgtgagccccgagttggggaggtgggagctgctgcttctgcaggcagcgatgataccaagcagaggatgcgcaagcgtgtgctgcagcggttgcacatagcattcggggttgctgacgaggaagattatgcccatgggacaagaggtaataaggctgcagtacagagacacgagggaaatggtcctgctccccctgaaaggtcacccagtttggcgaagatctttgggaaggatttgaaccttggccggccttcagttggtgtacctaaggtagatgaaaggatatgggaacagaggagtgctggtggtggtacctcattgctgccgagtgtccagaaaggattgcagaatttcacttggagtcaggctcgtggcctgaattcacatcagcagaagtttggcaatggagtgttgattgtgagcaatgaggctggacaccgcaacaacggagcagtggacagccctagcacagcccagtttcagcttcaaaaggtgcctcagcttcagaaactgcaactccagaaattgccggttgttcagaagacaccgcagctagggaaccagcagcctatgcagacacaggtacctaggcaaattgactttagcgctgggagcagttccaagcctggtgtgttggttacaagggcagctgtcctggatggagagagtgcagaggtggatggcttgtgcaaagaggaaggggcgccgcctgttatagaggaccgacgaccaaggaagaggggaagaaaacctgccaacgggagggaagaaccacttaatcatgtcgaggctgagcggcagaggagggagaagctcaaccagcggttctatgcgcttagagctgttgtgccgaacatatcgaaaatggacaaggcgtccctgctgggcgatgcgataacgtacatcactgacctccagaagaagctgaaggagatggagacagagagggaaaggctcctggagtctggtatggtggacccaagggagcgtgcgcctaggccggaggtggacatacaggtggtgcaggacgaggtccttgtacgagtgatgtctccaatggagaaccatccagtcaagaaggtcttccaagcgttcgaagaggcagaagtccgcctgggcgagtcaaaggtgacgggcaacaacaacaacgggacagtggtgcattctttcatcatcaagtgtcccggcactgagcagcaaacgagggagaaggtgatagcggcgatgtctcgtgcgatgagcagttgagcagagcagcgtaggatcagattgtcgcggtagagatgtggcagttgatcctgtttggttgcgagcgaaaacaagaggcggcggcggacagcagcccttgacatggtcgataggagatctgtaggtggagagaagcaagatgagattcttctgacttttttagcaacgcaacaacaaaagatggggctcgagttaagcagccgttgtactttaggtttcttttggttggtaatagtgttcctagtgtaagcttgatgatgcagcagaacaatgaacagcagtacatgtttttttcccttattttcatgcgtgatttggaaattaaatttattgcgatctttcttttacttctctgtctgtgacgatggtagtttagtattatgtttaagaggagcgatgtattagtttgaaggaagacagaagaatgtactccctatgttgcaaaatagtaccaaaaaagtagtcattttagct

SEQ ID NO: 28934 - DNA, 2421 bp, Zea Mays
ttgggctcgaatctgatgggcgtgatcggaatcgtgtcctcgtgtccttgccatcaggacacactgttcacgccagcctccttttgtctaggtattatggtcatgaagatggagcttgaggacgatggtgccttgggaggaactgctggcacgtggacagaggaggaccgaggtctcggcgctgccgtgcttggagccgatgcctttgcatatctaacgaaaggaggtggtgccatatccgagggccttgtctccgcgtctttgccggatgacttgcagaacaaactccaggagcttgtcgaatccgagagccctggtaccggttggaactatgccatcttctggcagctctcgcgcacaaagtctggtgatctcgtccttggatggggggacggctgctgccgtgagccccgagttggggaggtgggagctgctgcttctgcaggcagcgatgataccaagcagaggatgcgcaagcgtgtgctgcagcggttgcacatagcattcggggttgctgacgaggaagattatgcccatggtattgatcaggtcactgacactgagatgttcttcctagcatctatgtactttgcttttccccgttgtgctggtggccctggccaagcatttgcagcagggatccccctctgggttcccaatagtgagcgcaaggtatttccggccaactactgttaccgggggttcctcgcaaatgcggcaggatttaggactattgttttggtgccatttgagagtggtgtccttgaactggggtcaatgcagcacatagctgagagttctgatactatccagaccatacggtctgtatttgcagggacaagaggtaataaggctgcagtacagagacacgagggaaatggtcctgctccccctgaaaggtcacccagtttggcgaagatctttgggaaggatttgaaccttggccggccttcagttggtgtacctaaggtagatgaaaggatatgggaacagaggagtgctggtggtggtacctcattgctgccgagtgtccagaaaggattgcagaatttcacttggagtcaggctcgtggcctgaattcacatcagcagaagtttggcaatggagtgttgattgtgagcaatgaggctggacaccgcaacaacggagcagtggacagccctagcacagcccagtttcagcttcaaaaggtgcctcagcttcagaaactgcaactccagaaattgccggttgttcagaagacaccgcagctagggaaccagcagcctatgcagacacaggtacctaggcaaattgactttagcgctgggagcagttccaagcctggtgtgttggttacaagggcagctgtcctggatggagagagtgcagaggtggatggcttgtgcaaagaggaaggggcgccgcctgttatagaggaccgacgaccaaggaagaggggaagaaaacctgccaacgggagggaagaaccacttaatcatgtcgaggctgagcggcagaggagggagaagctcaaccagcggttctatgcgcttagagctgttgtgccgaacatatcgaaaatggacaaggcgtccctgctgggcgatgcgataacgtacatcactgacctccagaagaagctgaaggagatggagacagagagggaaaggctcctggagtctggtatggtggacccaagggagcgtgcgcctaggccggaggtggacatacaggtggtgcaggacgaggtccttgtacgagtgatgtctccaatggagaaccatccagtcaagaaggtcttccaagcgttcgaagaggcagaagtccgcctgggcgagtcaaaggtgacgggcaacaacaacaacgggacagtggtgcattctttcatcatcaagtgtcccggcactgagcagcaaacgagggagaaggtgatagcggcgatgtctcgtgcgatgagcagttgagcagagcagcgtaggatcagattgtcgcggtagagatgtggcagttgatcctgtttggttgcgagcgaaaacaagaggcggcggcggacagcagcccttgacatggtcgataggagatctgtaggtggagagaagcaagatgagattcttctgacttttttagcaacgcaacaacaaaagatggggctcgagttaagcagccgttgtactttaggtttcttttggttggtaatagtgttcctagtgtaagcttgatgatgcagcagaacaatgaacagcagtacatgtttttttcccttattttcatgcgtgatttggaaattaaatttattgcgatctttcttttacttctctgtctgtgacgatggtagtttagtattatgtttaagaggagcgatgtattagtttgaaggaagacagaagaatgtactccctatgttgcaaaatagtaccaaaaaagtagtcattttagct

SEQ ID NO: 28935 - DNA, 2287 bp, Zea Mays
cgttcttctccctctcctcccgtcgccgccacatctggaccggcgaatcatccgccgcgaacctgtaacaccctagacggcgacagccctcccctcccacggcggcacaccctagccagacgcctcacctagtcacctccacctccgggggatcgcgacgccgacgccccaccgagcctgcagcgtccccacctccgcagcggcggcccccaaaccccagccaagaaagccagacctatggacttccacaacatcgatgattattttcatgaaaacagcccggcacaagggggcgaaggagctgcagaggctagcgccgaggcaattctggaaagggtgtaccgtgacaccgcgtttggatctgagaagctgctcaatctagacatgctggtcatggagatcgctcgccgagcctctgatatcgagcctctcatgtgggaccctcgttccatttcttccgagtcagttggcaaggctttcgaattcgatgtcctgcacggtattgtagattcggaagtcagcgagttggagaagctagctgcctctattcagacagatattggcaatgctgaaaccaaggcattggggggagaacccgggagcagagtgaccgatgagctgtgcgcgcggaaggagtccttgaagcagatgcaagatgtaatttctgatattagaacacagcttgcaacctttgagaatgccatacaaccttcacatggcaaacaaggaaatagtgagggtatgggatatgaaaatggtcatatatcaggtcacactgctatgcaggctgaggaccagagaaatgtactgcagatgttacaacagtcgatagcaagcaagctagatcttgaaaataagctacgtgattcgcagtctgttgtggaagacctcaaaatgaagctgcatcacgcagaacaagaatcatgtttcttggaggaatccatcaaagagctttatgaaagaacgttgtcggcagaaaatgcttcccaattgcttcttggaacttcaaaggaactcgttgccaaatttaataccacccagtcctatttaagtgcttcaattcgcagggaagatgatcttaaatcaaagttagacgaaaacttgatgaagctaagtggcaacaagagcaccagggagacagtgcttggagacagtgacaacaatgctaaccaggagcctgtgcagatgcgggtgctatcacgtcctgagttccagaatttatggaataaggttcagcagctggaggaattgttgagggactctggctctcaactgcagcaatcatctctttcaagaggggcagatgaagaagagcaggatacagcgcaatctgggataagcgcgtttgggaatgttatcgctgatttcaagcttgccatttccaatgcagaaagtagagcacaaaatgctgagacaaggtgtacacagctcactcgaacgaatgttcagcttaatggggagttgaacactcttaaaagtcagggatcagatagggctggcttattggagacgaaacttaaggaatcagacactcagttagagcatgcaagagcatcggttgatgctattgttgaacaacagggtatgttaagatcctccatgtctgatatggaactggtgattgaagatatgaaggaaaagtacttgaaagctgaaaccagggccgagagtgctgaatcaaaatgtgcattgttgacagataccaatttagaactcagtgaagagctgtcatttctgagaggccgagtagaaaggctagaaaactcactgcatgaagctaaccaactaaaggtgtccagtgcaaaagacattgctagtaaaactaagactatcatggacttggttgcaaaactttccttggaaagagaacgccttcatgttcaggttgttacgctggcgaaaaagaacggggcgttggctcaaaagtgcaaagaaaatgttagcgagcgcacattgctgtgcaagaatgttaccacaggcgaaggtgtacttaggcccgttcaagtaaaagaggaggttgaagccgatgaggtggtgattccagacgaatgcacagtgcgatctatcgagccgacgacgatgacgatggtaaactggaagtacatttccgcggcagtcctggccttgctggctgccgccgtcgtgttccagctattacgtgccaatctgatgatgacgacggcggttaacgattgctgaggcaatttgtaggctaggagtaagagatggaataaagcaggacagcttgtgttttacatgcaaattattattatccatcacatctggc

SEQ ID NO: 28936 - DNA, 2142 bp, Zea Mays
ttttagaatagaaagccatagaaaagttcgtcttcaagtacagttgctggcgaaaacccagctctcctgagaggtcacagaaagccagacctatggacttccacaacatcgatgattattttcatgaaaacagcccggcacaagggggcgaaggagctgcagaggctagcgccgaggcaattctggaaagggtgtaccgtgacaccgcgtttggatctgagaagctgctcaatctagacatgctggtcatggagatcgctcgccgagcctctgatatcgagcctctcatgtgggaccctcgttccatttcttccgagtcagttggcaaggctttcgaattcgatgtcctgcacggtattgtagattcggaagtcagcgagttggagaagctagctgcctctattcagacagatattggcaatgctgaaaccaaggcattggggggagaacccgggagcagagtgaccgatgagctgtgcgcgcggaaggagtccttgaagcagatgcaagatgtaatttctgatattagaacacagcttgcaacctttgagaatgccatacaaccttcacatggcaaacaaggaaatagtgagggtatgggatatgaaaatggtcatatatcaggtcacactgctatgcaggctgaggaccagagaaatgtactgcagatgttacaacagtcgatagcaagcaagctagatcttgaaaataagctacgtgattcgcagtctgttgtggaagacctcaaaatgaagctgcatcacgcagaacaagaatcatgtttcttggaggaatccatcaaagagctttatgaaagaacgttgtcggcagaaaatgcttcccaattgcttcttggaacttcaaaggaactcgttgccaaatttaataccacccagtcctatttaagtgcttcaattcgcagggaagatgatcttaaatcaaagttagacgaaaacttgatgaagctaagtggcaacaagagcaccagggagacagtgcttggagacagtgacaacaatgctaaccaggagcctgtgcagatgcgggtgctatcacgtcctgagttccagaatttatggaataaggttcagcagctggaggaattgttgagggactctggctctcaactgcagcaatcatctctttcaagaggggcagatgaagaagagcaggatacagcgcaatctgggataagcgcgtttgggaatgttatcgctgatttcaagcttgccatttccaatgcagaaagtagagcacaaaatgctgagacaaggtgtacacagctcactcgaacgaatgttcagcttaatggggagttgaacactcttaaaagtcagggatcagatagggctggcttattggagacgaaacttaaggaatcagacactcagttagagcatgcaagagcatcggttgatgctattgttgaacaacagggtatgttaagatcctccatgtctgatatggaactggtgattgaagatatgaaggaaaagtacttgaaagctgaaaccagggccgagagtgctgaatcaaaatgtgcattgttgacagataccaatttagaactcagtgaagagctgtcatttctgagaggccgagtagaaaggctagaaaactcactgcatgaagctaaccaactaaaggtgtccagtgcaaaagacattgctagtaaaactaagactatcatggacttggttgcaaaactttccttggaaagagaacgccttcatgttcaggttgttacgctggcgaaaaagaacggggcgttggctcaaaagtgcaaagaaaatgttagcgagcgcacattgctgtgcaagaatgttaccacaggcgaaggtgtacttaggcccgttcaagtaaaagaggaggttgaagccgatgaggtggtgattccagacgaatgcacagtgcgatctatcgagccgacgacgatgacgatggtaaactggaagtacatttccgcggcagtcctggccttgctggctgccgccgtcgtgttccagctattacgtgccaatctgatgatgacgacggcggttaacgattgctgaggcaatttgtaggctaggagtaagagatggaataaagcaggacagcttgtgttttacatgcaaattattattatccatcacatctggc

SEQ ID NO: 28937 - DNA, 1180 bp, Zea Mays
gaaagaactaaaatcttcttagtatttaatacatttgactccttcaatcttctctaatcctcttgttctcaaaccagccctagcccctagaacatctcaaatctatctcgctctccctaggaaggtcctgcaaccccgccgccctctgctcccgcggccatggcaccaagattagtggtcacatagttcgtcttcctgcgacggctcaattcgcggaggcgcggcatggcgactccgtcgctgccgacgcagattgtggagttcaattacaaggcgatagaggacaagctcaagagactggctctcgaagtgagccaccatgagaacaacattaggttcctcaaatcccaactcaatactgttgaagaggcgtgcgtcgacctgggaattaaacttgggaattaccattcatccgtggccgctgttgtaaataatgatacttctgctcaagaggctgaacagcgcactattcgaagtatacttgatcagggcaagacagcagctgggattatatgccaactgaaagtccgtcatcatgagctagcatctaagatgccactgatgaaagatatacttggttttgtggctacattgggaaaagtaaataatgataacctcagcaggcttctcacagagtacttgggaatggataatatgcttgctcttgtttgcaagacttatgatggtgttaagggtcttgagaaatacgacaaggatggcatcattgataacaccagtggcattcatggacttggtcgctctgttggaaaatttctggatggaagatttactgtcttttgtcttgaaaacttgaggccattttccggtgatgttatcattgacgatccacaaagaaagcttattttacatagaccaaggttgcctggaggggagtcgcctcctggttttctggattttgcagtaaatatgatccacctggaccgagcacacttgaggttcctcacagccagtggccatggtcttagggaaactttgttttatactttgttttcccatttacaagtttataagactagaactgacattcaaagtgcccttcctctgataaaagatggtgctgtttctctagatggtggtctactgagacccaatggctcattctgccttggccatagttttcttgctctcgtttggaccattacgtatgctaaccttttac

SEQ ID NO: 28938 - DNA, 873 bp, Zea Mays
atgacggaaaatgattttagcaaaatcgtggtcgactcggccatcaccgacagaaaccggcttggacccgcccgcatgaaagccttgtgcggcttcagcttcaggtcgaagcgtatccctctgccctcccggctccctcaagcgctaatacggctggctgcgcgtcattctcttcctcttccggtgctcgtgctcgtgctcgtgctctccgccctccccctccgccacttcgcgcggaacggaacccaggccgccgccgacccagccaccgctaggcgtctaggcgaccgcgcggcatggtggcgcttttacactacctatgctagtttgcctgatgctacatttccacgatggttaagctgactatgatagcgcgtgtcactgatggccttccattgtcggagggattagatgatagtcgggatctcaaagatgctgacttctacaagcagcaagcaaaactgttgttcaagaacttgtccagagggcagcatgaggcgtcaaggatgtcaattgagacaggaccgtaccttttccactacatcattgaaggccgtgtttgctatttgactttgtgtgaccgttcttatcccaagaaacttgcattccagtatctcgaagatctcaaaaatgaatttgagaaagtcaatggcagccaaattgaaactgctgcaaggccatatgcatttattaaatttgatgcattcatacagaagaccaagaaactgtatttggataccagaacacagaggaaccttgctaagctgaacgatgagctctatgaggtgcaccagatcatgactcgcaatgttcaagaagttctcggtgttggtgaaaaactagaccattttatcataaaaaggatagactcag

SEQ ID NO: 28939 - DNA, 1422 bp, Zea Mays
atgacggaaaatgattttagcaaaatcgtggtcgactcggccatcaccgacagaaaccggcttggacccgcccgcatgaaagccttgtgcggcttcagcttcaggtcgaagcgtatccctctgccctcccggctccctcaagcgctaatacggctggctgcgcgtcattctcttcctcttccggtgctcgtgctcgtgctcgtgctctccgccctccccctccgccacttcgcgcggaacggaacccaggccgccgccgacccagccaccgctaggcgtctaggcgaccgcgcggcatggtggcgcttttacactacctatgctagtttgcctgatgctacatttccacgatggttaagctgactatgatagcgcgtgtcactgatggccttccattgtcggagggattagatgatagtcgggatctcaaagatgctgacttctacaagcagcaagcaaaactgttgttcaagaacttgtccagagggcagcatgaggcgtcaaggatgtcaattgagacaggaccgtaccttttccagtatcctaagacctttttctcatttgcaaaattctttgttccacaattaatcatttcgaaatatgtgatgtgattcttcatcatgatcctaaattagagtttttgtgaactggcaagtttaggcagcctaaccatataccgtaaacttgaccagtattgtgtatatattggattcaatattaagtagttcaagttcctttgacaagcaccggcttatgcatatcatatgattatcatctatctccatttacacattgatgtgtggattacaccaagtaagcgctatcactaatgacgtatggtatgaaaatgatcattttctgcactaaaatgcttctggtgctctagttgtaccttaattcaataaaaacagctacatcattgaaggccgtgtttgctatttgactttgtgtgaccgttcttatcccaagaaacttgcattccagtatctcgaagatctcaaaaatgaatttgagaaagtcaatggcagccaaattgaaactgctgcaaggccatatgcatttattaaatttgatgcattcatacagaagaccaagaaactgtatttggataccagaacacagaggaaccttgctaagctgaacgatgagctctatgaggtgcaccagatcatgactcgcaatgttcaagaagttctcggtgttggtgaaaaactagaccaggtgagtgagatgtcaagtaggttgacttcggatactagaatctatgcagagaaggcgaaagatctcaatcgccagaggatatgatatttaactattctacacgtagttccaaattgtagttcactctgccttcgtcctaatcgaaccttctctaactttgactcgacttatagaaaaaaacgcactgacatctagaacatc

SEQ ID NO: 28940 - DNA, 1627 bp, Zea Mays
atgacggaaaatgattttagcaaaatcgtggtcgactcggccatcaccgacagaaaccggcttggacccgcccgcatgaaagccttgtgcggcttcagcttcaggtcgaagcgtatccctctgccctcccggctccctcaagcgctaatacggctggctgcgcgtcattctcttcctcttccggtgctcgtgctcgtgctcgtgctctccgccctccccctccgccacttcgcgcggaacggaacccaggccgccgccgacccagccaccgctaggcgtctaggcgaccgcgcggcatggtggcgcttttacactacctatgctagtttgcctgatgctacatttccacgatggttaagctgactatgatagcgcgtgtcactgatggccttccattgtcggagggattagatgatagtcgggatctcaaagatgctgacttctacaagcagcaagcaaaactgttgttcaagaacttgtccagagggcagcatgaggcgtcaaggatgtcaattgagacaggaccgtaccttttccactacatcattgaaggccgtgtttgctatttgactttgtgtgaccgttcttatcccaagaaacttgcattccagtatctcgaagatctcaaaaatgaatttgagaaagtcaatggcagccaaattgaaactgctgcaaggccatatgcatttattaaatttgatgcattcatacagaagaccaagaaactgtatttggataccagaacacagaggaaccttgctaagctgaacgatgagctctatgaggtgcaccagatcatgactcgcaatgttcaagaagttctcggtgttggtgaaaaactagaccaggtgagtgagatgtcaagtaggttgacttcggatactagaatctatgcagagaaggcgaaagatctcaatcgccagttatcatgctggaaccagctgagttgtcttgtcttccctcgtgcaaccatatgtttgatcgtggttccaaaaagaaaagaaagatggctcgatggtttatcccgcatctgccgattcaagcgactactttagctatcaaaagcaaaaccacggtagtagagatagccttggaactgcacatttctattaactggacatgtataatagttctcgtgagcgcacaccatgtaatcgtcgaaattcatccatgtgttgtgacattttttgagcacagttgaacatgtggtggagcctggaggcaggtcattctcagcccaatctgacgtaataggtgagagggctattgcataacaggtggacctagctaggagaaacacaacatgaccccattatgggtcttgttcaatcatcatcatcgaagagacaaaggtcctgtttggggttctttctgcttctctcctctctctctctctctctctctctctctctttcataacttggttgcaaatgattgagtatcctaggatgtggtggtttatgttcatgaagcatgtatggcgcttgtgttgttgctcttgtaactaatactcatgtagtggaactagcgagtagtgctaatacaacactagtattgcttagtctttgcacacttttattgatagtatgtgaggaacttctagtgttcaaactcagcaccttagtaa

SEQ ID NO: 28941 - DNA, 1612 bp, Zea Mays
atgacggaaaatgattttagcaaaatcgtggtcgactcggccatcaccgacagaaaccggcttggacccgcccgcatgaaagccttgtgcggcttcagcttcaggtcgaagcgtatccctctgccctcccggctccctcaagcgctaatacggctggctgcgcgtcattctcttcctcttccggtgctcgtgctcgtgctcgtgctctccgccctccccctccgccacttcgcgcggaacggaacccaggccgccgccgacccagccaccgctaggcgtctaggcgaccgcgcggcatggtggcgcttttacactacctatgctagtttgcctgatgctacatttccacgatggttaagctgactatgatagcgcgtgtcactgatggccttccattgtcggagggattagatgatagtcgggatctcaaagatgctgacttctacaagcagcaagcaaaactgttgttcaagaacttgtccagagggcagcatgaggcgtcaaggatgtcaattgagacaggaccgtaccttttccactacatcattgaaggccgtgtttgctatttgactttgtgtgaccgttcttatcccaagaaacttgcattccagtatctcgaagatctcaaaaatgaatttgagaaagtcaatggcagccaaattgaaactgctgcaaggccatatgcatttattaaatttgatgcattcatacagaagaccaagaaactgtatttggataccagaacacagaggaaccttgctaagctgaacgatgagctctatgaggtgcaccagatcatgactcgcaatgttcaagaagttctcggtgttggtgaaaaactagaccaggtgagtgagatgtcaagtaggttgacttcggatactagaatctatgcagagaaggcgaaagatctcaatcgccaggcattgattcgtaaatatgcccccgttgctattgtgattgggatagtagtgatgctcttctgggtgaagaacaagatatggtgactggtgccatcttgcgttcacagttatcatgctggaaccagctgagttgtcttgtcttccctcgtgcaaccatatgtttgatcgtggttccaaaaagaaaagaaagatggctcgatggtttatcccgcatctgccgattcaagcgactactttagctatcaaaagcaaaaccacgttgaacatgtggtggagcctggaggcaggtcattctcagcccaatctgacgtaataggtgagagggctattgcataacaggtggacctagctaggagaaacacaacatgaccccattatgggtcttgttcaatcatcatcatcgaagagacaaaggtcctgtttggggttctttctgcttctctcctctctctctctctctctctctctctctctttcataacttggttgcaaatgattgagtatcctaggatgtggtggtttatgttcatgaagcatgtatggcgcttgtgttgttgctcttgtaactaatactcatgtagtggaactagcgagtagtgctaatacaacactagtattgcttagtctttgcacacttttattgatagtatgtgaggaacttctagtgttcaaactcagcaccttagtaa

SEQ ID NO: 28942 - DNA, 2678 bp, Zea Mays
tgtgccgtgtgcgcggaggcttcctccgcgctcaacccgccccactgccctctgcccctcctcgcctactaaaactaaaaccctcttcttcctcggcacactggccaccctcccaaaggtgcattttgtgtgaggatccagacgcaggaggatggctctcaagaagttgctgcagctcttttgtgtcggaaagaaggattccaagaagaaaggtaaattcatcgatccactctggcaaggtacccatgatgtccaatatcaagcttagcatatgttcttctttcccctgatgttttagctcataattgcatgagagtgtgacctggacacatttattataatttattttggtactggtgcagattatttattaaataacgagttatttagggacctaggagttggttgtgtagattcagctcaactgagctcaccatatcagggcttgataactattattgtataacttatatttaacaaataactcgttaacttcagttgaagtaagcactcaaaattcaaaactttgaaaggatcgagtaacttcttttcatttggagtatggtaggcctgactgaacctatgggttaaaacttcattatataaatgatgtcacatatctctgctctaagcctgaattatctatttgcctacatcctggatcccagcctctgcctcccgctcctctgtgaatgtcactgcaaacaagactcatttggatccctgttcaagtgggaatgacactgtaagcgtgcaaaaccatgaagttgaatcctcaagtacggtttcctcgtgggcaaggacagagcaaggaactgagattgctcatcatacgccctttagtcaatttgatgttgtccaagatttctcggatcaccactatgcaaagacttcagcaggaaaggtcacaaaggattgggtgaaggcaatccaaagtgaatgggatcttctacagaaaaacctacctgaatctatatacgttagagtctatgaggacaggactgatctgctgagggctgccatagtcgggccagcaggaactccataccatgatggtctgttcttcttcgatgtccgttttccttgcgaatacccaaagtgcccaccagtacgtgaccactagacatccatcatcctgcctctgcctctcttgtatagtttcttccattcaaagtgagcagcagtacttgattgatgtcgtgtgttcagaaagtatactaccattctggcggacttcggctgaacccgaacctgtacgagagcgggaaagtgtgcctgagccttctgaacacctggtggggcaaggggtgcgagaagtggggcaagtcgagctccagcatgctgcaggttctggtctccatccagggcctcgtgctgaatgacaggccatacttcaatgagccaggatccaagaactcggctgaaacgacaggtggtgagaggtgttccctggcttacaatcagacggccttcgtcagatcatgcaagacgatgctgtattcactccggaagcctccaatgcattttgagacccttgtgttgtggcacttccacgagcatgagcgtgccatcctcgacgcttgcagggcttacatgtctgggacagtcgttgggtcgtctgctgggactgggagcaaccgcagatacgtccatgacaagtgctttgcagaattccacaagtcgctgacgctctacactgaacatctcagggctgagtttgctgcaaacacaagacgagtgatggagctggaaacagaagacgagatcgtgcctagcatagcagctagcgtgaaatcgtgttgaaggcaaatgccccacggtgttgtatgttgctctcatcatcagatatttgctggcttagctatttctagcctcattctacttcattcatgtcacttgaataatctaattcatggcaattgtacctgtccctatacctagatggcttaaaatctgaaggtttattacagtttctttctgatgaatctgtcctctcttatgaaagtaattgctgactagttagttatctgtgcgttgcgacggaaaacgaacaccgctgataaaagtattagtagtaattaattttggatcacttcatgagatgtgctctttcggcatgaggaaaaggaggaaagactcattcatttttattcatcaatttaaacaaagtagaagaagcaactaaacaccatacatgttcatatatcaaacccatatattgtcatatatcaaactcatatattgtctaatagctatacctgtggtcaacaagatgttattaatcaattacgagatttcttatgaatacgcgatgtgtcaatactaatacgctattttttcctcaaaaacaatgatataaggatatgctattttgtaaacattagtaaagatttgtaaatagtttatattggctaattattgatactagttgtcggaggatattctgtatcgtgccccttggccctgacatagtagtcgacggcctgctacatgggtaggcccttgtactccatgacagtggtcatgtccacttgagtgtgcccgacacggcgcacgcgccacatgtgcatgtgctgaacctgatcagcggtgaatccccaatgcgcccgagcatcttgctcatcaaccgtatgtggacatggccgccgcacaccccaacatctccgatgcgtacacac

SEQ ID NO: 28943 - DNA, 3338 bp, Zea Mays
tgtgccgtgtgcgcggaggcttcctccgcgctcaacccgccccactgccctctgcccctcctcgcctactaaaactaaaaccctcttcttcctcggcacactggccaccctcccaaaggtgagtcgcttctcctcttccttgatcgccgatttccggattctttccttttcccctccgccgccggggattgtggttgtggttgtggcttccatatcctcatcctcatggcgtgatagaaggttgcttcgtttctttgattggccatggacgtacgtctttcgttttctcggtgggggatgggagggggttcttgatagtgatgcgctgctgctacagtgctcctgctcctgctcctgctgctcgacgctgacggctcgagcttatccctccggcctccggggtctcgctctctggattattcctacttctttttctttctttttgtctcatcttgaattgaaaaacttggccctgcggtgtctcgcctccactggtcactggagcactggaccgatgtatatagagagagaccgaccgacctggcgtcacgcacgcaccgcactgattgggctccaagatcggccgctgccaactgggggcctcaccgccacccgttcttggaaaacagcacgctacttgcttgaaagcaaagggagatacttgccgcgttgggattctccaactccaactccaaccaagacgaacgatttcatcccagtgcattttgtgtgaggatccagacgcaggaggatggctctcaagaagttgctgcagctcttttgtgtcggaaagaaggattccaagaagaaaggtaaattcatcgatccactctggcaaggtacccatgatgtccaatatcaagcttagcatatgttcttctttcccctgatgttttagctcataattgcatgagagtgtgacctggacacatttattataatttattttggtactggtgcagattatttattaaataacgagttatttagggacctaggagttggttgtgtagattcagctcaactgagctcaccatatcagggcttgataactattattgtataacttatatttaacaaataactcgttaacttcagttgaagtaagcactcaaaattcaaaactttgaaaggatcgagtaacttcttttcatttggagtatggtaggcctgactgaacctatgggttaaaacttcattatataaatgatgtcacatatctctgctctaagcctgaattatctatttgcctacatcctggatcccagcctctgcctcccgctcctctgtgaatgtcactgcaaacaagactcatttggatccctgttcaagtgggaatgacactgtaagcgtgcaaaaccatgaagttgaatcctcaagtacggtttcctcgtgggcaaggacagagcaaggaactgagattgctcatcatacgccctttagtcaatttgatgttgtccaagatttctcggatcaccactatgcaaagacttcagcaggaaaggtcacaaaggattgggtgaaggcaatccaaagtgaatgggatcttctacagaaaaacctacctggtcagtttaagcaaataatgattattgttaattggagaatttacacctgaaatgagctgatcttctgttgctgctagaatctatatacgttagagtctatgaggacaggactgatctgctgagggctgccatagtcgggccagcaggaactccataccatgatggtctgttcttcttcgatgtccgttttccttgcgaatacccaaagtgcccaccaaaagtatactaccattctggcggacttcggctgaacccgaacctgtacgagagcgggaaagtgtgcctgagccttctgaacacctggtggggcaaggggtgcgagaagtggggcaagtcgagctccagcatgctgcaggttctggtctccatccagggcctcgtgctgaatgacaggccatacttcaatgagccaggatccaagaactcggctgaaacgacaggtggtgagaggtgttccctggcttacaatcagacggccttcgtcagatcatgcaagacgatgctgtattcactccggaagcctccaatggtgaactgaacaaatatgaatggatacttcatctcttgattgattgattgattgattgatatagcttcatctccttccctgcagcattttgagacccttgtgttgtggcacttccacgagcatgagcgtgccatcctcgacgcttgcagggcttacatgtctgggacagtcgttgggtcgtctgctgggactgggagcaaccgcagatacgtccatgacaagtgctttgcagaattccacaagtcgctgacgctctacactgaacatctcagggctgagtttgctgcaaacacaagacgagtgatggagctggaaacagaagacgagatcgtgcctagcatagcagctagcgtgaaatcgtgttgaaggcaaatgccccacggtgttgtatgttgctctcatcatcagatatttgctggcttagctatttctagcctcattctacttcattcatgtcacttgaataatctaattcatggcaattgtacctgtccctatacctagatggcttaaaatctgaaggtttattacagtttctttctgatgaatctgtcctctcttatgaaagtaattgctgactagttagttatctgtgcgttgcgacggaaaacgaacaccgctgataaaagtattagtagtaattaattttggatcacttcatgagatgtgctctttcggcatgaggaaaaggaggaaagactcattcatttttattcatcaatttaaacaaagtagaagaagcaactaaacaccatacatgttcatatatcaaacccatatattgtcatatatcaaactcatatattgtctaatagctatacctgtggtcaacaagatgttattaatcaattacgagatttcttatgaatacgcgatgtgtcaatactaatacgctattttttcctcaaaaacaatgatataaggatatgctattttgtaaacattagtaaagatttgtaaatagtttatattggctaattattgatactagttgtcggaggatattctgtatcgtgccccttggccctgacatagtagtcgacggcctgctacatgggtaggcccttgtactccatgacagtggtcatgtccacttgagtgtgcccgacacggcgcacgcgccacatgtgcatgtgctgaacctgatcagcggtgaatccccaatgcgcccgagcatcttgctcatcaaccgtatgtggacatggccgccgcacaccccaacatctccgatgcgtacacac

SEQ ID NO: 28944 - DNA, 1089 bp, Zea Mays
ctgctgctagctaccccagggtggctttcctgccagcccattcattataatcactcatctcatggcaccgtggctctgcctggtgatcacaactccacgtcacacacctcacagagctgcagcagcatcagctgccacctcctgcctctcctccttccttcctgcctgcataggttgctacacgtatatattctgaagaagagatcgagatgaccagcgtgtggaagaccaaggttctgcctggcctcaacaagatctttgacaaggatggcaagaaggctgcagctgcaggcttcttgaagtccttcaacaaggaggagtttgacaaggagattgaggacaagaagacagagctggagcccaaggtcgtggaggcctacgaagcatctcctcctgaggtcaaggctctcttcaaggataagaagccagtcaaggtcagcaagaagaactcggctgcagtcaccaagttcctcgatgagctggctaagattgacttccctggagccaaggtggtgagcgaggcggtggccaagtccggcacctcgcccctgcttccggcgatcaccttcatcttggacaaggtcgcaccgtttatccccaaggaggagcccaaggaagagccggcggcggtggtagaggagaagaaggaagaagagaagaaggaagaggaggataagccggctgccgaagaggcggcgccgccagcagcagctgctgctgctgctgaggagaagtgatcctgtcgacggatcgagcatgcaaagcgctccctcctcgctcccttgcttgctgctggtaaattaaattaagttgccgtgatacttaagcgtagccgcacggagtgaaaagttatcaagtaaaagcagacaaacacttggcatgcatggacattaatttgttattctttgtaccgtcgtcgtctcgatgaaccgcgtgtacatttgtagtgtggggttttctttgtttccgatttgggggtgatcattacaagaatgtgtaattatttatgttcatatgtttgttgatgatggaaggacatatttaagaagacaactcttttgtgtatatatatttcttattaaaaaaaaa

SEQ ID NO: 28945 - DNA, 1076 bp, Zea Mays
gctggtgcccgagagtactccctgaggcgattgcttttagatgttcctgacaatgttgacatggttatcttccccaattatgagagcagcattgaacgtgatgacattaaggatccttttactgaggtttccatgtttaagaaaaattatgaccatcttccaaaggatacatactttggcctgtacaaagaagcaacacgtggtaatccaaactacttccttacttatggtaatgggaaatcagctgcaagggttcaggagcatttgcgaccgaacggtgctcatagatggcataattacatgaaatccccaaatgaaatcaaattggaggaggctgctattctgcattacacctacacaaagttctcagacctaacctcaaggagggatagatgcggctgcaaaccaactaaagaagatgtgaagcgatgttttatcttggaatttgaccgtttggcctttataattgcatcaacagctactgaggaggagatgaggaactggtacaaggaacatgttgtatggaccgatagagacaccaatttgaaacttttaaggaagagtgtcttgacacgcatatatgcgcccatggctattatccgtggcctcaaggaatctggcgtctttaccaatgcagtaacatcagcgaaagcacagtcaaaaacgaagtcatcaaacatgggtctcggaaacaaggatcctatccagccaaacggaactgctggtcagtccacactggaaggcagtcatggaaagttgcaggcaaccgtgagaaagatcctggaaatggttgacacacaggaagaagcagcgatgccaccaatgtcgcccccgggttttcttgagctgactgaaagtgtcactgccttttcatgacgctttggtttaaccatgcgtgatgcatgcagccttgagcatacgaatagcattggcttgtttggtcgtcgtcgtatcttgcaaccccagaatgaccagatgtatcgtgctgatgtaaaattgctagttatcaccatgcaaagagctttaaatcaacttcagaaggtattataaagttggtgcaaattataacaaatcca

SEQ ID NO: 28946 - DNA, 3284 bp, Zea Mays
gcccatttagatcttgctggttcttgtggattttatctcttttatgtgtttccccgtttcgtcgtttttcggtgctcctttgcctttgtttccccgtttttttttctttgggggttgagctctgaggttttcatacggggtttcatctctagcctaccccaacgtgcttgggacaaaaaggctttgttgttgttgttgtatagaatatgttcatgcataagttatgtacttgagttcacaaaacaaaatgaaacatatcaagttcacccacataagttacaacttgtatctatgatcagtaaccataaactcttgatgactgaaagtctgaaactagggagggcatcactgtctgaactggaagactgaacctggaactcttgatgattgaaagtatagaactagggagggtggcgcttcactaacctagcagcgctggactgttggaggatggagagggagagaggaaagaggagaggagggaggctgtcggcgctggacgctggcaccggagggagggcggcagacgacgctggagatggatgcaggtgggtggcgacgacgctagagaagagtcgggcggcgacgctggaggagggagtcgggcggcgatgcggcggcgctagcaggacctggaggagaggatggaggcgggcggcggcgctagcaggacctggaggagaggatggaggcgggcggcggcgctagcaatagcacaaaagagagtattgcatgccctatgatctatgtattttttggcctgtgaaaggcccaataacacgtagaacgtcctaaacacgcctagaacgtccgaaaatgagaaaacgacgtttaagcaacgtttaaacgtgataaacgaacgttctacacgtttttgctaaaacgaccggacgttctaaactccaaccatgttttcttgtttaaacgacgtttaagcgacgttttaataacaatgtagcttccaacctccaattgtgcactagaatttcgaaccagctaatgtgctccttgataaaaaagttcttagtgtgtgttgatgaatgtggactggtagaattgatggcaccaagttcagtcactcaagtaagctatgatattgtgttttatgtttttagagtgactaaaaatggggatgatgcaatcatggttctatttacatattttttgtcatgtccagactatttgaattgttcacattactatgactaaactctctcaaaaatagaatatcattgtgcatcttatggtttaattattgagtaaaactaatgatctgtcataatatttgcaaaaggaccaaaatattggcatactatgttttgtaattgaacttttatttgacacactatattttttaattgtacttttattatattaaaaccgggcattattaaatcctagatctgacactatctacaacatgcatggtcttttataacgaacgtggcatggcaatggagcaatccgtcaccaaatggttctgtttacgacgttaaatacccaatttagcttagtgaccaagcatgaattccaatgttttaaaagaaaaatatttatttaatccatattagcatgcatggcccatctatgtggactagtgaccatggtttaaaaggcgacgcctaggcgtccaggcgctagattttgctaggcgtcggcgccgcccaggtaagaacgagcatggcgtccaccttggcgaggtttctgtcaagtgtcaagaactcaagactgtgcagcgagtacccttggtttcaggtttctgtcaagactgcagcgagtagcgacaacataatgtcttctccaaatgaagctccatcttctgtggctggtgagtacgacccgaagagcgatcctacccggaagccacaaaagtctactgatccagggtggaattctgcactcatggagtactatattggccctgagggcagagggactgttgaagaaattagcactaaattgaaggagggttgcccaagttacttcaatgaatcaaactacaaatattacttggcagtggagtgccttgagagagcatctatgattaataaccctgatgagagagatattcttgctagagatgctttcaatcttttgactaaaattccagaatctactgatttgagtgtcatatgcaagagatttgagaacctaaggttagtgacttcctctgataacaaatattgtatttggctagtaaggtgtcgcctaggtgccccgcctaagtcgcctaggcgttcaggcggtggctggacgcctagttccgcctagccgcctttaaaatcatgctagtgactagtctaatttattgtgtgcctccatgtgcgtaagtagcgaaacgacctctagctgagttggttaggtggtctgagtagcactcctcaggtcctgagttcgaatcccagtgagagtgaatttcaagctgaggttaaaaaggtcactagttggttccctggttgtgtgcacgcgagatggactgacctatgggggttggatcctcgtgtaggggctgggagggctcaaagcacgagtaaagatccagcctatagagggctaaccctcatgctgcactggagtcagttttcgtgaactttcttggttggggctccgattgagcttctttttaatataataccatggtgcggtctttcccctaccggtcgagttttgtttttgaacaaacgcaggagagttgcgtgtcatttcattaagtagaagaaacataggagagacaagactaccggtcgagttttttccatgtgtgtaagcaagaactgccccagcccttcctttcatatgagaaatgaactgccattttgcatgtgctaatttttctcggacacacaacatcatgcacccatacatgcagatgaagtaaaataataaatgttgtatgagagagtaacggacgggttatatgcgcctaggagcctagaagcgcataaatgagagctaagacgtgggcacgctatattccaagactggacaaaaaatggttccgccgtgcattctactttaagacagtgggagtaaagtgcaagtaccattagttaatttgtataggaaaaaacaaataagaaaataaactgcagtttacggtaagaaactctcctagtttaaggggtaaaagaataggagatcctagtacagtgtacaaaaaataggaaaaacaaaaaatcagctcaagggcaagaattgagccagcaacttgcagattaggactgaaaatgaataccaccagaccacaaattcttttgttgtccatagcagaaaataattattat

SEQ ID NO: 28947 - DNA, 3701 bp, Zea Mays
gcccatttagatcttgctggttcttgtggattttatctcttttatgtgtttccccgtttcgtcgtttttcggtgctcctttgcctttgtttccccgtttttttttctttgggggttgagctctgaggttttcatacggggtttcatctctagcctaccccaacgtgcttgggacaaaaaggctttgttgttgttgttgtatagaatatgttcatgcataagttatgtacttgagttcacaaaacaaaatgaaacatatcaagttcacccacataagttacaacttgtatctatgatcagtaaccataaactcttgatgactgaaagtctgaaactagggagggcatcactgtctgaactggaagactgaacctggaactcttgatgattgaaagtatagaactagggagggtggcgcttcactaacctagcagcgctggactgttggaggatggagagggagagaggaaagaggagaggagggaggctgtcggcgctggacgctggcaccggagggagggcggcagacgacgctggagatggatgcaggtgggtggcgacgacgctagagaagagtcgggcggcgacgctggaggagggagtcgggcggcgatgcggcggcgctagcaggacctggaggagaggatggaggcgggcggcggcgctagcaggacctggaggagaggatggaggcgggcggcggcgctagcaatagcacaaaagagagtattgcatgccctatgatctatgtattttttggcctgtgaaaggcccaataacacgtagaacgtcctaaacacgcctagaacgtccgaaaatgagaaaacgacgtttaagcaacgtttaaacgtgataaacgaacgttctacacgtttttgctaaaacgaccggacgttctaaactccaaccatgttttcttgtttaaacgacgtttaagcgacgttttaataacaatgtagcttccaacctccaattgtgcactagaatttcgaaccagctaatgtgctccttgataaaaaagttcttagtgtgtgttgatgaatgtggactggtagaattgatggcaccaagttcagtcactcaagtaagctatgatattgtgttttatgtttttagagtgactaaaaatggggatgatgcaatcatggttctatttacatattttttgtcatgtccagactatttgaattgttcacattactatgactaaactctctcaaaaatagaatatcattgtgcatcttatggtttaattattgagtaaaactaatgatctgtcataatatttgcaaaaggaccaaaatattggcatactatgttttgtaattgaacttttatttgacacactatattttttaattgtacttttattatattaaaaccgggcattattaaatcctagatctgacactatctacaacatgcatggtcttttataacgaacgtggcatggcaatggagcaatccgtcaccaaatggttctgtttacgacgttaaatacccaatttagcttagtgaccaagcatgaattccaatgttttaaaagaaaaatatttatttaatccatattagcatgcatggcccatctatgtggactagtgaccatggtttaaaaggcgacgcctaggcgtccaggcgctagattttgctaggcgtcggcgccgcccaggtaagaacgagcatggcgtccaccttggcgaggtaggcgtctgggcgacgccttcttccccctgggcgacgcctgaccttggggttgttggccttagtcgccgcgagcagaacccaaattggcgcgcgttttgggcttttggcgcgggaataggtaaggaaagtaggaacataggggaatagataaggacgctgcctcatgtgcgcgcgcgacagcccctccctatgcgcgcggctgctgctccctgtccgtgcgcggctcctcctgtgcgcgtggctcctccctgctccctgcgcgcggctgcagctccctaggcgcgcccctccctgcacggcggcaggtcttccttggtaggtcctcctcccctgcttcctcctcccctgctttctctcaggtttctgtcaagactcaagaatgatgtttctttcccctacttcccctggtttcaggtttctgtcaagtgtcaagaactcaagactgtgcagcgagtacccttggtttcaggtttctgtcaagactgcagcgagtagcgacaacataatgtcttctccaaatgaagctccatcttctgtggctggtgagtacgacccgaagagcgatcctacccggaagccacaaaagtctactgatccagggtggaattctgcactcatggagtactatattggccctgagggcagagggactgttgaagaaattagcactaaattgaaggagggttgcccaagttacttcaatgaatcaaactacaaatattacttggcagtggagtgccttgagagagcatctatgattaataaccctgatgagagagatattcttgctagagatgctttcaatcttttgactaaaattccagaatctactgatttgagtgtcatatgcaagagatttgagaacctaaggttagtgacttcctctgataacaaatattgtatttggctagtaaggtgtcgcctaggtgccccgcctaagtcgcctaggcgttcaggcggtggctggacgcctagttccgcctagccgcctttaaaatcatgctagtgactagtctaatttattgtgtgcctccatgtgcgtaagtagcgaaacgacctctagctgagttggttaggtggtctgagtagcactcctcaggtcctgagttcgaatcccagtgagagtgaatttcaagctgaggttaaaaaggtcactagttggttccctggttgtgtgcacgcgagatggactgacctatgggggttggatcctcgtgtaggggctgggagggctcaaagcacgagtaaagatccagcctatagagggctaaccctcatgctgcactggagtcagttttcgtgaactttcttggttggggctccgattgagcttctttttaatataataccatggtgcggtctttcccctaccggtcgagttttgtttttgaacaaacgcaggagagttgcgtgtcatttcattaagtagaagaaacataggagagacaagactaccggtcgagttttttccatgtgtgtaagcaagaactgccccagcccttcctttcatatgagaaatgaactgccattttgcatgtgctaatttttctcggacacacaacatcatgcacccatacatgcagatgaagtaaaataataaatgttgtatgagagagtaacggacgggttatatgcgcctaggagcctagaagcgcataaatgagagctaagacgtgggcacgctatattccaagactggacaaaaaatggttccgccgtgcattctactttaagacagtgggagtaaagtgcaagtaccattagttaatttgtataggaaaaaacaaataagaaaataaactgcagtttacggtaagaaactctcctagtttaaggggtaaaagaataggagatcctagtacagtgtacaaaaaataggaaaaacaaaaaatcagctcaagggcaagaattgagccagcaacttgcagattaggactgaaaatgaataccaccagaccacaaattcttttgttgtccatagcagaaaataattattat

SEQ ID NO: 28948 - DNA, 2934 bp, Zea Mays
gcccatttagatcttgctggttcttgtggattttatctcttttatgtgtttccccgtttcgtcgtttttcggtgctcctttgcctttgtttccccgtttttttttctttgggggttgagctctgaggttttcatacggggtttcatctctagcctaccccaacgtgcttgggacaaaaaggctttgttgttgttgttgtatagaatatgttcatgcataagttatgtacttgagttcacaaaacaaaatgaaacatatcaagttcacccacataagttacaacttgtatctatgatcagtaaccataaactcttgatgactgaaagtctgaaactagggagggcatcactgtctgaactggaagactgaacctggaactcttgatgattgaaagtatagaactagggagggtggcgcttcactaacctagcagcgctggactgttggaggatggagagggagagaggaaagaggagaggagggaggctgtcggcgctggacgctggcaccggagggagggcggcagacgacgctggagatggatgcaggtgggtggcgacgacgctagagaagagtcgggcggcgacgctggaggagggagtcgggcggcgatgcggcggcgctagcaggacctggaggagaggatggaggcgggcggcggcgctagcaggacctggaggagaggatggaggcgggcggcggcgctagcaatagcacaaaagagagtattgcatgccctatgatctatgtattttttggcctgtgaaaggcccaataacacgtagaacgtcctaaacacgcctagaacgtccgaaaatgagaaaacgacgtttaagcaacgtttaaacgtgataaacgaacgttctacacgtttttgctaaaacgaccggacgttctaaactccaaccatgttttcttgtttaaacgacgtttaagcgacgttttaataacaatgtagcttccaacctccaattgtgcactagaatttcgaaccagctaatgtgctccttgataaaaaagttcttagtgtgtgttgatgaatgtggactggtagaattgatggcaccaagttcagtcactcaagtaagctatgatattgtgttttatgtttttagagtgactaaaaatggggatgatgcaatcatggttctatttacatattttttgtcatgtccagactatttgaattgttcacattactatgactaaactctctcaaaaatagaatatcattgtgcatcttatggtttaattattgagtaaaactaatgatctgtcataatatttgcaaaaggaccaaaatattggcatactatgttttgtaattgaacttttatttgacacactatattttttaattgtacttttattatattaaaaccgggcattattaaatcctagatctgacactatctacaacatgcatggtcttttataacgaacgtggcatggcaatggagcaatccgtcaccaaatggttctgtttacgacgttaaatacccaatttagcttagtgaccaagcatgaattccaatgttttaaaagaaaaatatttatttaatccatattagcatgcatggcccatctatgtggactagtgaccatggtttaaaaggcgacgcctaggcgtccaggcgctagattttgctaggcgtcggcgccgcccaggtaagaacgagcatggcgtccaccttggcgaggtttctgtcaagtgtcaagaactcaagactgtgcagcgagtacccttggtttcaggtttctgtcaagactgcagcgagtagcgacaacataatgtcttctccaaatgaagctccatcttctgtggctggtgagtacgacccgaagagcgatcctacccggaagccacaaaagtctactgatccagggtggaattctgcactcatggagtactatattggccctgagggcagagggactgttgaagaaattagcactaaattgaaggagggttgcccaagttacttcaatgaatcaaactacaaatattacttggcagtggagtgccttgagagagcatctatgattaataaccctgatgagagagatattcttgctagagatgctttcaatcttttgactaaaattccagaatctactgatttgagtgtcatatgcaagagatttgagaacctaaggggctgggagggctcaaagcacgagtaaagatccagcctatagagggctaaccctcatgctgcactggagtcagttttcgtgaactttcttggttggggctccgattgagcttctttttaatataataccatggtgcggtctttcccctaccggtcgagttttgtttttgaacaaacgcaggagagttgcgtgtcatttcattaagtagaagaaacataggagagacaagactaccggtcgagttttttccatgtgtgtaagcaagaactgccccagcccttcctttcatatgagaaatgaactgccattttgcatgtgctaatttttctcggacacacaacatcatgcacccatacatgcagatgaagtaaaataataaatgttgtatgagagagtaacggacgggttatatgcgcctaggagcctagaagcgcataaatgagagctaagacgtgggcacgctatattccaagactggacaaaaaatggttccgccgtgcattctactttaagacagtgggagtaaagtgcaagtaccattagttaatttgtataggaaaaaacaaataagaaaataaactgcagtttacggtaagaaactctcctagtttaaggggtaaaagaataggagatcctagtacagtgtacaaaaaataggaaaaacaaaaaatcagctcaagggcaagaattgagccagcaacttgcagattaggactgaaaatgaataccaccagaccacaaattcttttgttgtccatagcagaaaataattattat

SEQ ID NO: 28949 - DNA, 793 bp, Zea Mays
caagcgcaatataaacatcgcgccttgcgctgggcgcataaaaccctactaaccgcgtctcctctccagcgcccgccgtcgccgccgccctcctcttggtcccgccgtccgtcgaggtcatcatggtgagggtcagtgtgctcaacgatgcgctcaagtccatgtacaatgcagagaagaggggcaagaggcaggtcatgatcaggccgtcgtccaaggtgatcatcaagttcctgacggtcatgcagcgtcatggatacattggcgagttcgagtacgtggatgaccacagagctgggaagattgtggtggaactgaacggcagactaaacaaatgcggtgtaattagcccccggtttgatgttggggtaaaggaaatcgaaggctggactgcgaggctgcttccgtctcgccagtttggctatatcgtgcttacaacctctgcgggaattatggatcacgaggaggcccgacgcaagaacgtcggaggcaaagtccttggtttcttttattaattaaagggtcgtccgagtttcttctattaaatgaagctgatgaggaagactgtgacgatggtgatgataagtactgagtctagcgatgcgccagtcatcttcgtgtggaagattgcccatgttatatccgctgtactttgatgatgatactatttgagagttatataagtctggatgatgtaataaagttactatactctcttttacacctttattgcattgtcttttgatatattacacttgtgacatcaatatatgagtagaaaataaatcctgtc

SEQ ID NO: 28950 - DNA, 2457 bp, Zea Mays
aaggaacctgcaggccagggaatacaaaacaaaacaaaagctcagattcctctcctctccaaacaggtcctatcccttttgcttctcccttgctgttgttttctccctctagagactagagaccccatctctagaaagagaaagcaggacaagcaaagctaccggccagacagcagctagctatagctctaaagattgccctgacctgatcagatgatatgagctttttgcaagatggtggctatagcagctagagtagtatttctgttgtgatgtgctcaagccaagcatgatatgggtggagaattcaggagctctttgatgcagcagatggtgtggagtagtagtggcggcggtacagacagcaagaatatgatgagtagtagtttgatgccttgtgccgaggagcaagaagaagagggctccaacaagatgccccctttatcttctccttccatgctcctcctcccgcagcaccacctccaaatcttctcgggcctgcctctgcctctgcctcctgaggtgctgaacgacagctctgctacttctgatctgcatgatggccgggaaagcagcatgccggagtcatggagccagctgcttcttgggggattagtcggagatcacgagagatacaacgctgccacagctttactgtcaaaaggattagaggagcgacctgcagcttacaattgctatgaccctggacatggtggtggtgaggagatccagacatcggggaccaacattaggtctcatcaggtgagccaggcgctcttagcgtcgtcctctcctaggtcctgcatcaccacaagcctcggcagcaacatgctggacttctcaaacaccaccgtgccgccggcaccggatctgaagaatcatcactccgataactcttctgagggtaacagcgctggaagtggttcggctccaaagaaggctagggttcagacctcttcttcagcacagtctaccctaaaggtaagaaaggagaggcttggggatagaatcactgcacttcaccagatagtgtccccatttggcaaggtatatatacacggctagctctgcttacctagctaactatatactacatcaattgtaaagattaaagaatatatatcactatatgcatgttgatagattaaaaaaggaccataccactagatcgaattaagagctcggttatttacctcgtcatatcaaactaaaggatatatatcactgcatgcatatattttcttctctagcagatgtcagcatgcatgatcctattgtcactgctgtctgtcactcatagatgcatacaaatgtggatgcttttgcccatgcattctgctgctacgacgccatgcattcattcgtttcttctccttctagctgctccgccccctttaattctcccgtttcttttcagcccatgcatacaaatgtggatgcttttgcccatgcattctgcatgcagtttctttcgctttagggtttaggaggtgcgcggagtgacaatcactgaaaacaagcaagtccctgacatgcatatatgcatattacttgttgttgttgttgtttttttttttttgcagactgacactgcctccgtcctacaggagactattggctacattagattcctcctgagtcaaatcgaggctctcagcttcccttacttgggccatgacaacggggactccatgcaacaacataatactaataacttgctgctaaaccatagcactagcgatgccatggtacaagttcaaggtcctccgatgaccaatcaggagggggaggtctatggcaatggcattgaggagggcagcaggaaggatttgaggagcagggggctgtgcctggtgccagtgtcgtgcacgtcgcacctcgccgacgacaacggcccctcagacttctgggcggtgtccgcggcgccgtccccgcctcctccgcctccgccattcgccggcatcatctggcgatagagtcgtgtccagaccggcgtcgatccacccatcagtcgcatgcattattcatgcatgcatgacgtaaatatatacatatagtatcatgcatcactataccattggtttttttttaaaaaaaaatgtttggttgcttgccagggttgctagctagctatagctttgtttgaccgatgagctgaggtatccatcgagcatggagctacctgcagcctataccaggctgctgtatactgtacgtatgtagtacaccgtagtatatgtactgtacgttgagatgcaggagtgcatgcacatatcatcaggagccgtcattctgtcggacgagctgcctgcagtgtataggcagctaggctgattgctcttgatggtatgacgatgcgtcgtgtatgtaacactgctactatatatataccatttttatatgcaattgtttgctggtcacatatgagctgcaactgattccagaattggataattg

SEQ ID NO: 28951 - DNA, 2441 bp, Zea Mays
ttttgcttctcccttgctgttgttttctccctctagagactagagaccccatctctagaaagagaaagcaggacaagcaaagctaccggccagacagcagctagctatagctctaaagattgccctgacctgatcagatgatatgagctttttgcaagatggtggctatagcagctagagtagtatttctgttgtgatgtgctcaagccaagcatgatatgggtggagaattcaggagctctttgatgcagcagatggtgtggagtagtagtggcggcggtacagacagcaagaatatgatgagtagtagtttgatgccttgtgccgaggagcaagaagaagagggctccaacaagatgccccctttatcttctccttccatgctcctcctcccgcagcaccacctccaaatcttctcgggcctgcctctgcctctgcctcctgaggtgctgaacgacagctctgctacttctgatctgcatgatggccgggaaagcagcatgccggagtcatggagccagctgcttcttgggggattagtcggagatcacgagagatacaacgctgccacagctttactgtcaaaaggattagaggagcgacctgcagcttacaattgctatgaccctggacatggtggtggtgaggagatccagacatcggggaccaacattaggtctcatcaggtgagccaggcgctcttagcgtcgtcctctcctaggtcctgcatcaccacaagcctcggcagcaacatgctggacttctcaaacaccaccgtgccgccggcaccggatctgaagaatcatcactccgataactcttctgagggtaacagcgctggaagtggttcggctccaaagaaggctagggttcagacctcttcttcagcacagtctaccctaaaggtaagaaaggagaggcttggggatagaatcactgcacttcaccagatagtgtccccatttggcaaggtatatatacacggctagctctgcttacctagctaactatatactacatcaattgtaaagattaaagaatatatatcactatatgcatgttgatagattaaaaaaggaccataccactagatcgaattaagagctcggttatttacctcgtcatatcaaactaaaggatatatatcactgcatgcatatattttcttctctagcagatgtcagcatgcatgatcctattgtcactgctgtctgtcactcatagatgcatacaaatgtggatgcttttgcccatgcattctgctgctacgacgccatgcattcattcgtttcttctccttctagctgctccgccccctttaattctcccgtttcttttcagcccatgcatacaaatgtggatgcttttgcccatgcattctgcatgcagtttctttcgctttagggtttaggaggtgcgcggagtgacaatcactgaaaacaagcaagtccctgacatgcatatatgcatattacttgttgttgttgttgtttttttttttttgcagactgacactgcctccgtcctacaggagactattggctacattagattcctcctgagtcaaatcgaggctctcagcttcccttacttgggccatgacaacggggactccatgcaacaacataatactaataacgtacggtacgtgtgcgtgcgaataaaggtgcatgcgcaggcacgtcacgtgcgaataaagttgctgctaaaccatagcactagcgatgccatggtacaagttcaaggtcctccgatgaccaatcaggagggggaggtctatggcaatggcattgaggagggcagcaggaaggatttgaggagcagggggctgtgcctggtgccagtgtcgtgcacgtcgcacctcgccgacgacaacggcccctcagacttctgggcggtgtccgcggcgccgtccccgcctcctccgcctccgccattcgccggcatcatctggcgatagagtcgtgtccagaccggcgtcgatccacccatcagtcgcatgcattattcatgcatgcatgacgtaaatatatacatatagtatcatgcatcactataccattggtttttttttaaaaaaaaatgtttggttgcttgccagggttgctagctagctatagctttgtttgaccgatgagctgaggtatccatcgagcatggagctacctgcagcctataccaggctgctgtatactgtacgtatgtagtacaccgtagtatatgtactgtacgttgagatgcaggagtgcatgcacatatcatcaggagccgtcattctgtcggacgagctgcctgcagtgtataggcagctaggctgattgctcttgatggtatgacgatgcgtcgtgtatgtaacactgctactatatatataccatttttatatgcaattgtttgctggtcacatatgagctgcaactgattccagaattggataattg

SEQ ID NO: 28952 - DNA, 2240 bp, Zea Mays
ttttgcttctcccttgctgttgttttctccctctagagactagagaccccatctctagaaagagaaagcaggacaagcaaagctaccggccagacagcagctagctatagctctaaagattgccctgacctgatcagatgatatgagctttttgcaagatggtggctatagcagctagagtagtatttctgttgtgatgtgctcaagccaagcatgatatgggtggagaattcaggagctctttgatgcagcagatggtgtggagtagtagtggcggcggtacagacagcaagaatatgatgagtagtagtttgatgccttgtgccgaggagcaagaagaagagggctccaacaagatgccccctttatcttctccttccatgctcctcctcccgcagcaccacctccaaatcttctcgggcctgcctctgcctctgcctcctgaggtgctgaacgacagctctgctacttctgatctgcatgatggccgggaaagcagcatgccggagtcatggagccagctgcttcttgggggattagtcggagatcacgagagatacaacgctgccacagctttactgtcaaaaggattagaggagcgacctgcagcttacaattgctatgaccctggacatggtggtggtgaggagatccagacatcggggaccaacattaggtctcatcagggtaacagcgctggaagtggttcggctccaaagaaggctagggttcagacctcttcttcagcacagtctaccctaaaggtaagaaaggagaggcttggggatagaatcactgcacttcaccagatagtgtccccatttggcaaggtatatatacacggctagctctgcttacctagctaactatatactacatcaattgtaaagattaaagaatatatatcactatatgcatgttgatagattaaaaaaggaccataccactagatcgaattaagagctcggttatttacctcgtcatatcaaactaaaggatatatatcactgcatgcatatattttcttctctagcagatgtcagcatgcatgatcctattgtcactgctgtctgtcactcatagatgcatacaaatgtggatgcttttgcccatgcattctgctgctacgacgccatgcattcattcgtttcttctccttctagctgctccgccccctttaattctcccgtttcttttcagcccatgcatacaaatgtggatgcttttgcccatgcattctgcatgcagtttctttcgctttagggtttaggaggtgcgcggagtgacaatcactgaaaacaagcaagtccctgacatgcatatatgcatattacttgttgttgttgttgtttttttttttttgcagactgacactgcctccgtcctacaggagactattggctacattagattcctcctgagtcaaatcgaggctctcagcttcccttacttgggccatgacaacggggactccatgcaacaacataatactaataacttgctgctaaaccatagcactagcgatgccatggtacaagttcaaggtcctccgatgaccaatcaggagggggaggtctatggcaatggcattgaggagggcagcaggaaggatttgaggagcagggggctgtgcctggtgccagtgtcgtgcacgtcgcacctcgccgacgacaacggcccctcagacttctgggcggtgtccgcggcgccgtccccgcctcctccgcctccgccattcgccggcatcatctggcgatagagtcgtgtccagaccggcgtcgatccacccatcagtcgcatgcattattcatgcatgcatgacgtaaatatatacatatagtatcatgcatcactataccattggtttttttttaaaaaaaaatgtttggttgcttgccagggttgctagctagctatagctttgtttgaccgatgagctgaggtatccatcgagcatggagctacctgcagcctataccaggctgctgtatactgtacgtatgtagtacaccgtagtatatgtactgtacgttgagatgcaggagtgcatgcacatatcatcaggagccgtcattctgtcggacgagctgcctgcagtgtataggcagctaggctgattgctcttgatggtatgacgatgcgtcgtgtatgtaacactgctactatatatataccatttttatatgcaattgtttgctggtcacatatgagctgcaactgattccagaattggataattg

SEQ ID NO: 28953 - DNA, 793 bp, Zea Mays
caccggccagaccgtttcagcaggccaccttttttgcacgcctgcctgcctttgctgctaaaccatagcactagcgatgccatggtacaagttcaaggtcctccgatgaccaatcaggagggggaggtctatggcaatggcattgaggagggcagcaggaaggatttgaggagcagggggctgtgcctggtgccagtgtcgtgcacgtcgcacctcgccgacgacaacggcccctcagacttctgggcggtgtccgcggcgccgtccccgcctcctccgcctccgccattcgccggcatcatctggcgatagagtcgtgtccagaccggcgtcgatccacccatcagtcgcatgcattattcatgcatgcatgacgtaaatatatacatatagtatcatgcatcactataccattggtttttttttaaaaaaaaatgtttggttgcttgccagggttgctagctagctatagctttgtttgaccgatgagctgaggtatccatcgagcatggagctacctgcagcctataccaggctgctgtatactgtacgtatgtagtacaccgtagtatatgtactgtacgttgagatgcaggagtgcatgcacatatcatcaggagccgtcattctgtcggacgagctgcctgcagtgtataggcagctaggctgattgctcttgatggtatgacgatgcgtcgtgtatgtaacactgctactatatatataccatttttatatgcaattgtttgctggtcacatatgagctgcaactgattccagaattggataattg

SEQ ID NO: 28954 - DNA, 1263 bp, Zea Mays
agaggatctgcgtggaacgtgtacggggtcctcaactacctgcaagcgttggttgagaagtccatgatcacgcagatcctcgagaaggagaaggagggcctggagcagttcactgccaccgatggctacgactacgagggtggcagcaacgtgctcaaggtgctgggctactacagcatgattggcctcctaaggatacactgtctcctcggggattaccacaccggcctcaagtgcctcacgcccatcgacctcaaccagcaaggggtctacaccattgtcattgggagccacatctcagccatctaccactacggcttcgcaaaccttatgatgcgcaggtatgttgaggccactcgtgaattcaacaagattcttctgtatatcctcaagtacaagcagtaccaccagaattcccctcagtatgatcagatactgaagaaaaatgagcagatgtatgcattgttggcaatttgcctatctttgtgcccacagaacaagctcattgatgaaaatgttagcacccagctgaaagaaaagtataatgacaagatgacaaagatgcagaggtatgatgatgaagcatacgctgcttatgatgagctattctcgtatgcttgccccaagttcattacaccgtcgcctccaattctggaccagccgctaacaaactataaccaggatgcataccgtcttcagttgaagttgtttctctatgaagtaaagcagcaacagttgctttctgggattcggagttatctgaagctatattcaacaataaccattagcaaacttgcccaatatatggaagtggatgaagcaacactaagttgacagtgaaggaaagatagtatcaagtgcagactttgacttctacatcgtcgaggatgtgattcatgttgtggagtccaaacctaccaagcgtcatggtgattactttttgagacaaattttgaagtttgaggaaatgattggtgaactggagaaggtacagcttgactgaaatctgatagcgatcatggagagaaatgtcactgtttcctttttgctctcttttgtactccgttgaaaccccatcttttttttttttgtttccttattgactctgaagcccgttgaaaccggccattattaaccgtgtaccgtgtaatgttacttactagtaaattgctcgctccttgcgcgtgtagtcggctgatgcatttacacacatttaagaaagtgttagtatatataggagcaaaatatgtcaatacatagaag

SEQ ID NO: 28955 - DNA, 1829 bp, Zea Mays
gacggcccacgtagcaagcagcccgcaaaaccccatctctctctcacaaacaaagccaaagccacagcgagcaagcaaaacccgcatctcctccatcccaccccgcgccgccgccgccgccgcatcccgtcccgaaccctaaccccactccatcatggcggccgcccactacgatcgcgaggacggcctgcctccatcggcgccgccgcacgcggcggcggacgcgtacgaccccaactacgtgccggactccgtcaagaccttcgtggtgcacctgtaccgccacatccgggacaagaacgtgtacgagatccaccagatgtacgagggcggcttccagcgcctctccgaccgcctcttccgcgacgtgttctggccctccgcggaggccgtgtctccctactgcgacggcgaccacgtattcctcctcctctaccgcgagctctggtaccgccacgcccacgcccgcctctccccgctcaccgccgcgcaccgcgccgagtcgtggaccaactactgcgacctctttagcgtcgtcctccacggcgtcgtcaacatgcagctgcctaaccagtggctctgggacatggtcgacgagttcgtctaccaatttcagagcttctgccagtaccgagccaagctcaagaccaagacggaagacgagctcaaccagctcaagcagttcgacaaggcgtggaacgtgtacggggtcctcaactacctgcaagcgttggttgagaagtccatgatcacgcagatcctcgagaaggagaaggagggcctggagcagttcactgccaccgatggctacgactacgagggtggcagcaacgtgctcaaggtgctgggctactacagcatgattggcctcctaaggatacactgtctcctcggggattaccacaccggcctcaagtgcctcacgcccatcgacctcaaccagcaaggggtctacaccattgtcattgggagccacatctcagccatctaccactacggcttcgcaaaccttatgatgcgcagaacaagctcattgatgaaaatgttagcacccagctgaaagaaaagtataatgacaagatgacaaagatgcagaggtatgatgatgaagcatacgctgcttatgatgagctattctcgtatgcttgccccaagttcattacaccgtcgcctccaattctggaccagccgctaacaaactataaccaggatgcataccgtcttcagttgaagttgtttctctatgaagtaaagcagcaacagttgctttctgggattcggagttatctgaagctatattcaacaataaccattagcaaacttgcccaatatatggaagtggatgaagcaacactaaggtcgatcctgatgacatacaagcacaaaatgcatgcagttgacagtgaaggaaagatagtatcaagtgcagactttgacttctacatcgtcgaggatgtgattcatgttgtggagtccaaacctaccaagcgtcatggtgattactttttgagacaaattttgaagtttgaggaaatgattggtgaactggagaaggtacagcttgactgaaatctgatagcgatcatggagagaaatgtcactgtttcctttttgctctcttttgtactccgttgaaaccccatcttttttttttttgtttccttattgactctgaagcccgttgaaaccggccattattaaccgtgtaccgtgtaatgttacttactagtaaattgctcgctccttgcgcgtgtagtcggctgatgcatttacacacatttaagaaagtgttagtatatataggagcaaaatatgtcaatacatagaag

SEQ ID NO: 28956 - DNA, 1067 bp, Zea Mays
ctcagaggctcagagcaataaaaccatcaactaatttagttcgtccgcaacactaattgctttatttatgatcatatttacatttgttcaccaccttgtcaaggcaggtatgttgaggccactcgtgaattcaacaagattcttctgtatatcctcaagtacaagcagtaccaccagaattcccctcagtatgatcagatactgaagaaaaatgagcagatgtatgcattgttggcaatttgcctatctttgtgcccacagaacaagctcattgatgaaaatgttagcacccagctgaaagaaaagtataatgacaagatgacaaagatgcagaggtatgatgatgaagcatacgctgcttatgatgagctattctcgtatgcttgccccaagttcattacaccgtcgcctccaattctggaccagccgctaacaaactataaccaggatgcataccgtcttcagttgaagttgtttctctatgaagtaaagcagcaacagttgctttctgggattcggagttatctgaagctatattcaacaataaccattagcaaacttgcccaatatatggaagtggatgaagcaacactaaggtcgatcctgatgacatacaagcacaaaatgcatgcagttgacagtgaaggaaagatagtatcaagtgcagactttgacttctacatcgtcgaggatgtgattcatgttgtggagtccaaacctaccaagcgtcatggtgattactttttgagacaaattttgaagtttgaggaaatgattggtgaactggagaaggtacagcttgactgaaatctgatagcgatcatggagagaaatgtcactgtttcctttttgctctcttttgtactccgttgaaaccccatcttttttttttttgtttccttattgactctgaagcccgttgaaaccggccattattaaccgtgtaccgtgtaatgttacttactagtaaattgctcgctccttgcgcgtgtagtcggctgatgcatttacacacatttaagaaagtgttagtatatataggagcaaaatatgtcaatacatagaag

SEQ ID NO: 28957 - DNA, 3522 bp, Zea Mays
cgctgcccccgccgccgccgccgccgccgccgccgccgccgccgccgccactacagaggccgtccatcagccaggccgagcgagcccaacagcctcttcatcgcattcgctgcagcgcaggaaagggaaggaaaggaaaaggcagggcagtggtacgtgcgtgtatcgctgtatcacacacacgtacgcaggcctcgtgccggcgcgccattgcatcgcaccagccagcctgcctgcctgctctgagcagaggagacagccagacagggcagcgaaggaccgagaagctagcaacggcaacgagcagaggcccggcacttgcgctccgcttccccctccctccaccacctctccaggccgccagcccacgccaccactgaccacccgttgcctgtccgccgaccacgcctcgcgcgacctgaattctttctcgtcttccatcgtccctccgcgccccgccccgccccggccgggcctcttaatttaatctatccgcaccgccgcgccgccgccgccgcatcttatcgtatcgtgtacgatcgccatcgccgaccggagagcagcagcccaccatggagaggaagagcgtggtgatgtcggcgctggggatcgggatcggtgtcggcgtcggcctgggcctcgcgtccgcgccctgggccggcggcgcctcagcctccgcctccgccagggccgcgggggtcaccgtcgagagggtggagcaggacctccgccgcctcctcgccgacggcgccgacagcaaggtcaccttcgacgagttcccgtactacctcagtgagcaaacgcgtgttgtgctgaccagcgctgcgtacgttcacttgaaacaagcagagatttccaagtacaccaggaatcttgctcccgccagtcgtgcaatcctgctgtcaggtcccgcagagctctaccaacagatgctagccagagctcttgcccactattttcaagcaaagttgctcttgctagatcctactgatttccttataaagatccataacaaatatggcacaggtggcggcacagagaagacatttaaaagatcaatctccgagacgacgcttgaacgtgtgtcgggattgtttggatctctttcaattcttccacaaaaggaacagcccaaaggaactatacgtagacaaagcagcatgacggatgtcaaattaaggagctctgaaagtacaagcaacttgccaaagcttagaagaaatgcatctagttcctctgatatgagtagcatggcttcacaaggtccttcaactaatacagctcctcttagacgcacaagcagttggacttttgatgacaaaattttagtacaagcgttatacaaggttcttctttcagtatcaaagagctaccctattgtactctatataagagatgtcgagaagttccttcacaagtccccaaaaatgtatctcctgtttgaaaaactattaaacaaacttgatggaccggtgttagtccttggatcaaggattgtagatatggagagtgatgaggagttggactacagattgactgttctgttcccatataatatagaaatcaagccacctgaaaacgaaaaccaccttgtaagttggaaatcccaattagaagaagacatgaagatgattcagtttcaagataaccgaaatcatattatggaagtccttgcagaaaatgatcttgaatgtgacgatttaggctcgatttgcctatctgatactatgtgccttagtaagtatatcgaggagattgtggtgtctgcggtttcatatcacttgatgaataacaaagatccagattaccgaaatgggaaattagttctatccacaaagagtttgtcccatgcgtcggaaatttttcaaggcaacaagatgactgataaggacagcatgaaattggaagtgacagatggcaccttaaaggatttctcatttcacttgtctcggaagcatttacaaatgtatgtattcacataccatacaccaaatacataggcttctgaaaaggcaattgctccaaccactgcaaaatcagaaacaaaacctgcatcatcgctgccacctgttcgacccccagctgctggtgcccctgctccaagggttgaaagcaaaacagaactggagaagaaggataatccacctccatctgcaaaagtcccggaagggacagcagataatgagtttgaaaagcgtattagaccagaagtgatacctgcaaatgagattggagtttcatttgatgatattggtgccttggatgatatcaaagaatcccttcatgagcttgtcatgctgcctctgagacgacctgacctcttcaaaggtggtcttcttaagccctgcagaggtatattactctttggtcctccaggaaccggcaagactatgcttgccaaggctatagccaatgaagctcaagcaagttttataaatgtctctatgtcaactatcacatcaaagtggtttggtgaagatgagaagaatgttcgagcactgttcacgttagctgctaaagtatcaccaaccatcattttcgtcgatgaagttgatagcatgcttgggcagcgtaacagagctggagagcacgaggcaatgaggaagatcaagaatgaatttatgacacactgggatggcctcttgtcaaggtcggaccagagaattcttgttcttgctgcgaccaacaggccttttgatcttgatgaggctattatccgtaggttcgagcgaagaatcatggtaggtctgccatcaatggaaagccgggaactcataatgcggcgacttctgtcaaaggagaaagttgatgaaaggctgaacttcaaggagctagcaaccatgacagaaggatatagtggaagtgatctcaagaacctgtgcacgacggcagcatatcgccctgtgagggagctaatccagaaggaaagaaagaaggagctggagaagctgaagcgtgaaaaaggcgagactccatcggatcttccaaagaagaaggaagagaccatcaccctaaggccgctgagcatgacagatctgaaggaagcaaagaaccaggtggctgcaagtttcgcttccgaaggtgtctgcatgagcgagctgaggcaatggaacgagttgtatggtgaaggaggctccagaaagaaggaacaattaacatacttcctctgaacaatatgaaaatctatggaccatcacacgcaaaaatgtatggacattttggaaagtatagtgcacaaaatagtcatgaggaaataggccgaacatgtataagaacatgggaaacggggggagtgttaaaaggacaggctcccagggtgtgtcggaggctcccacgccagtgggcacaagaaatcaggtcataaaagccactttctggtgtaggacaaggaagaagagttttatctccacctaaatcccagtttgcctgtgctgtaagtattacactaaaaatgggtgtatgtataaactggtaggttgtggctactggttagcagcgaaaggttcaggtagcagtttttaa

SEQ ID NO: 28958 - DNA, 3421 bp, Zea Mays
cgctgcccccgccgccgccgccgccgccgccgccgccgccgccgccgccactacagaggccgtccatcagccaggccgagcgagcccaacagcctcttcatcgcattcgctgcagcgcaggaaagggaaggaaaggaaaaggcagggcagtggtacgtgcgtgtatcgctgtatcacacacacgtacgcaggcctcgtgccggcgcgccattgcatcgcaccagccagcctgcctgcctgctctgagcagaggagacagccagacagggcagcgaaggaccgagaagctagcaacggcaacgagcagaggcccggcacttgcgctccgcttccccctccctccaccacctctccaggccgccagcccacgccaccactgaccacccgttgcctgtccgccgaccacgcctcgcgcgacctgaattctttctcgtcttccatcgtccctccgcgccccgccccgccccggccgggcctcttaatttaatctatccgcaccgccgcgccgccgccgccgcatcttatcgtatcgtgtacgatcgccatcgccgaccggagagcagcagcccaccatggagaggaagagcgtggtgatgtcggcgctggggatcgggatcggtgtcggcgtcggcctgggcctcgcgtccgcgccctgggccggcggcgcctcagcctccgcctccgccagggccgcgggggtcaccgtcgagagggtggagcaggacctccgccgcctcctcgccgacggcgccgacagcaaggtcaccttcgacgagttcccgtactacctcagtgagcaaacgcgtgttgtgctgaccagcgctgcgtacgttcacttgaaacaagcagagatttccaagtacaccaggaatcttgctcccgccagtcgtgcaatcctgctgtcaggtcccgcagagctctaccaacagatgctagccagagctcttgcccactattttcaagcaaagttgctcttgctagatcctactgatttccttataaagatccataacaaatatggcacaggtggcggcacagagaagacatttaaaagatcaatctccgagacgacgcttgaacgtgtgtcgggattgtttggatctctttcaattcttccacaaaaggaacagcccaaaggaactatacgtagacaaagcagcatgacggatgtcaaattaaggagctctgaaagtacaagcaacttgccaaagcttagaagaaatgcatctagttcctctgatatgagtagcatggcttcacaaggtccttcaactaatacagctcctcttagacgcacaagcagttggacttttgatgacaaaattttagtacaagcgttatacaaggttcttctttcagtatcaaagagctaccctattgtactctatataagagatgtcgagaagttccttcacaagtccccaaaaatgtatctcctgtttgaaaaactattaaacaaacttgatggaccggtgttagtccttggatcaaggattgtagatatggagagtgatgaggagttggactacagattgactgttctgttcccatataatatagaaatcaagccacctgaaaacgaaaaccaccttgtaagttggaaatcccaattagaagaagacatgaagatgattcagtttcaagataaccgaaatcatattatggaagtccttgcagaaaatgatcttgaatgtgacgatttaggctcgatttgcctatctgatactatgtgccttagtaagtatatcgaggagattgtggtgtctgcggtttcatatcacttgatgaataacaaagatccagattaccgaaatgggaaattagttctatccacaaagaggcaacaagatgactgataaggacagcatgaaattggaagtgacagatggcaccttaaaggcttctgaaaaggcaattgctccaaccactgcaaaatcagaaacaaaacctgcatcatcgctgccacctgttcgacccccagctgctggtgcccctgctccaagggttgaaagcaaaacagaactggagaagaaggataatccacctccatctgcaaaagtcccggaagggacagcagataatgagtttgaaaagcgtattagaccagaagtgatacctgcaaatgagattggagtttcatttgatgatattggtgccttggatgatatcaaagaatcccttcatgagcttgtcatgctgcctctgagacgacctgacctcttcaaaggtggtcttcttaagccctgcagaggtatattactctttggtcctccaggaaccggcaagactatgcttgccaaggctatagccaatgaagctcaagcaagttttataaatgtctctatgtcaactatcacatcaaagtggtttggtgaagatgagaagaatgttcgagcactgttcacgttagctgctaaagtatcaccaaccatcattttcgtcgatgaagttgatagcatgcttgggcagcgtaacagagctggagagcacgaggcaatgaggaagatcaagaatgaatttatgacacactgggatggcctcttgtcaaggtcggaccagagaattcttgttcttgctgcgaccaacaggccttttgatcttgatgaggctattatccgtaggttcgagcgaagaatcatggtaggtctgccatcaatggaaagccgggaactcataatgcggcgacttctgtcaaaggagaaagttgatgaaaggctgaacttcaaggagctagcaaccatgacagaaggatatagtggaagtgatctcaagaacctgtgcacgacggcagcatatcgccctgtgagggagctaatccagaaggaaagaaagaaggagctggagaagctgaagcgtgaaaaaggcgagactccatcggatcttccaaagaagaaggaagagaccatcaccctaaggccgctgagcatgacagatctgaaggaagcaaagaaccaggtggctgcaagtttcgcttccgaaggtgtctgcatgagcgagctgaggcaatggaacgagttgtatggtgaaggaggctccagaaagaaggaacaattaacatacttcctctgaacaatatgaaaatctatggaccatcacacgcaaaaatgtatggacattttggaaagtatagtgcacaaaatagtcatgaggaaataggccgaacatgtataagaacatgggaaacggggggagtgttaaaaggacaggctcccagggtgtgtcggaggctcccacgccagtgggcacaagaaatcaggtcataaaagccactttctggtgtaggacaaggaagaagagttttatctccacctaaatcccagtttgcctgtgctgtaagtattacactaaaaatgggtgtatgtataaactggtaggttgtggctactggttagcagcgaaaggttcaggtagcagtttttaa

SEQ ID NO: 28959 - DNA, 2561 bp, Zea Mays
gtcgtgcaatcctgctgtcaggtcccgcagagctctaccaacagatgctagccagagctcttgcccactattttcaagcaaagttgctcttgctagatcctactgatttccttataaagatccataacaaatatggcacaggtggcggcacagagaagacatttaaaagatcaatctccgagacgacgcttgaacgtgtgtcgggattgtttggatctctttcaattcttccacaaaaggaacagcccaaaggaactatacgtagacaaagcagcatgacggatgtcaaattaaggagctctgaaagtacaagcaacttgccaaagcttagaagaaatgcatctagttcctctgatatgagtagcatggcttcacaaggtccttcaactaatacagctcctcttagacgcacaagcagttggacttttgatgacaaaattttagtacaagcgttatacaaggttcttctttcagtatcaaagagctaccctattgtactctatataagagatgtcgagaagttccttcacaagtccccaaaaatgtatctcctgtttgaaaaactattaaacaaacttgatggaccggtgttagtccttggatcaaggattgtagatatggagagtgatgaggagttggactacagattgactgttctgttcccatataatatagaaatcaagccacctgaaaacgaaaaccaccttgtaagttggaaatcccaattagaagaagacatgaagatgattcagtttcaagataaccgaaatcatattatggaagtccttgcagaaaatgatcttgaatgtgacgatttaggctcgatttgcctatctgatactatgtgccttagtaagtatatcgaggagattgtggtgtctgcggtttcatatcacttgatgaataacaaagatccagattaccgaaatgggaaattagttctatccacaaagagtttgtcccatgcgtcggaaatttttcaaggcaacaagatgactgataaggacagcatgaaattggaagtgacagatggcaccttaaaggcttctgaaaaggcaattgctccaaccactgcaaaatcagaaacaaaacctgcatcatcgctgccacctgttcgacccccagctgctggtgcccctgctccaagggttgaaagcaaaacagaactggagaagaaggataatccacctccatctgcaaaagtcccgggacagcagataatgagtttgaaaagcgtattagaccagaagtgatacctgcaaatgagattggagtttcatttgatgatattggtgccttggatgatatcaaagaatcccttcatgagcttgtcatgctgcctctgagacgacctgacctcttcaaaggtggtcttcttaagccctgcagaggtatattactctttggtcctccaggaaccggcaagactatgcttgccaaggctatagccaatgaagctcaagcaagttttataaatgtctctatgtcaactatcacatcaaagtggtttggtgaagatgagaagaatgttcgagcactgttcacgttagctgctaaagtatcaccaaccatcattttcgtcgatgaagttgatagcatgcttgggcagcgtaacagagctggagagcacgaggcaatgaggaagatcaagaatgaatttatgacacactgggatggcctcttgtcaaggtcggaccagagaattcttgttcttgctgcgaccaacaggccttttgatcttgatgaggctattatccgtaggttcgagcgaagaatcatggtaggtctgccatcaatggaaagccgggaactcataatgcggcgacttctgtcaaaggagaaagttgatgaaaggctgaacttcaaggagctagcaaccatgacagaaggatatagtggaagtgatctcaagaacctgtgcacgacggcagcatatcgccctgtgagggagctaatccagaaggaaagaaagaaggagctggagaagctgaagcgtgaaaaaggcgagactccatcggatcttccaaagaagaaggaagagaccatcaccctaaggccgctgagcatgacagatctgaaggaagcaaagaaccaggtggctgcaagtttcgcttccgaaggtgtctgcatgagcgagctgaggcaatggaacgagttgtatggtgaaggaggctccagaaagaaggaacaattaacatacttcctctgaacaatatgaaaatctatggaccatcacacgcaaaaatgtatggacattttggaaagtatagtgcacaaaatagtcatgaggaaataggccgaacatgtataagaacatgggaaacggggggagtgttaaaaggacaggctcccagggtgtgtcggaggctcccacgccagtgggcacaagaaatcaggtcataaaagccactttctggtgtaggacaaggaagaagagttttatctccacctaaatcccagtttgcctgtgctgtaagtattacactaaaaatgggtgtatgtataaactggtaggttgtggctactggttagcagcgaaaggttcaggtagcagtttttaa

SEQ ID NO: 28960 - DNA, 994 bp, Zea Mays
gttgtcttcgttctcggtgggtcgacccctcgcgcgcgcgtggtggggccgccccgtcggccggcgacgtccccgtccgccgctcgtctcccccgtcgagagattccgaccaacccggccggtctggttctggtcccggtcccatgggggggtaaagctggcgacgtcctcggtggtggtgctgctgcggacctgcgcaggcgatcaacaagatacccaaaccaaagggcggatgatggatcacggacggatggccgtggaagcgtcacagcccaagccgggtgctggacagaaagggacgatggccaaaagagggagggggggagaattccccgtctccttcctaaaaggcgatgagcaccgctctcctctcctctcctcgtcgtccccgtcccacatgcttctctaccgtcggcccggggcagcaaaacgtcagacaagcggtctccttgcgtgccaaggcaaagggagccaacccgcccaccaaacccctgcgctatcttggagatacacttatctatgctactgccataaatgcagtactatggaaactgatcttggctggcgtgaatatgttctggcgacagaggaggcatactggaatggcctgtggactgtgatattgtttgcagattctctcattgatggacaggagagggagaaacctctaacaggcaggaaataactctagaaaccaacaggcttccttgtcttgctccatttgaattttgaaatgtcaaatgtgaaatgtccaagtgttcttgaccagctgtgctctatccaatctcatgtagacacgaaatacttccaaaagaaggaagatgttgaagaaaatttagcaccccaactttttttttaatttctgtgcacacaaatgaagaaactaataagctcactaaacatttaacaatttcgcctaaatttctcccgatcactaaaaacataatcatgcccttcctcgttctccataagcacgcttaggtagtaaagttag

SEQ ID NO: 28961 - DNA, 952 bp, Zea Mays
gttgtcttcgttctcggtgggtcgacccctcgcgcgcgcgtggtggggccgccccgtcggccggcgacgtccccgtccgccgctcgtctcccccgtcgagagattccgaccaacccggccggtctggttctggtcccggtcccatgggggggtaaagctggcgacgtcctcggtggtggtgctgctgcggacctgcgcaggcgatcaacaagatacccaaaccaaagggcggatgatggatcacggacggatggccgtggaagcgtcacagcccaagccgggtgctggacagaaagggacgatggccaaaagagggagggggggagaattccccgtctccttcctaaaaggcgatgagcaccgctctcctctcctctcctcgtcgtccccgtcccacatgcttctctaccgtcggcccggggcagcaaaacgtcagacaagcggtctccttgcgtgccaaggcaaagggagccaacccgcccaccaaacccctgcgcttactatggaaactgatcttggctggcgtgaatatgttctggcgacagaggaggcatactggaatggcctgtggactgtgatattgtttgcagattctctcattgatggacaggagagggagaaacctctaacaggcaggaaataactctagaaaccaacaggcttccttgtcttgctccatttgaattttgaaatgtcaaatgtgaaatgtccaagtgttcttgaccagctgtgctctatccaatctcatgtagacacgaaatacttccaaaagaaggaagatgttgaagaaaatttagcaccccaactttttttttaatttctgtgcacacaaatgaagaaactaataagctcactaaacatttaacaatttcgcctaaatttctcccgatcactaaaaacataatcatgcccttcctcgttctccataagcacgcttaggtagtaaagttag

SEQ ID NO: 28962 - DNA, 3335 bp, Zea Mays
gaaattccccaatctccaccagaaaaacacagaggcaacccgcacacagatctgacacctaaccactctccctccgccaccgccatgacggccggcgctggcgagccccgccgtatagtcctcctcctagacctcgataccttcctccccacttccagctcaagcacccccgctgccgcctcctacctcgccgaagtcctgcccgccgccacctccctgctcgccgcctgccggtccccggcgtccctctccgcggggcgcctcttcttctcctccctctccccgatcctctcctcctccctcctccctaggccgctcccggccgcccccaccccgctctccttcgacctccacccggccaccctcgcgtccctcgccccgctccgctgcctggcgctccgggcgacccccgcgcacccgcgcgcccccgcctcctcgtcagtcgccaaatctctcctccagcttgagcacgactactcctgggaccacgacccccctcgccgccgtcgctgccgcggcttcgatccgccgcccaatctggtggctctcttcacgcccgtcacggaattcgatctgttcggggacgacgccagcttcgtcgagaaattccgcaaggttttcggtcctgtcagggaccgcctctcggcgattggtctacaggtgtgctgggtcgtcgtcccatccgcctccgtctccgcctctgccgccgccagtgaggggatcaggagggcggtcaccgagctgggctggtggttcactaccgccgatgcggtcgcgttggggtcggccgttgcaccgccggcgctcgtgtggggaggtgttggacttggcggcggggaaggtggacggcgaggggaggtggtgttggagatcgcggatgtggagggcaaaccacttgtctgcaagggctgtgaggtcgaggtggttggctcctcacggttgcagcaggccagcggcaatgccgtgtccaggatacatgtcaggtcggtgtgtgaggcggggaattgggagcggttgatggatggggatgttgccgtggttcgagggttccaacgggaggggagcaaggctgacggtgaagaagctgtagataaggagtattttcctcatcggattcttgaattggtccttggtgacgagaaggaccgattaggggttgccaagccaatttggcagctaattttggtgttccttagtagaaggaactattgtgcagtagtctcagtttctgatggagatggaaactccgtagatggtgttctcatgcccttctcgatgaactgtgccttacttcatcttgagaagaatgtcatgtctgccaaagcctccgagacgccaagttgtggtgcatctgatgagacaaaggtccagagtgataagaagaggagaagcaggctggtcggtaagctacttgaggtgaccacctggagtaccttctgtgacatgcttcgcaaacgtgctgatggaagcatgccggtggtggacttggaggatctatatttcagcaggtatggcaccacatccaaaaagttgcggtttctgaaatgctggatgaaacaggtgaaacagtcacgtcttagtactctatcaagtatacatacagaaggagagcagcgtcttccctcgaaggatgattcagaagcaagagttctggtttcagaagaagatgcttcagctagtcttgtcaatttttcgctggatgaagcagattgccagaaagtagacgcactagtggatgtagcaggctgcagtgaagtgggcatacctgtcgatgaagcagattgcagtaaagtggacatatcagtgggtgaagagagttccatgttctcttctatggaagaattagaagcatttctgggagctgtcccacataagattgagcaaagtctttgttctgaagatgctgatctggggagtttagctgaacgtttggttgacttgtccgtccatgcgatgttggttaaacacggaaagattgcagtgcggtactttgaacacaatgaagcggaagatggttctagtgcaaagattgcctgtgagctttccaatatcttgctgaggaaaccgaaggaactggtctcaaagtacagagaaagtaactcagcgtctgctgcatcagaacaaactgcaaaacacagtacatgttataaaatccgagagcatgagctgcagatcttgcttagaatggaaatgatcaaatctgaactcgggtctgccatagaggaaggttcaaaacagaaaatgataaaagacatctgctcgcttctgcaatttattgacatcaatctccaaggggattcttttcagtctgacggtattcttgagtatgctgaaaagaccataaagtcgaggtacatcaactccatggaggatgtgatcaagaagatctacagggagatggagtttgatttatttgatgacgacgacggagttgactactcagattctctacccagcagcagcaaccaggacgacggcaggtgccgcagccagcggggctccgacagcgcgagcgcctccgcgctccacctgctgcagcgggacgccaggagcagccggcagcgcgaggacgacgaccggcacgacaagctgacggcgagggcccgggagcggcgggaccggcagaggcggctctcctccttcaccagctgggtgcccgacctgcgccgcgtctgggcgctcaagcacccggggaaagagccgtgcgcgtgggtgccgcggtcccggtccaggtcgtgcgcgaagcggcggcgggccgcgtgcaccgatgtcgtcctcgagacgccggtgacctccggcaaaaggcacatgagcgggtcggagtccgacgacgccagacaggtggcggcgaggaggtccgccgcgctcggggccgtgtccaagaccttgtttgacgacgaggtggtcgagactgacgttagctcgagtagcacgtaagccgaccaggagattgctgttttttgtttgttgatttgatgaaaagagtcgtcgttgtcttgggcatgttcgtttcctcacccagcgtcgttgttcaggaaaggaaatagaacgaaatggcagtgatctttactgttgtcagttcagttcagttcagtgcgagtgtgcgacactgtactgcccttgcccttgtcgttttatcgagtggacactcggggatgagacagctagtgagcagggagtccgattttttttttttgtattttggcccttttttggaaaaaaatcacatattttaatgtcatttttggatcatttgctcggcgctataggctatggcgtcgaggtacgtgctgcgctggcacaaacggacgtcgtggtgccgatgtggcaccaag

SEQ ID NO: 28963 - DNA, 1039 bp, Zea Mays
atgatttaggggaaaatggtatctgtacatgtcttctgcaactgcaagtagctaggtacatcaactccatggaggatgtgatcaagaagatctacagggagatggagtttgatttatttgatgacgacgacggagttgactactcagattctctacccagcagcagcaaccaggacgacggcaggtgccgcagccagcggggctccgacagcgcgagcgcctccgcgctccacctgctgcagcgggacgccaggagcagccggcagcgcgaggacgacgaccggcacgacaagctgacggcgagggcccgggagcggcgggaccggcagaggcggctctcctccttcaccagctgggtgcccgacctgcgccgcgtctgggcgctcaagcacccggggaaagagccgtgcgcgtgggtgccgcggtcccggtccaggtcgtgcgcgaagcggcggcgggccgcgtgcaccgatgtcgtcctcgagacgccggtgacctccggcaaaaggcacatgagcgggtcggagtccgacgacgccagacaggtggcggcgaggaggtccgccgcgctcggggccgtgtccaagaccttgtttgacgacgaggtggtcgagactgacgttagctcgagtagcacgtaagccgaccaggagattgctgttttttgtttgttgatttgatgaaaagagtcgtcgttgtcttgggcatgttcgtttcctcacccagcgtcgttgttcaggaaaggaaatagaacgaaatggcagtgatctttactgttgtcagttcagttcagttcagtgcgagtgtgcgacactgtactgcccttgcccttgtcgttttatcgagtggacactcggggatgagacagctagtgagcagggagtccgattttttttttttgtattttggcccttttttggaaaaaaatcacatattttaatgtcatttttggatcatttgctcggcgctataggctatggcgtcgaggtacgtgctgcgctggcacaaacggacgtcgtggtgccgatgtggcaccaag

SEQ ID NO: 28964 - DNA, 3088 bp, Zea Mays
taaattcctacgccgtacgtacagtatactattctactactcgatccgccacgcccggcagcagcgctcacatcacatgggaattcaaggctgaccgtgccgccgtcactcctcccgttcaggtccagcagcgttcgtttcgttgctccactcatcagatccatccacgccagagacggaggcagccatgccgctgccgccgctcctgctctgcgtctgcctctacctcacccacctcccccgcctcgcctcctccgagcccgacgccgacaaggcggcgctgctggcgttcctcgccggcgtgggccgcggcgccaccgcccgcgcgcgcatcaactggcccaccaccccgctcgcctgcgccagccccggccacggccccggctggacgggggtcacctgcagccccgacggcgcgcgcgtcgtggcgctgcacctcccggggctgggcctctcgggcgccgtccagtccggcacgccgttcctggtcgcgtcgcatcaccacaggaatggcggatctcgccgctcaaccaccgtaacaagaaatcgttgccgacgacgatttcagaattcgaataaattcctacgccgtccagcagcgttcgtttcgttgctccacctccactcatcagatccatccacgcgagagaccgaggcaggcagccatgccgctgccgctgccgctgccgccgctcctgctctgcgtctgcgtctgcgtctgcctctgcctctacctcacccacctcccccgcctcgcctcctccgagcccgacgccgacaaggcggcgctgctggcgttcctcgccggcgtgggccgcggcgccaccgcgcgcgcgcgcatcaactggcccaccaccccgctcgcctgcgccggccccggaccgggctggacgggagtcacctgcagccccgacggcgcgcgcgtcgtggcgttgcacctcccggggctgggcctctcgggcgccgtgcaacccggcacgctcggccgcctcacggcgctgcagctgctcagcctgcgctccaacaacctgtcgggcccgctccccgccgacctcctgcgcctgcccgcgctcgcggggctccacctccaccgcaacgccttctccggcgcgctcccgcccgggctcgcggggctcgccgcgctccaggcgctcgacctctcctccaacggcttcggcggcggcatccccggcgcgctcaccagcctcacccgccttgtcgcgctcgacctctccaacaactcgctctccggccgcgtcccggacctcggcctccccgcgctccagttcctcaacctctccaacaaccgcctcgacgggcccgtgccaccgtccctcctccgcttcgccgacgccgcattcgcgggcaacgacctgacgcgcccgcccgcagcagctcctcccgccgccgccgcccccgccgcgcggacgcggcgggtcaggctcagcgaggcggccatcctcgccgtcgccgtcggcggctgcgtcctcgcgttcgccgtcgccgcggtgctgctcctcgcattctgcaacagggagggccgcgacgacgacgacgacgacacgggaggggccggcgggaagggcggggagaagaaggggagggagtcgccggagtccaaggccgtcatcggcaaggccggggagggcaaccggatggtcttcttcgagggcccggcgctggcgttcgacctggaggatctgctccgcgcctccgccgaggtcctcggcaagggcgcgttcgggacggcgtaccgggccgtgctggaggacgccaccacggtcgtcgtcaagcggctcagcaaggaggtgagcgccgggcgccgcgacttcgagcagcagatggagctggttggccggattcgccatcgcaacgtcgtcgagctccgcgcctactactactccaaggacgagaagctgcttgtgtacgattactacgccagcggaagtgtatccaacatgcttcatgggaagaggggagaggagcgaacgccattggactgggaaaccaggtggaagatcgctctgggtgcagcaagaggagtggcacacgtccacgccgagaacaacggcagatttgtccacggcaacatcaaggcctccaacgtgttcgtcaacagggacggatacggctgcatctcggacctcggcctggcacagctggcgaacccgatcgcggcgaggtcccgctccctcgggtactgcgcgccggaggtcgccgacacgaggaaggcgtcgcaggcttcagacgtgtacagcctcggcgtcctcgtgctggagctgctcacggggaggtcgcccgtccaggtatccggcgggcgcggcagcgaggtcgtccacctcgtgaggtgggtgcagtcggtcgtccgcgaggagtggaccgccgaggtgttcgacggcgcgctgctgcgggtccctgacatcgaggaggagatggtggagatgctccagatcgcgatggcgtgcgtgtccaggacccccgaccggcggcccaaggtggcggacgtggtcaggacggtcgaggaggtgcgccggagcggcaccggcacacggccgccctccccgccggccaccgccgcggatgcagaccagagtgagatggagagctcctcctcggcggcggcggcggcggcgcagtgacggcgggagttgatgcttcgcagccgcatctggtgatccgttcgtcgccctttgtgttgtgctcttccaaatccacggccattccattcttttggcgggtgctgtaccattccattctttttttctctctctcttgtgttaagaagattccgtgttacgaaattgtaacacagtgtcacgtggagacggtggtccgtccgatgctcatggcagcagttgctcactccttgccgatgagatgagagtgtcagcgcatgaagacaagcaattaacattcggtgctgctttgctctgttgcttcttcagcttcggatcagatgcccttgagggcatggcaatggtttgcatcgtttgagtactcaacttgggcttgttcggttagctcttaatctacgtgtattgagtgagattagatgagtttgaatcccaaataagttaaaattattctt

SEQ ID NO: 28965 - DNA, 3091 bp, Zea Mays
taaattcctacgccgtacgtacagtatactattctactactcgatccgccacgcccggcagcagcgctcacatcacatgggaattcaaggctgaccgtgccgccgtcactcctcccgttcaggtccagcagcgttcgtttcgttgctccactcatcagatccatccacgccagagacggaggcagccatgccgctgccgccgctcctgctctgcgtctgcctctacctcacccacctcccccgcctcgcctcctccgagcccgacgccgacaaggcggcgctgctggcgttcctcgccggcgtgggccgcggcgccaccgcccgcgcgcgcatcaactggcccaccaccccgctcgcctgcgccagccccggccacggccccggctggacgggggtcacctgcagccccgacggcgcgcgcgtcgtggcgctgcacctcccggggctgggcctctcgggcgccgtccagtccggcacgccgttcctggtcgcgtcgcatcaccacaggaatggcggatctcgccgctcaaccaccgtaacaagaaatcgttgccgacgacgatttcagaattcgaataaattcctacgcccaggtccagcagcgttcgtttcgttgctccacctccactcatcagatccatccacgcgagagaccgaggcaggcagccatgccgctgccgctgccgctgccgccgctcctgctctgcgtctgcgtctgcgtctgcctctgcctctacctcacccacctcccccgcctcgcctcctccgagcccgacgccgacaaggcggcgctgctggcgttcctcgccggcgtgggccgcggcgccaccgcgcgcgcgcgcatcaactggcccaccaccccgctcgcctgcgccggccccggaccgggctggacgggagtcacctgcagccccgacggcgcgcgcgtcgtggcgttgcacctcccggggctgggcctctcgggcgccgtgcaacccggcacgctcggccgcctcacggcgctgcagctgctcagcctgcgctccaacaacctgtcgggcccgctccccgccgacctcctgcgcctgcccgcgctcgcggggctccacctccaccgcaacgccttctccggcgcgctcccgcccgggctcgcggggctcgccgcgctccaggcgctcgacctctcctccaacggcttcggcggcggcatccccggcgcgctcaccagcctcacccgccttgtcgcgctcgacctctccaacaactcgctctccggccgcgtcccggacctcggcctccccgcgctccagttcctcaacctctccaacaaccgcctcgacgggcccgtgccaccgtccctcctccgcttcgccgacgccgcattcgcgggcaacgacctgacgcgcccgcccgcagcagctcctcccgccgccgccgcccccgccgcgcggacgcggcgggtcaggctcagcgaggcggccatcctcgccgtcgccgtcggcggctgcgtcctcgcgttcgccgtcgccgcggtgctgctcctcgcattctgcaacagggagggccgcgacgacgacgacgacgacacgggaggggccggcgggaagggcggggagaagaaggggagggagtcgccggagtccaaggccgtcatcggcaaggccggggagggcaaccggatggtcttcttcgagggcccggcgctggcgttcgacctggaggatctgctccgcgcctccgccgaggtcctcggcaagggcgcgttcgggacggcgtaccgggccgtgctggaggacgccaccacggtcgtcgtcaagcggctcagcaaggaggtgagcgccgggcgccgcgacttcgagcagcagatggagctggttggccggattcgccatcgcaacgtcgtcgagctccgcgcctactactactccaaggacgagaagctgcttgtgtacgattactacgccagcggaagtgtatccaacatgcttcatgggaagaggggagaggagcgaacgccattggactgggaaaccaggtggaagatcgctctgggtgcagcaagaggagtggcacacgtccacgccgagaacaacggcagatttgtccacggcaacatcaaggcctccaacgtgttcgtcaacagggacggatacggctgcatctcggacctcggcctggcacagctggcgaacccgatcgcggcgaggtcccgctccctcgggtactgcgcgccggaggtcgccgacacgaggaaggcgtcgcaggcttcagacgtgtacagcctcggcgtcctcgtgctggagctgctcacggggaggtcgcccgtccaggtatccggcgggcgcggcagcgaggtcgtccacctcgtgaggtgggtgcagtcggtcgtccgcgaggagtggaccgccgaggtgttcgacggcgcgctgctgcgggtccctgacatcgaggaggagatggtggagatgctccagatcgcgatggcgtgcgtgtccaggacccccgaccggcggcccaaggtggcggacgtggtcaggacggtcgaggaggtgcgccggagcggcaccggcacacggccgccctccccgccggccaccgccgcggatgcagaccagagtgagatggagagctcctcctcggcggcggcggcggcggcgcagtgacggcgggagttgatgcttcgcagccgcatctggtgatccgttcgtcgccctttgtgttgtgctcttccaaatccacggccattccattcttttggcgggtgctgtaccattccattctttttttctctctctcttgtgttaagaagattccgtgttacgaaattgtaacacagtgtcacgtggagacggtggtccgtccgatgctcatggcagcagttgctcactccttgccgatgagatgagagtgtcagcgcatgaagacaagcaattaacattcggtgctgctttgctctgttgcttcttcagcttcggatcagatgcccttgagggcatggcaatggtttgcatcgtttgagtactcaacttgggcttgttcggttagctcttaatctacgtgtattgagtgagattagatgagtttgaatcccaaataagttaaaattattctt

SEQ ID NO: 28966 - DNA, 4101 bp, Zea Mays
ggtatcctccagagagcagtacatcagtcgggttatcaaaactctgccaaaccaccatggaactgtttactcggtctcttattacaagatttccgttgtcaagaagcactgcaatagcagagatagaagtggtcctagtgtcaagcgtgaacggaatattatcgaaacctgtggtataattagaacgccgttctctgagagtgagaggttaaatggtgttgttccataaaagttctcatcaggttgccaaagggggaaatactcacggatgcaatatgatggtttagcaaaccagatacccaaaccgcaataataatattgagagcagtcgtaaccgttacccaaaccacaagagtgatattgagatttagagcagtcgtaacccaacttgaaggcaccattttttgagatgaggctgcgatttacattcagaacttgaccgggaaagagggtgtctaatgcatatgttaatttgcagcaaggaaatacaaggctgatcagggagggaagtagtaacacaaaggaagatgagtataagaacctcaaactgcctgtgcccaccattttaagggatactcttcttcttgtccaccccaatgaagtggagtacgtgcttgtgcttagtctcctaaccgagctgatatatggaaaacaaggaaaagatctgctcatcggtcaaggctcaagagcgctagtcgcaatgccctattgtccaggtccaagtccaacaaggttggccgggcatatggaccctactatgacacggtaccaagttcggttattggatggtggactgaggtcgatgtttataataagtaaacagataaacagaataatcaaaatcctgtttgcagtcaacatgacgccgatctgttgtgcatccgttttctagtaacttttgtcaaaaccaagtctctatccagctaaaccacaaggacgcaactgacatgtgacatgaggagtccggcattacctgttacctcgtcgacgacgacagggttctcacagagccaagaggatcaggtacacagcgcgctctcggggagaggcatttcgccgaacgccttcggctcgtccagtgtgcccgacgcgcccgacgtcagtcacgccgggtgcagcgtgcccggcatcgcccacggcaccagatccaccggcttcaaccatcgatagacctcgaactaagcatctcgctcgcctcgtcttcctctccctcctgcttgcttccacggtatactagttccattccatccgtgatcgggtggaggcagccagagggcgagaggaagcgacgaagcgtgcagctaaaccaaccgaccgacgtctctctggcgcgcgggaccggtcgtcccggctcggtgggccggcccagtgtgttagcgcctgccgcctgcctcacgaaatctccctccctaatttttttttcgtacgagaggaagacgcctctcactgtctcgcagttgccgaaggggaaagcaaagaatagaaaggcgtgtccgcgcgcgtgtcttgtccatcatatcgtggcatctcgcgcacccgtcttcggtcttctccccagcagcaggcctcagcctcccacgccacgactccgctcgcgacgccggctagccggccaccgacccccacacccacaagtgcttggcgataaattggggagaagagaagaaaaaggaaccacccccattccttcgcttcctccccgaaataaagctctgctcgcctcagctcggggggcggctcagacaccaatccgaagccctgctgctgcaccacaaatgcgtgagagagacgcctgctgggagtactgcgacaagctggatgggaacaaggtccggtgcaggttctgccacaaggtcctcaacggcggcatcagcaggctcaagttccacctgtcccagatccccagcaaaggggtgaacccctgcaccaaggtgaaggaagacgtcgtcgacagggtgaaggccgtcatctcggccaaggaagagtacaaggagttccagctcctcaagaggcagcgcgtcgccgacctgtcgtcggctgctgccccggcgaagtgggcgccggaggctcctccgtccctgtctacctctccggggcgagtggcctctcctgctgctgttattactcgtgccgctgaacagagtcggcttctcgccccggaagcgtccgctccggtgcccagaccatctgctgctgcggcaaacaacaagccacgcgccgccgccgcttcggaatgggagacagaacgatgtatagctgagttctttttcgagaacaagttggactacagcatagccgactcggtctcataccagcagatgctcgaggcgctcggcggtccgggattccgagggccgccagcagatgttctgcgggacaagtggctgcagaggctcaagtccgagatcctgcagaagacgaaggagatcgagaaggactgggcgacgaccggctgcacgatactggccgattcgtggaccgacaacaagctgaaagccctgatcaacttctccgtggcgtctcccatgggcacgttcttcctcaagacggtggacgcctcctcgcacttcaagacgcacaggggcctgtacgacctcttcgacgaggtgatccaggaggtgggcccggagaacgtggtccagatcatcgccgacaggaacatcaactacggcagcacggacaagctggtcgcgcagaactacggcggcgccatcttctggtccccctgcgcgtcgttctgcgtcaacgccatgctggacgacttctccaagatcgactgggtgaaccagtgcatctgccaggcgcagaccgtgacgcggttcatctacaacagcaggtgggtcctcgatctcgcgaggaagtgcgtggcggggcaggagctcgtctgctcggggatcaccaagtccgtgtcggacttcctcacgctgaagtccctgctgaggcacaggccgaagctgaagcagatgttccacagcgccgagttttcgtcctcgtcgtacgcgagcaggtcgataccgtgcgtcgagatcctggacgacgacgagctctggagggcggtcgaagagatagccgccgtctccgaacctctgctcagggtcatgagggacgtctcaggaggcaggcaggccatcggctacatatacgagtcgatgacgaaggtcacggactctatcagaacgtactacataatggacgaagggaagtgcaagtcgtttctggacatagtggagcagagatggcagacggagctgcactcgcctcttcactcggctgccgcctttctgagcccgggcatccagtacaacccggaagttaagttcttccgcactatcaaggaggagttctaccaggtcctggataaggttcttacgacccctgaccagaggcatgatatcaccgcacagttgcacgctttccgcaaggcacaagggctgtttggttcgaacattgctaaagaggcccgcaacaatacccctccaggcatgtggtgggagcagtacggcgactcagcaccgtcgctgcaacgcgccgccgtcagaataaccagccaggtgtgcagcacgctgacgttccagagggactggggcgtgatcctgcagaaccactacgagaagcgcaacaagctggacaaggaggccctggccgaccaggcctacgtgcactacaacctcacgctgcactccgagccgaaggcgaggaggaggccggacgcggacccgatcgcgctggacgcggtcgacatgacgtcggcgtgggtggaggactccgacggccccatcctcacccagtggctcgacaggttcccgtcggcgctggatggcggggacctgaacacgagacagttcggtggatccatcttcggcaccaacgacaacctgttcggcctctgatggcttccggctccagggggtggggggacatctgcctgttctcatttgttttgattaacacgagagccatgaagctgctgaaaatgtgctaagcatccatttcttctgcagtcatcattgctatcttcttcagtgtatttacctggtgccttggtgggtgcacatacatagctgacacatgggggccactctacaagaatgactcgggaag

SEQ ID NO: 28967 - DNA, 2335 bp, Zea Mays
atgggggttgtgcgtgagagagacgcctgctgggagtactgcgacaagctggatgggaacaaggtccggtgcaggttctgccacaaggtcctcaacggcggcatcagcaggctcaagttccacctgtcccagatccccagcaaaggggtgaacccctgcaccaaggtgaaggaagacgtcgtcgacagggtgaaggccgtcatctcggccaaggaagagtacaaggagttccagctcctcaagaggcagcgcgtcgccgacctgtcgtcggctgctgccccggcgaagtgggcgccggaggctcctccgtccctgtctacctctccggggcgagtggcctctcctgctgctgttattactcgtgccgctgaacagagtcggcttctcgccccggaagcgtccgctccggtgcccagaccatctgctgctgcggcaaacaacaagccacgcgccgccgccgcttcggaatgggagacagaacgatgtatagctgagttctttttcgagaacaagttggactacagcatagccgactcggtctcataccagcagatgctcgaggcgctcggcggtccgggattccgagggccgccagcagatgttctgcgggacaagtggctgcagaggctcaagtccgagatcctgcagaagacgaaggagatcgagaaggactgggcgacgaccggctgcacgatactggccgattcgtggaccgacaacaagctgaaagccctgatcaacttctccgtggcgtctcccatgggcacgttcttcctcaagacggtggacgcctcctcgcacttcaagacgcacaggggcctgtacgacctcttcgacgaggtgatccaggaggtgggcccggagaacgtggtccagatcatcgccgacaggaacatcaactacggcagcacggacaagctggtcgcgcagaactacggcggcgccatcttctggtccccctgcgcgtcgttctgcgtcaacgccatgctggacgacttctccaagatcgactgggtgaaccagtgcatctgccaggcgcagaccgtgacgcggttcatctacaacagcaggtgggtcctcgatctcgcgaggaagtgcgtggcggggcaggagctcgtctgctcggggatcaccaagtccgtgtcggacttcctcacgctgaagtccctgctgaggcacaggccgaagctgaagcagatgttccacagcgccgagttttcgtcctcgtcgtacgcgagcaggtcgataccgtgcgtcgagatcctggacgacgacgagctctggagggcggtcgaagagatagccgccgtctccgaacctctgctcagggtcatgagggacgtctcaggaggcaggcaggccatcggctacatatacgagtcgatgacgaaggtcacggactctatcagaacgtactacataatggacgaagggaagtgcaagtcgtttctggacatagtggagcagagatggcagacggagctgcactcgcctcttcactcggctgccgcctttctgagcccgggcatccagtacaacccggaagttaagttcttccgcactatcaaggaggagttctaccaggtcctggataaggttcttacgacccctgaccagaggcatgatatcaccgcacagttgcacgctttccgcaaggcacaagggctgtttggttcgaacattgctaaagaggcccgcaacaatacccctccaggcatgtggtgggagcagtacggcgactcagcaccgtcgctgcaacgcgccgccgtcagaataaccagccaggtgtgcagcacgctgacgttccagagggactggggcgtgatcctgcagaaccactacgagaagcgcaacaagctggacaaggaggccctggccgaccaggcctacgtgcactacaacctcacgctgcactccgagccgaaggcgaggaggaggccggacgcggacccgatcgcgctggacgcggtcgacatgacgtcggcgtgggtggaggactccgacggccccatcctcacccagtggctcgacaggttcccgtcggcgctggatggcggggacctgaacacgagacagttcggtggatccatcttcggcaccaacgacaacctgttcggcctctgatggcttccggctccagggggtggggggacatctgcctgttctcatttgttttgattaacacgagagccatgaagctgctgaaaatgtgctaagcatccatttcttctgcagtcatcattgctatcttcttcagtgtatttacctggtgccttggtgggtgcacatacatagctgacacatgggggccactctacaagaatgactcgggaag

SEQ ID NO: 28968 - DNA, 2195 bp, Zea Mays
atgggggttgtgcgtgagagagacgcctgctgggagtactgcgacaagctggatgggaacaaggtccggtgcaggttctgccacaaggtcctcaacggcggcatcagcaggctcaagttccacctgtcccagatccccagcaaaggggtgaacccctgcaccaaggtgaaggaagacgtcgtcgacagggtgaaggccgtcatctcggccaaggaagagtacaaggagttccagctcctcaagaggcagcgcgtcgccgacctgtcgtcggctgctgccccggcgaagtgggcgccggaggctcctccgtccctgtctacctctccggggcgagtggcctctcctgctgctgttattactcgtgccgctgaacagagtcggcttctcgccccggaagcgtccgctccggtgcccagaccatctgctgctgcggcaaacaacaagccacgcgccgccgccgcttcggaatgggagacagaacgatgtatagctgagttctttttcgagaacaagttggactacagcatagccgactcggtctcataccagcagatgctcgaggcgctcggcggtccgggattccgagggccgccagcagatgttctgcgggacaagtggctgcagaggctcaagtccgagatcctgcagaagacgaaggagatcgagaaggactgggcgacgaccggctgcacgatactggccgattcgtggaccgacaacaagctgaaagccctgatcaacttctccgtggcgtctcccatgggcacgttcttcctcaagacggtggacgcctcctcgcacttcaagacgcacaggggcctgtacgacctcttcgacgaggtgatccaggaggtgggcccggagaacgtggtccagatcatcgccgacaggaacatcaactacggcagcacggacaagctggtcgcgcagaactacggcggcgccatcttctggtccccctgcgcgtcgttctgcgtcaacgccatgctggacgacttctccaagatcgactgggtgaaccagtgcatctgccaggcgcagaccgtgacgcggttcatctacaacagcaggtgggtcctcgatctcgcgaggaagtgcgtggcggggcaggagctcgtctgctcggggatcaccaagtccgtgtcggacttcctcacgctgaagtccctgctgaggcacaggccgaagctgaagcagatgttccacagcgccgagttttcgtcctcgtcgtacgcgagcaggtcgataccgtgcgtcgagatcctggacgacgacgagctctggagggcggtcgaagagatagccgccgtctccgaacctctgctcagggtcatgagggacgtctcaggaggcaggcaggccatcggctacatatacgagtcgatgacgaaggtcacggactctatcagaacgtactacataatggacgaagggaagtgcaagtcgtttctggacatagtggagcagagatggcagacggagctgcactcgcctcttcactcggctgccgcctttctgagcccgggcatccagtacaacccggaagttaagttcttccgcactatcaaggaggagttctaccaggtcctggataaggttcttacgacccctgaccagaggcatgatatcaccgcacagttgcacgctttccgcaaggcacaagggctgtttggttcgaacattgctaaagaggcccgcaacaatacccctccaggcatgtggtgggagcagtacggcgactcagcaccgtcgctgcaacgcgccgccgtcagaataaccagccaggtgtgcagcacgctgacgttccagagggactggggcgtgatcctgcagaaccactacgagaagcgcaacaagctggacaaggaggccctggccgaccaggcctacgtgcactacaacctcacgctgcactccgagccgaaggcgaggaggaggccggacgcggacccgatcgcgctggacgcggtcgacatgacgtcggcgtgggtggaggactccgacggccccatcctcacccagtggctcgacaggttcccgtcggcgctggatggcggggacctgaacacgagacagttcggtggatccatcttcggcaccaacgacaacctgttcggcctctgatggcttccggctccagaaggagacaaacgccatcgccttttccatttgttgcggaagtaaatataaactgc

SEQ ID NO: 28969 - DNA, 3153 bp, Zea Mays
atgtcacaactttggccctatttaatggccttgtgtgtgcgttgccgtcgtctactttcctttctcgctcgctccttccttgcaaccatcgaaaacccatctgccttcttcttcgcgagatccagggagaaactgaacactgcacgccatgaggtttctgccgtctttccgtgatctgtggaagaagatggtgtgcactgttgtggacttggactaaacgagatgcatgctagcttttctggtgcgtgtgggaatctgtggaatcacaacgacgcaactttcgttcggttcgtgtcgtgcaacagcgaaacgtctttcgaaactccctgtttgctttggaactttgcatgcaactagatcgagctagtgattcgatgtgtgctagcatagcactccgatcctccctgtgcttttatttggagcattatgtatggccaccacttggactgaatcatcatcaggtttccgatgctttttttccctcatggatgtccccgataagagaagaacgaggctgttttaggcacttgcatctgtcctttcccttgagatttgtgattttatcatggtgttagtgtttatgattttgtgatccacatcagcatgtcttttccacatgttcaccacagcattcggtctgcgaaagtatgcgaacctgcatatgccaggctatctagatcctctatcacattttctattttaaatttctctatacaaatagtatcaaacagtgtcatctacagttccacgtcatccctattttacacactctgctggcttggttttcctgtgatttgaaaaggggtgtccgttcttgttcattggcacgcaagtcagtgttttttctgtcccaatgcaagacatgaagagaacgatccctggtattttctgaacaatactcccgcgagactacagtattttgtctcacggttgcttgctgcagctttaatctagctgcggttattatggcttctctacagtattttatctctacggttatagctgttgcagtacgaacagctgctgacgcagctgccagtcgagtattctgtctgtaagtgtttaactgctagtgattgacgacgtagctaattgtttcagaacaataaacttgatataatgtctattcacagagggttctacttgtactattgctggtatcatatgtgtttatatatacttatttcataagtatacctttcgtgatattcattatgcagtttatcaataaataaaactgtttaaaataaaatggttttttattaattatcattacaatttctagtttcaggttattattacttacttacttctaattgtcggtgtataaattatgtgtacttgtgtagcatcttttggcctgatctagctaggtgtagtcagtattccttccttccagacctcgctcgtgtgttgtcctataaggtgtgatgttctcaaataattcttatatatgagagtcatgctaattgatgctgttttgaatttaaacaatagacataaaatgctctcaagaaccatcgttaagttcctgtatgtcacagtagcagcatcagctgtaacacatgttaatcaagagcttagtgttaccagaaaattggagatcaataaataaagggtgcatgtgtttcactggagcttatgcaccgccgcctgtttgttgattggtaaatgtatctttgcatcgattacaagcaattaaatctacccttcgatattcatgtcgttatatatagcatgcatgtgtgtgcttactatggtcattaatccaagcattgttcctggtgacagttgttaagcacaatttctgaaggaatcatggtaggggattaaattttctgataataatgtcatctactgcactcagcgaatgcccatatatatgtgtcgtcgcgacgtcgccagattgagggaatttatcacactaattaagaagatgaactgcctaataatgcacattgtgcgacgacgatgcagacatgaatgtctctgagcagtttgaaaccgagagccgagagcaacatttccacacgtactaacaagcgacacttaccagtgttctataaaaaggataacagtgctggcaagtttgcagggcctggagcctcatctggtgctatttgcagcagttcctggctggctggccggactttgtaaagaaccgcctgagaactatggcggccagttccctgcacagttgccatgcattcttctcactcatgctttctgcgtgcttcaaattagggtcacgcactcacggtcctggctcctgcggcggccactccttttcatcacacacgctcatttctgaacgacgcacgcccttcttcccatggatggttggttggtttcagtgcgtggctacctgcgacttgccaacaatgaggagaagtcagaagactccacacacaagagtctctccgggaaagagagaaagggatggcgtttgtcatcaaggggtgaaaccctaaccctaaaagtggccaaaggcacacacagtagcagacagcgaggctggcgggagggggattggaactcacagagctgctagctgcgcgcatgtggaggcctgcaccaattcccacctcgtgtctgcaaccttgaactcctttaaacccccattggatgcactaaaaaactggcttcagatgtggccgcctccaaattccgaggtgcatgggctccctttcccaatgaaccggtgctggagtacccttttatttattagggctttgtactttggtgtctgggtctttcaagtgctactcatcttgttttaccgaggagagagggtgagaataatagcgcccggacaaggataaataagtttgggttgctttaaatttgttttaaagtagtattaagcaaaaatcattttttttttgtttcctgactatgtaccttggacttgtttatgtactgatgcataaggctatcttcgacagcttatccatctcgtaattatattcaaactcgactttgcaaacagtgcaatatacaatataaaacatcgttttgggtgaccatatgtgtgaattgctagacacagtctaaatgaattgatattttggcaatggcaacccctcctctcaattaatctttcaaacaaaaaacatccaaggaaaagcttactcaagcacatttctatgccac

SEQ ID NO: 28970 - DNA, 3214 bp, Zea Mays
atgtcacaactttggccctatttaatggccttgtgtgtgcgttgccgtcgtctactttcctttctcgctcgctccttccttgcaaccatcgaaaacccatctgccttcttcttcgcgagatccagggagaaactgaacactgcacgccatgagatcttacagtacaggatgggatgggatccatacatccatgatccatgcatcgtctctgcaggtttctgccgtctttccgtgatctgtggaagaagatggtgtgcactgttgtggacttggactaaacgagatgcatgctagcttttctggtgcgtgtgggaatctgtggaatcacaacgacgcaactttcgttcggttcgtgtcgtgcaacagcgaaacgtctttcgaaactccctgtttgctttggaactttgcatgcaactagatcgagctagtgattcgatgtgtgctagcatagcactccgatcctccctgtgcttttatttggagcattatgtatggccaccacttggactgaatcatcatcaggtttccgatgctttttttccctcatggatgtccccgataagagaagaacgaggctgttttaggcacttgcatctgtcctttcccttgagatttgtgattttatcatggtgttagtgtttatgattttgtgatccacatcagcatgtcttttccacatgttcaccacagcattcggtctgcgaaagtatgcgaacctgcatatgccaggctatctagatcctctatcacattttctattttaaatttctctatacaaatagtatcaaacagtgtcatctacagttccacgtcatccctattttacacactctgctggcttggttttcctgtgatttgaaaaggggtgtccgttcttgttcattggcacgcaagtcagtgttttttctgtcccaatgcaagacatgaagagaacgatccctggtattttctgaacaatactcccgcgagactacagtattttgtctcacggttgcttgctgcagctttaatctagctgcggttattatggcttctctacagtattttatctctacggttatagctgttgcagtacgaacagctgctgacgcagctgccagtcgagtattctgtctgtaagtgtttaactgctagtgattgacgacgtagctaattgtttcagaacaataaacttgatataatgtctattcacagagggttctacttgtactattgctggtatcatatgtgtttatatatacttatttcataagtatacctttcgtgatattcattatgcagtttatcaataaataaaactgtttaaaataaaatggttttttattaattatcattacaatttctagtttcaggttattattacttacttacttctaattgtcggtgtataaattatgtgtacttgtgtagcatcttttggcctgatctagctaggtgtagtcagtattccttccttccagacctcgctcgtgtgttgtcctataaggtgtgatgttctcaaataattcttatatatgagagtcatgctaattgatgctgttttgaatttaaacaatagacataaaatgctctcaagaaccatcgttaagttcctgtatgtcacagtagcagcatcagctgtaacacatgttaatcaagagcttagtgttaccagaaaattggagatcaataaataaagggtgcatgtgtttcactggagcttatgcaccgccgcctgtttgttgattggtaaatgtatctttgcatcgattacaagcaattaaatctacccttcgatattcatgtcgttatatatagcatgcatgtgtgtgcttactatggtcattaatccaagcattgttcctggtgacagttgttaagcacaatttctgaaggaatcatggtaggggattaaattttctgataataatgtcatctactgcactcagcgaatgcccatatatatgtgtcgtcgcgacgtcgccagattgagggaatttatcacactaattaagaagatgaactgcctaataatgcacattgtgcgacgacgatgcagacatgaatgtctctgagcagtttgaaaccgagagccgagagcaacatttccacacgtactaacaagcgacacttaccagtgttctataaaaaggataacagtgctggcaagtttgcagggcctggagcctcatctggtgctatttgcagcagttcctggctggctggccggactttgtaaagaaccgcctgagaactatggcggccagttccctgcacagttgccatgcattcttctcactcatgctttctgcgtgcttcaaattagggtcacgcactcacggtcctggctcctgcggcggccactccttttcatcacacacgctcatttctgaacgacgcacgcccttcttcccatggatggttggttggtttcagtgcgtggctacctgcgacttgccaacaatgaggagaagtcagaagactccacacacaagagtctctccgggaaagagagaaagggatggcgtttgtcatcaaggggtgaaaccctaaccctaaaagtggccaaaggcacacacagtagcagacagcgaggctggcgggagggggattggaactcacagagctgctagctgcgcgcatgtggaggcctgcaccaattcccacctcgtgtctgcaaccttgaactcctttaaacccccattggatgcactaaaaaactggcttcagatgtggccgcctccaaattccgaggtgcatgggctccctttcccaatgaaccggtgctggagtacccttttatttattagggctttgtactttggtgtctgggtctttcaagtgctactcatcttgttttaccgaggagagagggtgagaataatagcgcccggacaaggataaataagtttgggttgctttaaatttgttttaaagtagtattaagcaaaaatcattttttttttgtttcctgactatgtaccttggacttgtttatgtactgatgcataaggctatcttcgacagcttatccatctcgtaattatattcaaactcgactttgcaaacagtgcaatatacaatataaaacatcgttttgggtgaccatatgtgtgaattgctagacacagtctaaatgaattgatattttggcaatggcaacccctcctctcaattaatctttcaaacaaaaaacatccaaggaaaagcttactcaagcacatttctatgccac

SEQ ID NO: 28971 - DNA, 4056 bp, Zea Mays
cacaactttggccctatttaatggccttgtgtgtgcgttgccgtcgtctactttcctttctcgctcgctccttccttgcaaccatcgaaaacccatctgccttcttcttcgcgagatccagggagaaactgaacactgcacgccatgaggtgctcagaaacggatcgatcaaccagcagtagcaagcgcggttgtgcatcatgcatgcatgtttgttcttcttttcttttgatttgttgttggtcgtttaatttgtcgccgccgccgccgtcatggttagttgcgacgacgatggctggatggaagagagcgtccttcagtccactcaggggcggtgctagggtcgaattagctgccgactcattcacccacatgccaagcaaacggccatggaaaccagctttgcagatgagtgaatgaagcgggaggtaaaagcttcgatctcgcaccgtctttgcttggactgaagggtgctccctcctccctcgctccttgtttacctttatcgatccatgcatcagcttcgtcatatctcatggttttactagcttcatggtctgtctttgcttgagctgcttaacttacatgtttggttggcatctgatgcatacatatatagcagctgccaaaacgacgggcatattttatttagtcccttatcatgtgcgtgcttactgttcttctctgctggttaattgttatatagcagttacgttctgtgtgtatatataatggagatccaaagcttttttttgtactttccttgcgcttttgatatataaactagctctaaatccttgatctgctcgttgaatctacatatatattgttctcttccaaaaaaagagatcccatttcgttctgaagaaaagaaaaggagatcgaacttcatttgctttgcttgtttttgttttttataaaggaagcatttttattaataaccaagggcaatacatcaaggagatacaaagtctatttgcttttgttgtgtgtagatcttacagtacaggatgggatgggatccatacatccatgatccatgcatcgtctctgcaggtttctgccgtctttccgtgatctgtggaagaagatggtgtgcactgttgtggacttggactaaacgagatgcatgctagcttttctggtgcgtgtgggaatctgtggaatcacaacgacgcaactttcgttcggttcgtgtcgtgcaacagcgaaacgtctttcgaaactccctgtttgctttggaactttgcatgcaactagatcgagctagtgattcgatgtgtgctagcatagcactccgatcctccctgtgcttttatttggagcattatgtatggccaccacttggactgaatcatcatcaggtttccgatgctttttttccctcatggatgtccccgataagagaagaacgaggctgttttaggcacttgcatctgtcctttcccttgagatttgtgattttatcatggtgttagtgtttatgattttgtgatccacatcagcatgtcttttccacatgttcaccacagcattcggtctgcgaaagtatgcgaacctgcatatgccaggctatctagatcctctatcacattttctattttaaatttctctatacaaatagtatcaaacagtgtcatctacagttccacgtcatccctattttacacactctgctggcttggttttcctgtgatttgaaaaggggtgtccgttcttgttcattggcacgcaagtcagtgttttttctgtcccaatgcaagacatgaagagaacgatccctggtattttctgaacaatactcccgcgagactacagtattttgtctcacggttgcttgctgcagctttaatctagctgcggttattatggcttctctacagtattttatctctacggttatagctgttgcagtacgaacagctgctgacgcagctgccagtcgagtattctgtctgtaagtgtttaactgctagtgattgacgacgtagctaattgtttcagaacaataaacttgatataatgtctattcacagagggttctacttgtactattgctggtatcatatgtgtttatatatacttatttcataagtatacctttcgtgatattcattatgcagtttatcaataaataaaactgtttaaaataaaatggttttttattaattatcattacaatttctagtttcaggttattattacttacttacttctaattgtcggtgtataaattatgtgtacttgtgtagcatcttttggcctgatctagctaggtgtagtcagtattccttccttccagacctcgctcgtgtgttgtcctataaggtgtgatgttctcaaataattcttatatatgagagtcatgctaattgatgctgttttgaatttaaacaatagacataaaatgctctcaagaaccatcgttaagttcctgtatgtcacagtagcagcatcagctgtaacacatgttaatcaagagcttagtgttaccagaaaattggagatcaataaataaagggtgcatgtgtttcactggagcttatgcaccgccgcctgtttgttgattggtaaatgtatctttgcatcgattacaagcaattaaatctacccttcgatattcatgtcgttatatatagcatgcatgtgtgtgcttactatggtcattaatccaagcattgttcctggtgacagttgttaagcacaatttctgaaggaatcatggtaggggattaaattttctgataataatgtcatctactgcactcagcgaatgcccatatatatgtgtcgtcgcgacgtcgccagattgagggaatttatcacactaattaagaagatgaactgcctaataatgcacattgtgcgacgacgatgcagacatgaatgtctctgagcagtttgaaaccgagagccgagagcaacatttccacacgtactaacaagcgacacttaccagtgttctataaaaaggataacagtgctggcaagtttgcagggcctggagcctcatctggtgctatttgcagcagttcctggctggctggccggactttgtaaagaaccgcctgagaactatggcggccagttccctgcacagttgccatgcattcttctcactcatgctttctgcgtgcttcaaattagggtcacgcactcacggtcctggctcctgcggcggccactccttttcatcacacacgctcatttctgaacgacgcacgcccttcttcccatggatggttggttggtttcagtgcgtggctacctgcgacttgccaacaatgaggagaagtcagaagactccacacacaagagtctctccgggaaagagagaaagggatggcgtttgtcatcaaggggtgaaaccctaaccctaaaagtggccaaaggcacacacagtagcagacagcgaggctggcgggagggggattggaactcacagagctgctagctgcgcgcatgtggaggcctgcaccaattcccacctcgtgtctgcaaccttgaactcctttaaacccccattggatgcactaaaaaactggcttcagatgtggccgcctccaaattccgaggtgcatgggctccctttcccaatgaaccggtgctggagtacccttttatttattagggctttgtactttggtgtctgggtctttcaagtgctactcatcttgttttaccgaggagagagggtgagaataatagcgcccggacaaggataaataagtttgggttgctttaaatttgttttaaagtagtattaagcaaaaatcattttttttttgtttcctgactatgtaccttggacttgtttatgtactgatgcataaggctatcttcgacagcttatccatctcgtaattatattcaaactcgactttgcaaacagtgcaatatacaatataaaacatcgttttgggtgaccatatgtgtgaattgctagacacagtctaaatgaattgatattttggcaatggcaacccctcctctcaattaatctttcaaacaaaaaacatccaaggaaaagcttactcaagcacatttctatgccac

SEQ ID NO: 28972 - DNA, 3381 bp, Zea Mays
ctactttcctttctcgctcgctccttccttgcaaccatcgaaaacccatctgccttcttcttcgcgagatccagggagaaactgaacactgcacgccatgaggtgctcagaaacggatcgatcaaccagcagtagcaagcgcggttgtgcatcatgcatgcatgtttgttcttcttttcttttgatttgttgttggtcgtttaatttgtcgccgccgccgccgtcatggttagttgcgacgacgatggctggatggaagagagcgtccttcagtccactcaggggcggtgctagggtcgaattagctgccgactcattcacccacatgccaagcaaacggccatggaaaccagctttgcagatgagtgaatgaagcgggaggtttctgccgtctttccgtgatctgtggaagaagatggtgtgcactgttgtggacttggactaaacgagatgcatgctagcttttctggtgcgtgtgggaatctgtggaatcacaacgacgcaactttcgttcggttcgtgtcgtgcaacagcgaaacgtctttcgaaactccctgtttgctttggaactttgcatgcaactagatcgagctagtgattcgatgtgtgctagcatagcactccgatcctccctgtgcttttatttggagcattatgtatggccaccacttggactgaatcatcatcaggtttccgatgctttttttccctcatggatgtccccgataagagaagaacgaggctgttttaggcacttgcatctgtcctttcccttgagatttgtgattttatcatggtgttagtgtttatgattttgtgatccacatcagcatgtcttttccacatgttcaccacagcattcggtctgcgaaagtatgcgaacctgcatatgccaggctatctagatcctctatcacattttctattttaaatttctctatacaaatagtatcaaacagtgtcatctacagttccacgtcatccctattttacacactctgctggcttggttttcctgtgatttgaaaaggggtgtccgttcttgttcattggcacgcaagtcagtgttttttctgtcccaatgcaagacatgaagagaacgatccctggtattttctgaacaatactcccgcgagactacagtattttgtctcacggttgcttgctgcagctttaatctagctgcggttattatggcttctctacagtattttatctctacggttatagctgttgcagtacgaacagctgctgacgcagctgccagtcgagtattctgtctgtaagtgtttaactgctagtgattgacgacgtagctaattgtttcagaacaataaacttgatataatgtctattcacagagggttctacttgtactattgctggtatcatatgtgtttatatatacttatttcataagtatacctttcgtgatattcattatgcagtttatcaataaataaaactgtttaaaataaaatggttttttattaattatcattacaatttctagtttcaggttattattacttacttacttctaattgtcggtgtataaattatgtgtacttgtgtagcatcttttggcctgatctagctaggtgtagtcagtattccttccttccagacctcgctcgtgtgttgtcctataaggtgtgatgttctcaaataattcttatatatgagagtcatgctaattgatgctgttttgaatttaaacaatagacataaaatgctctcaagaaccatcgttaagttcctgtatgtcacagtagcagcatcagctgtaacacatgttaatcaagagcttagtgttaccagaaaattggagatcaataaataaagggtgcatgtgtttcactggagcttatgcaccgccgcctgtttgttgattggtaaatgtatctttgcatcgattacaagcaattaaatctacccttcgatattcatgtcgttatatatagcatgcatgtgtgtgcttactatggtcattaatccaagcattgttcctggtgacagttgttaagcacaatttctgaaggaatcatggtaggggattaaattttctgataataatgtcatctactgcactcagcgaatgcccatatatatgtgtcgtcgcgacgtcgccagattgagggaatttatcacactaattaagaagatgaactgcctaataatgcacattgtgcgacgacgatgcagacatgaatgtctctgagcagtttgaaaccgagagccgagagcaacatttccacacgtactaacaagcgacacttaccagtgttctataaaaaggataacagtgctggcaagtttgcagggcctggagcctcatctggtgctatttgcagcagttcctggctggctggccggactttgtaaagaaccgcctgagaactatggcggccagttccctgcacagttgccatgcattcttctcactcatgctttctgcgtgcttcaaattagggtcacgcactcacggtcctggctcctgcggcggccactccttttcatcacacacgctcatttctgaacgacgcacgcccttcttcccatggatggttggttggtttcagtgcgtggctacctgcgacttgccaacaatgaggagaagtcagaagactccacacacaagagtctctccgggaaagagagaaagggatggcgtttgtcatcaaggggtgaaaccctaaccctaaaagtggccaaaggcacacacagtagcagacagcgaggctggcgggagggggattggaactcacagagctgctagctgcgcgcatgtggaggcctgcaccaattcccacctcgtgtctgcaaccttgaactcctttaaacccccattggatgcactaaaaaactggcttcagatgtggccgcctccaaattccgaggtgcatgggctccctttcccaatgaaccggtgctggagtacccttttatttattagggctttgtactttggtgtctgggtctttcaagtgctactcatcttgttttaccgaggagagagggtgagaataatagcgcccggacaaggataaataagtttgggttgctttaaatttgttttaaagtagtattaagcaaaaatcattttttttttgtttcctgactatgtaccttggacttgtttatgtactgatgcataaggctatcttcgacagcttatccatctcgtaattatattcaaactcgactttgcaaacagtgcaatatacaatataaaacatcgttttgggtgaccatatgtgtgaattgctagacacagtctaaatgaattgatattttggcaatggcaacccctcctctcaattaatctttcaaacaaaaaacatccaaggaaaagcttactcaagcacatttctatgccac

SEQ ID NO: 28973 - DNA, 3149 bp, Zea Mays
cgctcgctccttccttgcaaccatcgaaaacccatctgccttcttcttcgcgagatccagggagaaactgaacactgcacgccatgaggtgctcagaaacggatcgatcaaccagcagtagcaagcgcggttgtgcatcatgcatgcatgtttctgccgtctttccgtgatctgtggaagaagatggtgtgcactgttgtggacttggactaaacgagatgcatgctagcttttctggtgcgtgtgggaatctgtggaatcacaacgacgcaactttcgttcggttcgtgtcgtgcaacagcgaaacgtctttcgaaactccctgtttgctttggaactttgcatgcaactagatcgagctagtgattcgatgtgtgctagcatagcactccgatcctccctgtgcttttatttggagcattatgtatggccaccacttggactgaatcatcatcaggtttccgatgctttttttccctcatggatgtccccgataagagaagaacgaggctgttttaggcacttgcatctgtcctttcccttgagatttgtgattttatcatggtgttagtgtttatgattttgtgatccacatcagcatgtcttttccacatgttcaccacagcattcggtctgcgaaagtatgcgaacctgcatatgccaggctatctagatcctctatcacattttctattttaaatttctctatacaaatagtatcaaacagtgtcatctacagttccacgtcatccctattttacacactctgctggcttggttttcctgtgatttgaaaaggggtgtccgttcttgttcattggcacgcaagtcagtgttttttctgtcccaatgcaagacatgaagagaacgatccctggtattttctgaacaatactcccgcgagactacagtattttgtctcacggttgcttgctgcagctttaatctagctgcggttattatggcttctctacagtattttatctctacggttatagctgttgcagtacgaacagctgctgacgcagctgccagtcgagtattctgtctgtaagtgtttaactgctagtgattgacgacgtagctaattgtttcagaacaataaacttgatataatgtctattcacagagggttctacttgtactattgctggtatcatatgtgtttatatatacttatttcataagtatacctttcgtgatattcattatgcagtttatcaataaataaaactgtttaaaataaaatggttttttattaattatcattacaatttctagtttcaggttattattacttacttacttctaattgtcggtgtataaattatgtgtacttgtgtagcatcttttggcctgatctagctaggtgtagtcagtattccttccttccagacctcgctcgtgtgttgtcctataaggtgtgatgttctcaaataattcttatatatgagagtcatgctaattgatgctgttttgaatttaaacaatagacataaaatgctctcaagaaccatcgttaagttcctgtatgtcacagtagcagcatcagctgtaacacatgttaatcaagagcttagtgttaccagaaaattggagatcaataaataaagggtgcatgtgtttcactggagcttatgcaccgccgcctgtttgttgattggtaaatgtatctttgcatcgattacaagcaattaaatctacccttcgatattcatgtcgttatatatagcatgcatgtgtgtgcttactatggtcattaatccaagcattgttcctggtgacagttgttaagcacaatttctgaaggaatcatggtaggggattaaattttctgataataatgtcatctactgcactcagcgaatgcccatatatatgtgtcgtcgcgacgtcgccagattgagggaatttatcacactaattaagaagatgaactgcctaataatgcacattgtgcgacgacgatgcagacatgaatgtctctgagcagtttgaaaccgagagccgagagcaacatttccacacgtactaacaagcgacacttaccagtgttctataaaaaggataacagtgctggcaagtttgcagggcctggagcctcatctggtgctatttgcagcagttcctggctggctggccggactttgtaaagaaccgcctgagaactatggcggccagttccctgcacagttgccatgcattcttctcactcatgctttctgcgtgcttcaaattagggtcacgcactcacggtcctggctcctgcggcggccactccttttcatcacacacgctcatttctgaacgacgcacgcccttcttcccatggatggttggttggtttcagtgcgtggctacctgcgacttgccaacaatgaggagaagtcagaagactccacacacaagagtctctccgggaaagagagaaagggatggcgtttgtcatcaaggggtgaaaccctaaccctaaaagtggccaaaggcacacacagtagcagacagcgaggctggcgggagggggattggaactcacagagctgctagctgcgcgcatgtggaggcctgcaccaattcccacctcgtgtctgcaaccttgaactcctttaaacccccattggatgcactaaaaaactggcttcagatgtggccgcctccaaattccgaggtgcatgggctccctttcccaatgaaccggtgctggagtacccttttatttattagggctttgtactttggtgtctgggtctttcaagtgctactcatcttgttttaccgaggagagagggtgagaataatagcgcccggacaaggataaataagtttgggttgctttaaatttgttttaaagtagtattaagcaaaaatcattttttttttgtttcctgactatgtaccttggacttgtttatgtactgatgcataaggctatcttcgacagcttatccatctcgtaattatattcaaactcgactttgcaaacagtgcaatatacaatataaaacatcgttttgggtgaccatatgtgtgaattgctagacacagtctaaatgaattgatattttggcaatggcaacccctcctctcaattaatctttcaaacaaaaaacatccaaggaaaagcttactcaagcacatttctatgccac

SEQ ID NO: 28974 - DNA, 3143 bp, Zea Mays
ctcgctccttccttgcaaccatcgaaaacccatctgccttcttcttcgcgagatccagggagaaactgaacactgcacgccatgaggtgctcagaaacggatcgatcaaccagcagtagcaagcgcggttgtgcatcatgcatgtttctgccgtctttccgtgatctgtggaagaagatggtgtgcactgttgtggacttggactaaacgagatgcatgctagcttttctggtgcgtgtgggaatctgtggaatcacaacgacgcaactttcgttcggttcgtgtcgtgcaacagcgaaacgtctttcgaaactccctgtttgctttggaactttgcatgcaactagatcgagctagtgattcgatgtgtgctagcatagcactccgatcctccctgtgcttttatttggagcattatgtatggccaccacttggactgaatcatcatcaggtttccgatgctttttttccctcatggatgtccccgataagagaagaacgaggctgttttaggcacttgcatctgtcctttcccttgagatttgtgattttatcatggtgttagtgtttatgattttgtgatccacatcagcatgtcttttccacatgttcaccacagcattcggtctgcgaaagtatgcgaacctgcatatgccaggctatctagatcctctatcacattttctattttaaatttctctatacaaatagtatcaaacagtgtcatctacagttccacgtcatccctattttacacactctgctggcttggttttcctgtgatttgaaaaggggtgtccgttcttgttcattggcacgcaagtcagtgttttttctgtcccaatgcaagacatgaagagaacgatccctggtattttctgaacaatactcccgcgagactacagtattttgtctcacggttgcttgctgcagctttaatctagctgcggttattatggcttctctacagtattttatctctacggttatagctgttgcagtacgaacagctgctgacgcagctgccagtcgagtattctgtctgtaagtgtttaactgctagtgattgacgacgtagctaattgtttcagaacaataaacttgatataatgtctattcacagagggttctacttgtactattgctggtatcatatgtgtttatatatacttatttcataagtatacctttcgtgatattcattatgcagtttatcaataaataaaactgtttaaaataaaatggttttttattaattatcattacaatttctagtttcaggttattattacttacttacttctaattgtcggtgtataaattatgtgtacttgtgtagcatcttttggcctgatctagctaggtgtagtcagtattccttccttccagacctcgctcgtgtgttgtcctataaggtgtgatgttctcaaataattcttatatatgagagtcatgctaattgatgctgttttgaatttaaacaatagacataaaatgctctcaagaaccatcgttaagttcctgtatgtcacagtagcagcatcagctgtaacacatgttaatcaagagcttagtgttaccagaaaattggagatcaataaataaagggtgcatgtgtttcactggagcttatgcaccgccgcctgtttgttgattggtaaatgtatctttgcatcgattacaagcaattaaatctacccttcgatattcatgtcgttatatatagcatgcatgtgtgtgcttactatggtcattaatccaagcattgttcctggtgacagttgttaagcacaatttctgaaggaatcatggtaggggattaaattttctgataataatgtcatctactgcactcagcgaatgcccatatatatgtgtcgtcgcgacgtcgccagattgagggaatttatcacactaattaagaagatgaactgcctaataatgcacattgtgcgacgacgatgcagacatgaatgtctctgagcagtttgaaaccgagagccgagagcaacatttccacacgtactaacaagcgacacttaccagtgttctataaaaaggataacagtgctggcaagtttgcagggcctggagcctcatctggtgctatttgcagcagttcctggctggctggccggactttgtaaagaaccgcctgagaactatggcggccagttccctgcacagttgccatgcattcttctcactcatgctttctgcgtgcttcaaattagggtcacgcactcacggtcctggctcctgcggcggccactccttttcatcacacacgctcatttctgaacgacgcacgcccttcttcccatggatggttggttggtttcagtgcgtggctacctgcgacttgccaacaatgaggagaagtcagaagactccacacacaagagtctctccgggaaagagagaaagggatggcgtttgtcatcaaggggtgaaaccctaaccctaaaagtggccaaaggcacacacagtagcagacagcgaggctggcgggagggggattggaactcacagagctgctagctgcgcgcatgtggaggcctgcaccaattcccacctcgtgtctgcaaccttgaactcctttaaacccccattggatgcactaaaaaactggcttcagatgtggccgcctccaaattccgaggtgcatgggctccctttcccaatgaaccggtgctggagtacccttttatttattagggctttgtactttggtgtctgggtctttcaagtgctactcatcttgttttaccgaggagagagggtgagaataatagcgcccggacaaggataaataagtttgggttgctttaaatttgttttaaagtagtattaagcaaaaatcattttttttttgtttcctgactatgtaccttggacttgtttatgtactgatgcataaggctatcttcgacagcttatccatctcgtaattatattcaaactcgactttgcaaacagtgcaatatacaatataaaacatcgttttgggtgaccatatgtgtgaattgctagacacagtctaaatgaattgatattttggcaatggcaacccctcctctcaattaatctttcaaacaaaaaacatccaaggaaaagcttactcaagcacatttctatgccac

SEQ ID NO: 28975 - DNA, 3983 bp, Zea Mays
gtgatcgagtgtggtgtgggtcattacacattaggccatgttcggtgagcttgttcccggtccggatcatggccagatccccgtggatcgctcctatatggattgaaacccggtcacaagaaaatatgtgttcgattaattcacgtgtgggctgcatcccggacgaaccctgcctttcctcgtcaccctcgccaggtaaccacgcccgacctctactggatgaaaacattctcgtcgagcgcacgtgaaggagccacggggcgacgcgcgcgaagggcaagcggcggctgtggcgactgtggccgcgacggtgtcaaggacacgagatgcttcactccggcgtcaatctcctctgacggacactttctcgttggcaatctttatcctccctgtctcttatatcgtgttagggttcttgatttggttcttgctcttctttgatctgaagtatttgggatattcgggatggtggtggattccatatgttatctggagtatttgggagattcgacatgcaatttcgctaccgatttatagtactgacaatatgaatcggttttgacccactttgcgccatcgtcatcaaggtcacgcagcgcattttcaaggcattcgttgatatctttctcgtatagcttccagtccagctggtgcctccttgttgccatcgtgctgggattttgtgggtgtctttttctctagtatcgccttgagcagctacagcagtgaccacacaagtgaatgagatgcaaagaagaacgcatggcaggccgacgaaattgctggacattgcaaacacaccattcatcgaaggtttctagatattttttgctagagtaaagaattgtgatatcacccaagggagagttcatatacagaaattcattgagggaatgaacaagattgacgcgtacacgcagaccaagcaggaccctcaagtgctgcttgctctcacaaagattaattttggccatgtacgcgtcgcagcgatgagagacagagtcagatgcatggccgggccaccaccaccaagccatgtacatgatggatcgctttgtcctcaaggtcagcgaccatgcatcgatcagcgctgcgccaaggaggaaatggagagaccttcgggtcacaggctccttatcacggttctgggcaaatggaggagatgacgatgaatgtgatatagatcaggattccggtgtctatccctctgcactcacggccaaccggctggcaaataagacggcttttactgtggaacagcttgtccagaaaatcgagggactacctgatcagaagtttcaggagcaggccactgtaattgacacatataaaaaagagatctgaggcataagaaaaagggacatcggagactcagagatcttggaggcgccttacgccggagctggggaagaaatggggagtttcaaattttaaatcgagatccacgttttccgggtcgtgtgtccgatgcagtccaacgaaaaggtgtggtaacagataatggacctttgttgggctcaaaaggcacaagcccaaggattcatttcataccaaagcaggctttggggaggcttatgtcccgtcgaggccggttagccaggtctgaacttgattgtgctgaagcatcgttgttccctgtgacttgcattgccataagaaaccagaacttctcgacccccacgccgccgccaacctcgatcacccacaacgccacaacatttgctgacattgtgaggtttgggaggactaggatggatggggaaggtcaacgcagaggaggttttagggcacctggagtcattggcagatctggaggtggctttggtttcggcaatcgcgtggaggggttcacctcgggaggctttgggcaggcgtatggtccaaatggtgcggggcgaatttctggccaacacctaggtcctcagttcggatttggtgccgttggacacaacaacagggtgccgcaaaactcccagcaaacaatagtttttggacatggacagcagcaacctgcctcgttctcagttggaggagctcaacatggtacacaacaggttggtgttgggggacagaaacatgattatcataatcagcgctacaaggataattctgggtctggtcgacaggtagaaagaggtttttggccaaagcagcatgctaacaggggccgggccccattctccaaaggtccaagtttcaaccatattgcagctagtggttctgaaggtcttcaaaaggggttgggcagacatttacaacataatagtgatggaggttcaagtggcattggggacaacatgattttgatggataaaactgcctctaaacgttcctttcaggaagttgaagaaaacaggccaccctctaaaaaggttgaagtattagttgagaccaagaaagaggcgagtaaaccacaaggggaattgtttgaagtggcagaagtgtcagcaaaagggaggggtaagtggtgttttcgatgcaggacaaagggccatgtgtcagtggaatgcactacaatcttgttttgccaattgtgtgaaagtgatgaccatgtcgctgctatatgcccaataaagaaaaaacctcgtctgatggcttactcggtgggttatgcgatggatggtctgggcttctaccatatcccccatggccctatttccatgtcaaaaaaggataatactttggctttgatcacatttatgggaggcgagcttaaggaagctgaacttgttgctcatatggagaggttaattccaggaaaacacggttgggatgttcagttgcatgccccaaatacttgggtggctaatttcccatctaaagctgaattgaagcgaactgtaacatttgggtctgctgatcttaagaatggattacttctgaaattcgaagagtttgaggaggaagagtattgtggagaagagctaccaagggtgtggatgcgtgtattaaacctcccaaaagggttaagaacatatgaggttctatgggcgattgggacgatgtttggtgccacaactaaggtcgttattggaactcgttggtttgagttggtttttgagatagaaggagaaattggtgaagctatggaaccaattactcatagggagaatggtaatgagggggatcatgggaatgccgatagaagggacaccactatggaggagaataactccaaagcaaaagacacaaatggcaattcttgggctgcaccttcctttgctagcaacagaagggacgtaggaaagggtgtccagatggacgatggtgctctggatgattttgatgaggatgacctgctcgaggatgaggtgatggaacaatctcctgctgtttcaccaaaatatgcagtccttagtgctgttcttgatgcaggcttaggtgagcaggccaaacagccatctggacagcatgactgtgagatgcaggagggctgtaattcaaagcctggtttggtggagcatagcaaagtgcctagggacgattgcagcaaaatgaaagaagctactgcgactttgggacaccaattgaagtgtgatggtcagcagtctgacgccagctttagctctgaagttgctcttccagtgatacccaagccggtaaaagtcctcaataaaatttctgcagccttgccaaaaaggagaagcaagaggcgggaagcagaagtagatgaggacatgctggaacgtgcgaaaagagtggtggcgaagaaaaatcttgatggaccggaaggtaacagttttaagaattcagttctttcctttactgatgagcttgttattaataatttaagatctctaggaatttctttgggtgcttctgaaaattcagttcagaattcggtagatcatcttaagatattagaaaaggagagaattaaagagtcgtctgttaaaatcggtcaggataaccatgtagagttaggagaatcagatgtagaagatgatgatctatatactcttggtgacctttcaggttgttaa

SEQ ID NO: 28976 - DNA, 1408 bp, Zea Mays
gtgatcgagtgtggtgtgggtcattacacattaggccatgttcggtgagcttgttcccggtccggatcatggccagatccccgtggatcgctcctatatggattgaaacccggtcacaagaaaatatgtgttcgattaattcacgtgtgggctgcatcccggacgaaccctgcctttcctcgtcaccctcgccaggtaaccacgcccgacctctactggatgaaaacattctcgtcgagcgcacgtgaaggagccacggggcgacgcgcgcgaagggcaagcggcggctgtggcgactgtggccgcgacggtgtcaaggacacgagatgcttcactccggcgtcaatctcctctgacggacactttctcgttggcaatctttatcctccctgtctcttatatcgtgttagggttcttgatttggttcttgctcttctttgatctgaagtatttgggatattcgggatggtggtggattccatatgttatctggagtatttgggagattcgacatgcaatttcgctaccgatttatagtactgacaatatgaatcggttttgacccactttgcgccatcgtcatcaaggtcacgcagcgcattttcaaggcattcgttgatatctttctcgtatagcttccagtccagctggtgcctccttgttgccatcgtgctgggattttgtgggtgtctttttctctagtatcgccttgagcagctacagcagtgaccacacaagtgaatgagatgcaaagaaggtgggcaagctaccgcgaatctaaagaataaactggctagctataccttctccattcttgactgggggaaagagttcctcgattgcagaacgcatggcaggccgacgaaattgctggacattgcaaacacaccattcatcgaaggtttctagatattttttgctagagtaaagaattgtgatatcacccaagggagagttcatatacagaaattcattgaggtagttttcactgcatgttcttatctttaatctaacgatttatctcatgacgtagaatgatgtatgatagggaatgaacaagattgacgcgtacacgcagaccaagcaggaccctcaagtgctgcttgctctcacaaagattaattttgggtcactttcagagggacacattggacaaggttctggacactgttgcagaaggaggaggacagacctcaagtaaaatgggcctgtcgtgtgcttgaaacaacaatgatggagatcttttcaaataatggatggtctttttttcatagattgagagcatagtttgagagcttaaatttatgaaacctttgtagaatgtaagatttcgttccaatgtggaaccccatgtttgtgagtttgacagccgaatgtatcaaccgatacagaagctggaatattaata

SEQ ID NO: 28977 - DNA, 4243 bp, Zea Mays
gtgatcgagtgtggtgtgggtcattacacattaggccatgttcggtgagcttgttcccggtccggatcatggccagatccccgtggatcgctcctatatggattgaaacccggtcacaagaaaatatgtgttcgattaattcacgtgtgggctgcatcccggacgaaccctgcctttcctcgtcaccctcgccaggtaaccacgcccgacctctactggatgaaaacattctcgtcgagcgcacgtgaaggagccacggggcgacgcgcgcgaagggcaagcggcggctgtggcgactgtggccgcgacggtgtcaaggacacgagatgcttcactccggcgtcaatctcctctgacggacactttctcgttggcaatctttatcctccctgtctcttatatcgtgttagggttcttgatttggttcttgctcttctttgatctgaagtatttgggatattcgggatggtggtggattccatatgttatctggagtatttgggagattcgacatgcaatttcgctaccgatttatagtactgacaatatgaatcggttttgacccactttgcgccatcgtcatcaaggtcacgcagcgcattttcaaggcattcgttgatatctttctcgtatagcttccagtccagctggtgcctccttgttgccatcgtgctgggattttgtgggtgtctttttctctagtatcgccttgagcagctacagcagtgaccacacaagtgaatgagatgcaaagaaggccgacgaaattgctggacattgcaaacacaccattcatcgaaggtttctagatattttttgctagagtaaagaattgtgatatcacccaagggagagttcatatacagaaattcattgagggaatgaacaagattgacgcgtacacgcagaccaagcaggaccctcaagtgctgcttgctctcacaaagattaattttggccatgtacgcgtcgcagcgatgagagacagagtcagatgcatggccgggccaccaccaccaagccatgtacatgatggatcgctttgtcctcaaggtcagcgaccatgcatcgatcagcgctgcgccaaggaggaaatggagaggtatgaatttttttctgaattctcaaaacttggtgcgcagaaagtatggaacgctgtggattcatattggcaaactcccaccaccgccttacgggatattggtgaccctgctaaagaccttcgggtcacaggctccttatcacggttctgggcaaatggaggagatgacgatgaatgtgatatagatcaggattccggtgtctatccctctgcactcacggccaaccggctggcaaataagacggcttttactgtggaacagcttgtccagaaaatcgagggactacctgatcagaagtttcaggagcaggccactgtaattgacacatataaaaaagaggtcaagaattttttagcttttgaccagacggttcctccaagtagcaagttaaagccgtggcatgggccattacctccaaaaagaatctctccgtcactaacgctagcagactgtcctgttttgacagatctgaggcataagaaaaagggacatcggagactcagagatcttggaggcgccttacgccggagctggggaagaaatggggagtttcaaattttaaatcgagatccacgttttccgggtcgtgtgtccgatgcagtccaacgaaaaggtgtggtaacagataatggacctttgttgggctcaaaaggcacaagcccaaggattcatttcataccaaagcaggctttggggaggcttatgtcccgtcgaggccggttagccaggtctgaacttgattgtgctgaagcatcgttgttccctgtgacttgcattgccataagaaaccagaacttctcgacccccacgccgccgccaacctcgatcacccacaacgccacaacatttgctgacattgtgaggtttgggaggactaggatggatggggaaggtcaacgcagaggaggttttagggcacctggagtcattggcagatctggaggtggctttggtttcggcaatcgcgtggaggggttcacctcgggaggctttgggcaggcgtatggtccaaatggtgcggggcgaatttctggccaacacctaggtcctcagttcggatttggtgccgttggacacaacaacagggtgccgcaaaactcccagcaaacaatagtttttggacatggacagcagcaacctgcctcgttctcagttggaggagctcaacatggtacacaacaggttggtgttgggggacagaaacatgattatcataatcagcgctacaaggataattctgggtctggtcgacaggtagaaagaggtttttggccaaagcagcatgctaacaggggccgggccccattctccaaaggtccaagtttcaaccatattgcagctagtggttctgaaggtcttcaaaaggggttgggcagacatttacaacataatagtgatggaggttcaagtggcattggggacaacatgattttgatggataaaactgcctctaaacgttcctttcaggaagttgaagaaaacaggccaccctctaaaaaggttgaagtattagttgagaccaagaaagaggcgagtaaaccacaaggggaattgtttgaagtggcagaagtgtcagcaaaagggaggggtaagtggtgttttcgatgcaggacaaagggccatgtgtcagtggaatgcactacaatcttgttttgccaattgtgtgaaagtgatgaccatgtcgctgctatatgcccaataaagaaaaaacctcgtctgatggcttactcggtgggttatgcgatggatggtctgggcttctaccatatcccccatggccctatttccatgtcaaaaaaggataatactttggctttgatcacatttatgggaggcgagcttaaggaagctgaacttgttgctcatatggagaggttaattccaggaaaacacggttgggatgttcagttgcatgccccaaatacttgggtggctaatttcccatctaaagctgaattgaagcgaactgtaacatttgggtctgctgatcttaagaatggattacttctgaaattcgaagagtttgaggaggaagagtattgtggagaagagctaccaagggtgtggatgcgtgtattaaacctcccaaaagggttaagaacatatgaggttctatgggcgattgggacgatgtttggtgccacaactaaggtcgttattggaactcgttggtttgagttggtttttgagatagaaggagaaattggtgaagctatggaaccaattactcatagggagaatggtaatgagggggatcatgggaatgccgatagaagggacaccactatggaggagaataactccaaagcaaaagacacaaatggcaattcttgggctgcaccttcctttgctagcaacagaagggacgtaggaaagggtgtccagatggacgatggtgctctggatgattttgatgaggatgacctgctcgaggatgaggtgatggaacaatctcctgctgtttcaccaaaatatgcagtccttagtgctgttcttgatgcaggcttaggtgagcaggccaaacagccatctggacagcatgactgtgagatgcaggagggctgtaattcaaagcctggtttggtggagcatagcaaagtgcctagggacgattgcagcaaaatgaaagaagctactgcgactttgggacaccaattgaagtgtgatggtcagcagtctgacgccagctttagctctgaagttgctcttccagtgatacccaagccggtaaaagtcctcaataaaatttctgcagccttgccaaaaaggagaagcaagaggcgggaagcagaagtagatgaggacatgctggaacgtgcgaaaagagtggtggcgaagaaaaatcttgatggaccggaaggtcactttcagagggacacattggacaaggttctggacactgttgcagaaggaggaggacagacctcaagtaaaatgggcctgtcgtgtgcttgaaacaacaatgatggagatcttttcaaataatggatggtctttttttcatagattgagagcatagtttgagagcttaaatttatgaaacctttgtagaatgtaagatttcgttccaatgtggaaccccatgtttgtgagtttgacagccgaatgtatcaaccgatacagaagctggaatattaata

SEQ ID NO: 28978 - DNA, 1382 bp, Zea Mays
gtgatcgagtgtggtgtgggtcattacacattaggccatgttcggtgagcttgttcccggtccggatcatggccagatccccgtggatcgctcctatatggattgaaacccggtcacaagaaaatatgtgttcgattaattcacgtgtgggctgcatcccggacgaaccctgcctttcctcgtcaccctcgccaggtaaccacgcccgacctctactggatgaaaacattctcgtcgagcgcacgtgaaggagccacggggcgacgcgcgcgaagggcaagcggcggctgtggcgactgtggccgcgacggtgtcaaggacacgagatgcttcactccggcgtcaatctcctctgacggacactttctcgttggcaatctttatcctccctgtctcttatatcgtgttagggttcttgatttggttcttgctcttctttgatctgaagtatttgggatattcgggatggtggtggattccatatgttatctggagtatttgggagattcgacatgcaatttcgctaccgatttatagtactgacaatatgaatcggttttgacccactttgcgccatcgtcatcaaggtcacgcagcgcattttcaaggcattcgttgatatctttctcgtatagcttccagtccagctggtgcctccttgttgccatcgtgctgggattttgtgggtgtctttttctctagtatcgccttgagcagctacagcagtgaccacacaagtgaatgagatgcaaagaaggccgacgaaattgctggacattgcaaacacaccattcatcgaaggtttctagatattttttgctagagtaaagaattgtgatatcacccaagggagagttcatatacagaaattcattgagggaatgaacaagattgacgcgtacacgcagaccaagcaggaccctcaagtgctgcttgctctcacaaagattaattttggccatgtacgcgtcgcagcgatgagagacagagtcagatgcatggccgggccaccaccaccaagccatgtacatgatggatcgctttgtcctcaaggtcagcgaccatgcatcgatcagcgctgcgccaaggaggaaatggagaggtcactttcagagggacacattggacaaggttctggacactgttgcagaaggaggaggacagacctcaagtaaaatgggcctgtcgtgtgcttgaaacaacaatgatggagatcttttcaaataatggatggtctttttttcatagattgagagcatagtttgagagcttaaatttatgaaacctttgtagaatgtaagatttcgttccaatgtggaaccccatgtttgtgagtttgacagccgaatgtatcaaccgatacagaagctggaatattaata

SEQ ID NO: 28979 - DNA, 1394 bp, Zea Mays
gtgatcgagtgtggtgtgggtcattacacattaggccatgttcggtgagcttgttcccggtccggatcatggccagatccccgtggatcgctcctatatggattgaaacccggtcacaagaaaatatgtgttcgattaattcacgtgtgggctgcatcccggacgaaccctgcctttcctcgtcaccctcgccaggtaaccacgcccgacctctactggatgaaaacattctcgtcgagcgcacgtgaaggagccacggggcgacgcgcgcgaagggcaagcggcggctgtggcgactgtggccgcgacggtgtcaaggacacgagatgcttcactccggcgtcaatctcctctgacggacactttctcgttggcaatctttatcctccctgtctcttatatcgtgttagggttcttgatttggttcttgctcttctttgatctgaagtatttgggatattcgggatggtggtggattccatatgttatctggagtatttgggagattcgacatgcaatttcgctaccgatttatagtactgacaatatgaatcggttttgacccactttgcgccatcgtcatcaaggtcacgcagcgcattttcaaggcattcgttgatatctttctcgtatagcttccagtccagctggtgcctccttgttgccatcgtgctgggattttgtgggtgtctttttctctagtatcgccttgagcagctacagcagtgaccacacaagtgaatgagatgcaaagaagaacgcatggcaggccgacgaaattgctggacattgcaaacacaccattcatcgaaggtttctagatattttttgctagagtaaagaattgtgatatcacccaagggagagttcatatacagaaattcattgagggaatgaacaagattgacgcgtacacgcagaccaagcaggaccctcaagtgctgcttgctctcacaaagattaattttggccatgtacgcgtcgcagcgatgagagacagagtcagatgcatggccgggccaccaccaccaagccatgtacatgatggatcgctttgtcctcaaggtcagcgaccatgcatcgatcagcgctgcgccaaggaggaaatggagaggtcactttcagagggacacattggacaaggttctggacactgttgcagaaggaggaggacagacctcaagtaaaatgggcctgtcgtgtgcttgaaacaacaatgatggagatcttttcaaataatggatggtctttttttcatagattgagagcatagtttgagagcttaaatttatgaaacctttgtagaatgtaagatttcgttccaatgtggaaccccatgtttgtgagtttgacagccgaatgtatcaaccgatacagaagctggaatattaata

SEQ ID NO: 28980 - DNA, 2045 bp, Zea Mays
ctccatcttccttccaaccccacttctccccaacccgaaccccaacaagggttctcggcgacgcgtcggccgcgggagatggccaccgcggcgaagctgccgtccctttacgccgagctcgccgccaagtcctctcgcgtcgcagagctggaggtcaggatctcggccctcgaaaccgagaacgcgggcttgagggaggccctggcggttgcgagacgagaatcaatgggcagtacaggaaaggaggaggacccaatctctcgccaattggcggcacgcctacgcggaatcgagcacggggcggtcgagaagccgggctggggcgtggctcgccgcgacgcaattgaggtcagcgacgacgaggagggcgctgcggctgtcggtgctaacaagggggaaagcccggacgagggtgtcggtgccgtcccggctcttcggaagcgggtggtggccggagagagcgtgggtgaagctgatgcggaggacgcggagggaggcggtggaaacaacggggagagcagcgcgggtctggaggatgacgatgtttcggtcacaccgcgggggaagaagcgtggccgccggtcggccgtggcgcaggtggtcaccagtgatagcgaggatgatggtgtgaatggtggtggtggtgtcgaggatcagtttgggagtgccaaggacggcagcggtgatcaggagggcctcatgagcagtaggaagcgtgcctttcgcggagtcagtgacagtgaggatgaggatgcctatgagggcgttgctccacggcacactgagagtggggaggaggatgtggatgatatggttcccatcgatgaattgctgaaaagggtgccaaaagagagggccagtgaggatgacggcgaatccgaagggcattccactcctgtgacgaggcgttctgctcgattggttaagaatcagtcaaaatcttaccgcatgtttcgtggagtcagtgacagtgaggatgaagatgacaatgagggaacagctgcgcctcagggcaagagtggggacaaggaggaggaggatatggttcccgtctataaattgctcaagaggatgccaaatgagagagcgagtgaggacgacgatgaatcagatctggccaaagggcattccgctcctgcgacgaggcgttctgctcggttggctaagaatcagtcaaaatcctaccgcgtattttgtggagtcagtgacagtgaggacaaggatggcgatgagggcacaactgcgcctcagactgagaaccgggacgaggatgaggaggatatggttcccatctataaatcgctgaagaggatgccaaaagagagggtgagtgaagatggcgatgaatctgatgtggccaaagggcattcagcccctgcatcaagacgttctgctcgattggttaagaaccagtcaataaggccaagagctgcatgtccggggctccactttgttgaaccacccaaggatgttgaagggagtgaagatgatatggaagaagacgatgatatgaatgagttcataaatgatgaatcttctgataatgctagtgattctgccgagaaatcctgtgatgaatcagatgtaccatctgttatgaatgaaaaatcctctccaggactagaagtgtctgatggtgaggtggactataaagatgtaatggcttgcattggccgtaaaaagaaagctaaagagtgggactacgaggcagatatgctagcagcatttggtgaacatcccgagctttgcttgaaggctgtttgtgccctctaccggaagcaaactgaggatgaacaggtggaaaaggcttctttagttcataataagcagggatttagccacaaagatgccccaaggggatctcgcattgcagaatttcttctggatggtgatctggttggtccgctgaagaagaccgtctcggatctagacgaaacaaggaggacccttactttcatccatagccctggtagacgacaccatgccagagacggagaagatgcaggatgccttctgcggcgaggcgggacacgctggatcctcag

SEQ ID NO: 28981 - DNA, 3359 bp, Zea Mays
ctccatcttccttccaaccccacttctccccaacccgaaccccaacaagggttctcggcgacgcgtcggccgcgggagatggccaccgcggcgaagctgccgtccctttacgccgagctcgccgccaagtcctctcgcgtcgcagagctggaggtcaggatctcggccctcgaaaccgagaacgcgggcttgagggaggccctggcggttgcgagacgagaatcaatgggcagtacaggaaaggaggaggacccaatctctcgccaattggcggcacgcctacgcggaatcgagcacggggcggtcgagaagccgggctggggcgtggctcgccgcgacgcaattgaggtcagcgacgacgaggagggcgctgcggctgtcggtgctaacaagggggaaagcccggacgagggtgtcggtgccgtcccggctcttcggaagcgggtggtggccggagagagcgtgggtgaagctgatgcggaggacgcggagggaggcggtggaaacaacggggagagcagcgcgggtctggaggatgacgatgtttcggtcacaccgcgggggaagaagcgtggccgccggtcggccgtggcgcaggtggtcaccagtgatagcgaggatgatggtgtgaatggtggtggtggtgtcgaggatcagtttgggagtgccaaggacggcagcggtgatcaggagggcctcatgagcagtaggaagcgtgcctttcgcggagtcagtgacagtgaggatgaggatgcctatgagggcgttgctccacggcacactgagagtggggaggaggatgtggatgatatggttcccatcgatgaattgctgaaaagggtgccaaaagagagggccagtgaggatgacggcgaatccgaagggcattccactcctgtgacgaggcgttctgctcgattggttaagaatcagtcaaaatcttaccgcatgtttcgtggagtcagtgacagtgaggatgaagatgacaatgagggaacagctgcgcctcagggcaagagtggggacaaggaggaggaggatatggttcccgtctataaattgctcaagaggatgccaaatgagagagcgagtgaggacgacgatgaatcagatctggccaaagggcattccgctcctgcgacgaggcgttctgctcggttggctaagaatcagtcaaaatcctaccgcgtattttgtggagtcagtgacagtgaggacaaggatggcgatgagggcacaactgcgcctcagactgagaaccgggacgaggatgaggaggatatggttcccatctataaatcgctgaagaggatgccaaaagagagggtgagtgaagatggcgatgaatctgatgtggccaaagggcattcagcccctgcatcaagacgttctgctcgattggttaagaaccagtcaataaggccaagagctgcatgtccggggctccactttgttgaaccacccaaggatgttgaagggagtgaagatgatatggaagaagacgatgatatgaatgagttcataaatgatgaatcttctgataatgctagtgattctgccgagaaatcctgtgatgaatcagatgtaccatctgttatgaatgaaaaatcctctccaggactagaagtgtctgatggtgaggtggactataaagatgtaatggcttgcattggccgtaaaaagaaagctaaagagtgggactacgaggcagatatgctagcagcatttggtgaacatcccgagctttgcttgaaggctgtttgtgccctctaccggaagcaaactgaggatgaacaggtggaaaaggcttctttagttcataataagcagggatttagccacaaagatgccccaaggggatctcgcattgcagaatttcttctggatggtgatctggttggtccgctgaagaagaccgtctcggatctagacgagtatgatcgctatgcttttgagttctgtcgcaaggtggcttcgcactactcaaaacaactttttgcaatctaccagaacaaggaggacccttactttcatccatagccctgggcgttccccatggaggatggcaggccgctgcagttcatcttcagcagccggcagtaaaccaccaggggcgggctggcgaccaccacgaccaccaccaacgtgtaccggagcgaggagttcattcccaccatgcgcaccatcgagtcgcaggcgtgcagcccggaggcggtcatcttcggtgatgacttcgcgcggtctctctactgccatctcctttgcggacgggattgactccccggtctcagacaaggcacggagggaggcctcactttcagagaaagcagatggctctttaatttgctacatcttggcatagctgtaccggtgccatctagaggacgtggtgaaggtggccgggttctacaactcgacgccgaagctcaagttcgtgtgccggctcaacctgatgttgagcatcaacgtcgacaagaacagcgagcaggacctgcagctgtgtggacagcgcggccaggatactgctggcggagaagctgggaggtggtggactacagcaaccacgcggaggcgtcgcgcgatccgggccactacgtcgtgttctgggagctcaacgcctacggctttgacggcgtgctgcggagctgctgcaacgttctgtatgggctagctctgagtgttttgtttatcctcctatccatgatccattggccatggcatcaggggcagttgggtgaccacatgtcatctggggccatgtgacgaagatcacaagttgcttgcacagttcgcgtcgtctctggccgacaggacaggaagtgagagggtggcaagtgcagcaaattataatcatggactcatggtcatggtatggtatcagtagtatctgttaccttcggtgttgcacggcataccacatctgactgaagatttacgtgcgctattaaacagcaggaaggacgtccaataaattggcggtcacattatatcaagatttcattatatctttccggtgttagagcagaaaactttttttatccgtctcctttatttaagattattggaaggtaatatatatacctcccaatggggatgaggtactatgtgccacatggacatggggtctaggtgaaggagcaagaagggtacggagaaatggagtacagagaaagtgcccattgctgttgcctcaattagaggtgatgaacacagtccatgctcaccactttagagcctgttcgtttatggattgtgtcagattgagcttgagtggattttaatctcaagcaagtcgaaattctctctattttttctcaatcccatccaaaccatatggaataagaataaccgttttgttc

SEQ ID NO: 28982 - DNA, 2125 bp, Zea Mays
ctccatcttccttccaaccccacttctccccaacccgaaccccaacaagggttctcggcgacgcgtcggccgcgggagatggccaccgcggcgaagctgccgtccctttacgccgagctcgccgccaagtcctctcgcgtcgcagagctggaggtcaggatctcggccctcgaaaccgagaacgcgggcttgagggaggccctggcggttgcgagacgagaatcaatgggcagtacaggaaaggaggaggacccaatctctcgccaattggcggcacgcctacgcggaatcgagcacggggcggtcgagaagccgggctggggcgtggctcgccgcgacgcaattgaggtcagcgacgacgaggagggcgctgcggctgtcggtgctaacaagggggaaagcccggacgagggtgtcggtgccgtcccggctcttcggaagcgggtggtggccggagagagcgtgggtgaagctgatgcggaggacgcggagggaggcggtggaaacaacggggagagcagcgcgggtctggaggatgacgatgtttcggtcacaccgcgggggaagaagcgtggccgccggtcggccgtggcgcaggtggtcaccagtgatagcgaggatgatggtgtgaatggtggtggtggtgtcgaggatcagtttgggagtgccaaggacggcagcggtgatcaggagggcctcatgagcagtaggaagcgtgcctttcgcggagtcagtgacagtgaggatgaggatgcctatgagggcgttgctccacggcacactgagagtggggaggaggatgtggatgatatggttcccatcgatgaattgctgaaaagggtgccaaaagagagggccagtgaggatgacggcgaatccgaagggcattccactcctgtgacgaggcgttctgctcgattggttaagaatcagtcaaaatcttaccgcatgtttcgtggagtcagtgacagtgaggatgaagatgacaatgagggaacagctgcgcctcagggcaagagtggggacaaggaggaggaggatatggttcccgtctataaattgctcaagaggatgccaaatgagagagcgagtgaggacgacgatgaatcagatctggccaaagggcattccgctcctgcgacgaggcgttctgctcggttggctaagaatcagtcaaaatcctaccgcgtattttgtggagtcagtgacagtgaggacaaggatggcgatgagggcacaactgcgcctcagactgagaaccgggacgaggatgaggaggatatggttcccatctataaatcgctgaagaggatgccaaaagagagggtgagtgaagatggcgatgaatctgatgtggccaaagggcattcagcccctgcatcaagacgttctgctcgattggttaagaaccagtcaataaggccaagagctgcatgtccggggctccactttgttgaaccacccaaggatgttgaagggagtgaagatgatatggaagaagacgatgatatgaatgagttcataaatgatgaatcttctgataatgctagtgattctgccgagaaatcctgtgatgaatcagatgtaccatctgttatgaatgaaaaatcctctccaggactagaagtgtctgatggtgaggtggactataaagatgtaatggcttgcattggccgtaaaaagaaagctaaagagtgggactacgaggcagatatgctagcagcatttggtgaacatcccgagctttgcttgaaggctgtttgtgccctctaccggaagcaaactgaggatgaacaggtggaaaaggcttctttagttcataataagcagggatttagccacaaagatgccccaaggggatctcgcattgcagaatttcttctggatggtgatctggttggtccgctgaagaagaccgtctcggatctagacgagtatgatcgctatgcttttgagttctgtcgcaaggtggcttcgcactactcaaaacaactttttgcaatctaccagaacaaggaggacccttactttcatccatagccctgagaggacctggaggacgccggagttggaccgggcgacgcacctcggcagcttgaactggttcgccggagcgccgagggag

SEQ ID NO: 28983 - DNA, 886 bp, Zea Mays
caagtcccaaccaaaagacacacggatgccagctctctagctaccttgtgcccaaagtgccaaacggccccttaagtcttaaccacctgctttatcatctcccgtacgcgctctccctcggtctctccctccctccctccctctcgctcgtggccacgactgggcgactgcctccgccgcatttcgctaggcgccacacggcccttggccggcgacgagcacccacagaaaaaagtgttgctcctacgactagttctttttatgtgtaaccttcaatgaaggattctcaggatattcagagcacgacagagttgcagtcaccagtgcaaggtactaatgaagtgcaaagtcagcaaccaaactcaatggccgctgatgctcctgctggaaattcgggttccttgtctgtagctagtaatgacaataagaaggttcagaatttgatagagcgttgtctacagctctacatgaacaaaggagaagttgttagaactctttctactcgtgctagaatagaacctggcttcactactttagtatggcagaaacttgaagaagaaaactccgagttctttagggcttactatatacggttgaagttgaaaaggcagatcatcttgttcaatcatttattgcaacaccagtacaatttgatgaaatatccagcacctccgaatattccattggctccaatacaaaatggaattcatcatatgccagttagcaatttaccaatggggtatccagtacttcagcagcctatcatgcctgctcccggccagcctcacatggatccaatggcctgcggtctgtccagtggtcatgtggttaatggaatacctgcaccaggtggttatcatcccatgcgcatgaactccggaaatga

SEQ ID NO: 28984 - DNA, 1970 bp, Zea Mays
caagtcccaaccaaaagacacacggatgccagctctctagctaccttgtgcccaaagtgccaaacggccccttaagtcttaaccacctgctttatcatctcccgtacgcgctctccctcggtctctccctccctccctccctctcgctcgtggccacgactgggcgactgcctccgccgcatttcgctaggcgccacacggcccttggccggcgacgagcacccacagaaaaaagtgttgctcctacgactagttctttttatgtgtaaccttcaatgaaggattctcaggatattcagagcacgacagagttgcagtcaccagtgcaaggttcagaatttgatagagcgttgtctacagctctacatgaacaaaggagaagttgttagaactctttctactcgtgctagaatagaacctggcttcactactttagtatggcagaaacttgaagaagaaaactccgagttctttagggcttactatatacggttgaagttgaaaaggcagatcatcttgttcaatcatttattgcaacaccagtacaatttgatgaaatatccagcacctccgaatattccattggctccaatacaaaatggaattcatcatatgccagttagcaatttaccaatggggtatccagtacttcagcagcctatcatgcctgctcccggccagcctcacatggatccaatggcctgcggtctgtccagtggtcatgtggttaatggaatacctgcaccaggtggttatcatcccatgcgcatgaactccggaaatgacatggttttggacaatggagcgcctgaagcaccacatgctggtgctaccggtagtgctatgtcatctgagatggctgtgagtccctcgtcggcggcttcaagcaaccatgctccttttacgccgtcagatataccaggcatgaccatggatgtatcggccctagactcggcatttgggtgtgatgtggggaatcctgaatctctgcaattgggaccagatgggtcgtcaagagactctattagatccttagggcagctctggaatttcagcctctctgatctaacagcggatttgacgagtttgggagcagatctggacgtgctggagaactacactggcacccctttcctgccatcggattcggacattttgcttgattccccagaccaagatgatatagtcgagtattttgctgacgccatcaacgggtctccgtcagacgaagagaaaccgtagtttttccggggttgcatggcatgcattcaggttcatcatcaggcagggctgtcatctcatctcatgtagtgtaaagcagccaatctaactgtgtattcggctcgcgcgcggtgatccggtaatcgggcctctgccactaaaaagaattttgtagcggttaattgaaatcctaattctttggaataagtagctgggactggaatgtccagagagtagcggtcgttgttggcttagggattgctgctggtggatgcaaacctcacagctagctggtgactctgaaaccacaggaactccttttctttttctttttacttgtatctgtatttgctgctacataagtaaacagaagtggggtgtacctagttttctggttctcgagtgtcttgaaacagtgggcgcgggttttcagctgaaagatcatgatattgtgttgttggcaaagtgctgaggacacgcgatgcaaagtttcttagattagccatacacaggaggctgctggagttgatctcacatctcagggtgtgtttggttgaactggagaatagagcctacccatcgtcaatcattttagtggagcaagaacatcccaataatttatagagttcgcccctctttcgtacaaccgttctccactcaaccaaacacacccttactcaatccatctgtgctgctctctgagctcatctttcctagtcaaacttaaatatgattacaaccaaataacg

SEQ ID NO: 28985 - DNA, 2095 bp, Zea Mays
caagtcccaaccaaaagacacacggatgccagctctctagctaccttgtgcccaaagtgccaaacggccccttaagtcttaaccacctgctttatcatctcccgtacgcgctctccctcggtctctccctccctccctccctctcgctcgtggccacgactgggcgactgcctccgccgcatttcgctaggcgccacacggcccttggccggcgacgagcacccacagaaaaaagtgttgctcctacgactagttctttttatgtgtaaccttcaatgaaggattctcaggatattcagagcacgacagagttgcagtcaccagtgcaaggtactaatgaagtgcaaagtcagcaaccaaactcaatggccgctgatgctcctgctggaaattcgggttccttgtctgtagctagtaatgacaataagaaggtgtctcgcgaagatattgaacttgttcagaatttgatagagcgttgtctacagctctacatgaacaaaggagaagttgttagaactctttctactcgtgctagaatagaacctggcttcactactttagtatggcagaaacttgaagaagaaaactccgagttctttagggcttactatatacggttgaagttgaaaaggcagatcatcttgttcaatcatttattgcaacaccagtacaatttgatgaaatatccagcacctccgaatattccattggctccaatacaaaatggaattcatcatatgccagttagcaatttaccaatggggtatccagtacttcagcagcctatcatgcctgctcccggccagcctcacatggatccaatggcctgcggtctgtccagtggtcatgtggttaatggaatacctgcaccaggtggttatcatcccatgcgcatgaactccggaaatgacatggttttggacaatggagcgcctgaagcaccacatgctggtgctaccggtagtgctatgtcatctgagatggctgtgagtccctcgtcggcggcttcaagcaaccatgctccttttacgccgtcagatataccaggcatgaccatggatgtatcggccctagactcggcatttgggtgtgatgtggggaatcctgaatctctgcaattgggaccagatgggtcgtcaagagactctattagatccttagggcagctctggaatttcagcctctctgatctaacagcggatttgacgagtttgggagcagatctggacgtgctggagaactacactggcacccctttcctgccatcggattcggacattttgcttgattccccagaccaagatgatatagtcgagtattttgctgacgccatcaacgggtctccgtcagacgaagagaaaccgtagtttttccggggttgcatggcatgcattcaggttcatcatcaggcagggctgtcatctcatctcatgtagtgtaaagcagccaatctaactgtgtattcggctcgcgcgcggtgatccggtaatcgggcctctgccactaaaaagaattttgtagcggttaattgaaatcctaattctttggaataagtagctgggactggaatgtccagagagtagcggtcgttgttggcttagggattgctgctggtggatgcaaacctcacagctagctggtgactctgaaaccacaggaactccttttctttttctttttacttgtatctgtatttgctgctacataagtaaacagaagtggggtgtacctagttttctggttctcgagtgtcttgaaacagtgggcgcgggttttcagctgaaagatcatgatattgtgttgttggcaaagtgctgaggacacgcgatgcaaagtttcttagattagccatacacaggaggctgctggagttgatctcacatctcagggtgtgtttggttgaactggagaatagagcctacccatcgtcaatcattttagtggagcaagaacatcccaataatttatagagttcgcccctctttcgtacaaccgttctccactcaaccaaacacacccttactcaatccatctgtgctgctctctgagctcatctttcctagtcaaacttaaatatgattacaaccaaataacg

SEQ ID NO: 28986 - DNA, 2089 bp, Zea Mays
gtgctggcgtacgggttcttcatgtacgaggcgggccatgtacctgtcggcccctgccgcaagggcgaaacctttaaaaaaagtgttgctcctacgactagttctttttatgtgtaaccttcaatgaaggattctcaggatattcagagcacgacagagttgcagtcaccagtgcaaggtactaatgaagtgcaaagtcagcaaccaaactcaatggccgctgatgctcctgctggaaattcgggttccttgtctgtagctagtaatgacaataagaaggtgtctcgcgaagatattgaacttgtaagctttctagctatctagtggcatcccttctagggtagacccagtgcctgaggctcccacatgagtggtgtctggggaagggataaaccgaggcaggcttttcccttgcaaatgcggagaggctgcttcgaacccgcaacctggttcagaatttgatagagcgttgtctacagctctacatgaacaaaggagaagttgttagaactctttctactcgtgctagaatagaacctggcttcactactttagtatggcagaaacttgaagaagaaaactccgagttctttagggcttactatatacggttgaagttgaaaaggcagatcatcttgttcaatcatttattgcaacaccagtacaatttgatgaaatatccagcacctccgaatattccattggctccaatacaaaatggaattcatcatatgccagttagcaatttaccaatggggtatccagtacttcagcagcctatcatgcctgctcccggccagcctcacatggatccaatggcctgcggtctgtccagtggtcatgtggttaatggaatacctgcaccaggtggttatcatcccatgcgcatgaactccggaaatgacatggttttggacaatggagcgcctgaagcaccacatgctggtgctaccggtagtgctatgtcatctgagatggctgtgagtccctcgtcggcggcttcaagcaaccatgctccttttacgccgtcagatataccaggcatgaccatggatgtatcggccctagactcggcatttgggtgtgatgtggggaatcctgaatctctgcaattgggaccagatgggtcgtcaagagactctattagatccttagggcagctctggaatttcagcctctctgatctaacagcggatttgacgagtttgggagcagatctggacgtgctggagaactacactggcacccctttcctgccatcggattcggacattttgcttgattccccagaccaagatgatatagtcgagtattttgctgacgccatcaacgggtctccgtcagacgaagagaaaccgtagtttttccggggttgcatggcatgcattcaggttcatcatcaggcagggctgtcatctcatctcatgtagtgtaaagcagccaatctaactgtgtattcggctcgcgcgcggtgatccggtaatcgggcctctgccactaaaaagaattttgtagcggttaattgaaatcctaattctttggaataagtagctgggactggaatgtccagagagtagcggtcgttgttggcttagggattgctgctggtggatgcaaacctcacagctagctggtgactctgaaaccacaggaactccttttctttttctttttacttgtatctgtatttgctgctacataagtaaacagaagtggggtgtacctagttttctggttctcgagtgtcttgaaacagtgggcgcgggttttcagctgaaagatcatgatattgtgttgttggcaaagtgctgaggacacgcgatgcaaagtttcttagattagccatacacaggaggctgctggagttgatctcacatctcagggtgtgtttggttgaactggagaatagagcctacccatcgtcaatcattttagtggagcaagaacatcccaataatttatagagttcgcccctctttcgtacaaccgttctccactcaaccaaacacacccttactcaatccatctgtgctgctctctgagctcatctttcctagtcaaacttaaatatgattacaaccaaataacg

SEQ ID NO: 28987 - DNA, 553 bp, Zea Mays
ttttttttttttcatgttgtcatcgatgctaccgacaaaggaaacatagcgcgcctaattaatcactcgtgtatgccgaactgctatgctaggatcatgaccgtcagcgatgacaggagcgagatcattctgattgccaagagagacgtctctgccggagaagagctgacgtacgactacttgtttgaccctgatgagtccgaagactgcagggttccatgcctgtgcaaggctcctaactgccgtgggtacatgaactagaagactaaccaacctcagaaacagggactaaagactaacgtgaccccccttacagttacagaggccaaaggctggccatttttcccggaattcttccgttggcttctcggtttatatttactggaaagtttattagttctcgtggctgcccaagttttgaaccattttgtttagatattgcgattgagggcagccaccccattgtatattctttcattgttgtaataagataccagtataatcaagaatgctgactttgaaatggaaagaagaaaaaactcaacttgatgcc

SEQ ID NO: 28988 - DNA, 5366 bp, Zea Mays
ccaaatttcccaatagaaaatgacccatccctaatcacgattcacgactccgaccgcgcgaaaacttttatcctttccctccggccggacccacctggccgcttcgcttcactccccaagtctcaactcgcggactcgcccacctgagcgcccacctcgcgccgccgagtcgtcttcccccatcacaattcacatctcccctcgctccctgcctccccggccatcgcatcgtgttcgaaatattcaaaacccaccaattcctcggattccgacactcgggtggagggaaccccaaatttttgcccccgcgtcgcctccgccttccaccctccgccccgcaaatctccaaatccgtttcggccccgaaccggacaccgccgcgcttgcttaaatcccgacgcgacgctcgcggaggcggcggaaccctataaggcctggatcccgctccgcgcccccgcccccgcccgatttcaggctctagggttacgcatgccctagcctccgctgcccgtggtgccggtgccatgcctgcgacccgcatcccgctcaagcgctgcaccgccgtcgtccccggcgtggaggatcccggccccgctgcaagcatgccgcccgctaagcgccgccgcgagcgcgtcgtcccgtcgcggttcaggggttcgatgccgccgcccgctcccgtcggggaggaggtggaggtggaggacagggacggggacgtgtacaacgtcgaggtccgcatggccgaacccaaaggcgacacatttggccccgtggagaccgcggtgtggacgccagttctgccggcgcccatggacgccgacctgtaccgggcgtgccgtaacataaacaagagcggcagctgtgggggagctgccagtggtagtgtgctcacgtctgtgagcaatgccgcctcggacggtggtgctggtggtggtggtggcaatggcgggctggaggggagacctgtggtggtggagtgcaagcccaagagggaggtcagcggcaggaaagaggatttctactggccacaggattttgtgctcggggatgttgtgtgggcgaggtctgggaagaagtccccgacatggcctgcgctggtgattgatcccctgttgcatgcgccggaagtcgtgctcaactcctgcgttcctggcgccctctgcgtcatgttttttggttattccgctaacgggcatggcagggactatggatgggttaagcaaggaatgatctttccctttgtggactacctagacaggtttcaaggacagcctctgtataagctcagaccaagcaaattccgtgcagcaattgaggaggctttccttgctgaacgtggtttttttgatctcgaaacggatggggtatgctcaccgcgaaagtctgtaaataagcagtctgatcctattggttttcaggaagaggctgcttcaaataacgagcaagaatgccaatctgagtctcaggttgttggcaaatcggcactgtgttgtgatagctgtggtaatcgtctaccatccaaggtttcaaagaaaaggaagcaagcgggtgagcagatgctttgtatgcactgtgaaaagttattgcagtcgaaacaatactgtggcatatgcaagaaaatttggcaccacacagatggtggaaactgggtttgttgtgatgagtgccagatttgggttcacgttgaatgtgatctaacatgcaacaacgtcgaggatttggaaaatgcagattatttctgtccggattgcaaatcaaaaagtaaaacagttccagcaactgaaaatttgaatacttccacttcagaatgtgccagcacttctaagggaaaactgaccgcaatgatagctgtttgctgcaatggcgaggatgcactgtatgtacctgagaagcacatgatactatgtcaatgtaagtcttgcaaggaaaggatgatgagtctgaatgagtgggagaagcatactggctcaaggaaaaagaattggaagatgagtattagacaaaagagtactggggaactactcattaatttgctggatgatattccttgtgggacatcgaagtattctaacccaggcattaagaaagaagagctgctacaattgcaagctaatccttacagtcctgtctgtgctaaatggacaactgaacgatgtgctgtttgtcgatgggttgaggattgggactacaataaaattataatttgcaacagatgccaaatagctgttcatcaagagtgctatggagcatgtgctgtacaagatcttacaacatggctttgtcgagcatgtgaatccccccaacagaaaagagaatgttgtctatgccctgtcaaagggggcgctctcaagccaacagacattgatggactgtgggttcatgttacatgtgcctggtttcagcctaaagtatcatttccggttgatgagacgatggagccagctatgggaataatgagcatccctgtagaatactttaagaagacttgcgtcatatgcaagcaaatgcatggtgcctgcacacaatgctacaaatgctctacctattaccacgcaatatgtgcgtcaagagctggatattgcatggagttgcaatgctctgaaagaagtggcaggcacattacaaaaatggtttcatactgtgattttcatagtactcctgacccagacaatgtgttgatagtgaagacaccggaaggtgttttctctaccaaattttttctccaaaatggtgagaaacagacagctgcaagactcgtcaggaaggaaaatcaccaggagaaagtgcttcctcctataatttctgactgtctagtcgcaaagtgcctgacctatgaaatgtcgaaatacaagaaacaaccaggagaggctattgcccaccggattatgggacctcgtcaccactctcaggattttattgatggtcttaatgcatgcatggatcgtaaggatgaccaatctttttcaacatttaaagagcgacttcggtatttacagaaaactgaaaatttgagggtctcgtgtggtcgatctggaattcatggatgggggctcttcgccgcaaggaatattcaggagggtcaaatggttattgagtaccgtggcgaacaagttagacggtgtgttgctgacttgagggaagcacagtaccatagagaaaaaaaggattgctatttgttcaagataagcgaagatgttgtcatcgatgctaccgacaaaggaaacatagcgcgcctaattaatcactcgtgtatgccgaactgctatgctaggatcatgaccgtcagcgatgacaggagcgagatcattctgattgccaagagagacgtctctgccggagaagagctgacgtacgactacttgtttgaccctgatgagtccgaagactgcagggttccatgcctgtgcaaggctcctaactgccgtgggtacatgaactagaagactaaccaacctcagaaacagggactaaagactaacgtgaccccccttacagttacagaggccaaaggctggccatttttcccggaattcttccgttggcttctcggtttatatttactggaaagtttattagttctcgtggctgcccaagttttgaaccattttgtttagatattgcgattgagggcagccaccccattgtatattctttcattgttgtaataagataccagtataatcaagaatgctgactttgaaatggaaagaagaaaaaactcaacttgatgccgtcgtctgcctgtgacatcaatgtattaaccactcgctttggcctgtccatgtctggacttcgaaccagatgacctgatcaaaccgtggaactggcagtaatcttgctcttcaatccatctatcatcattaacaacatccgtgttgagccggcaggccgtgtgcccgtccgacgaccgggtcccgacaggagagtttaagcaggcagggcagggccgccgtggacgcgggaccgaagcagggccaccgccgctgcaccatgacgcgtctgctgctggcgtgcctggctctgctgctggcgcgggcggccgtggcgcgggagtacgcggccgtcttcagcttcggcgactccctgtcggacaccggcaacctgtgcgtggacggcatcccggactacttggccacggcgcacgcgccgtacggcatgacctacttcggctatcccacggggcgcgtctccgacggccgcgtcgtcatcgacttcatcgcgcaggagctggggctgccgctgctgccaccgtccaaggcgaagaacgcgacgttccgccgcggcgccaacttcgccatcacgggcgccacggcgctggacatggccttcttcgaggagcacgggctggcgcgcgccgtgtggagctccggctcgctccacacccagatcgggtggttccgggacatgaagcccaacatctgcagctccccgcaagagtgccgtgagctgttccggcggtcgctgttcgtggtgggcgagttcgggggcaacgactacgggtcgaccatcttctcgttccggccgctggaggaggtgcacgcgctggtgccgcatgtggtggacgtcatcgcgcggggcgtggaggagctgatcgcggagggggccgcggacctggtggtgccggggttgctccccaccggctgcttccccatgttcctgtccaccttcgtcggcaagccggccgcggcgtacgggccccgcagcgggtgcaacagggagctcaacacgctgtcgtgggtgcacaacgcggcgctgcagcgcaaggtggaggagctccgcgccaggcaccccgacgtgcgcatcgtctacgccgactactacacgcccgccatccggttcgtcctccacgctgaggagtacggcatgctgaggcagacgccgcgggcctgctgcggggcgccgggagtgggggagtacaacttcaacctgacgtccaagtgcggcgagccgggggcgtacgcgtgccaggacccctccaaccactggagctgggacggcgcccacctcacggaggccgcctacggccacatcgccaagggctggctctacgggccctacgccgacccgcccatccttcacccctgaatccttctccctccgatccgcccgccggcgccgggtaccgacatacgaataggcatacggatacacagcatgctagttaatctagtttgatttgcataagaagtttttactattgtactcgtagtgttttttaatacagtataaaattataaactgtacatgtaagtttgcgctatgttaacttctgtacataacttgggatcggagtatatataaacttgtactattacatgttgagtaataatatacagatcgatctctttcgacttttttaaaaaaga

SEQ ID NO: 28989 - DNA, 3946 bp, Zea Mays
ccaagtctcaactcgcggactcgcccacctgagcgcccacctcgcgccgccgagtcgtcttcccccatcacaattcacatctcccctcgctccctgcctccccggccatcgcatcgtgttcgaaatattcaaaacccaccaattcctcggattccgacactcgggtggagggaaccccaaatttttgcccccgcgtcgcctccgccttccaccctccgccccgcaaatctccaaatccgtttcggccccgaaccggacaccgccgcgcttgcttaaatcccgacgcgacgctcgcggaggcggcggaaccctataaggcctggatcccgctccgcgcccccgcccccgcccgatttcaggctctagggttacgcatgccctagcctccgctgcccgtggtgccggtgccatgcctgcgacccgcatcccgctcaagcgctgcaccgccgtcgtccccggcgtggaggatcccggccccgctgcaagcatgccgcccgctaagcgccgccgcgagcgcgtcgtcccgtcgcggttcaggggttcgatgccgccgcccgctcccgtcggggaggaggtggaggtggaggacagggacggggacgtgtacaacgtcgaggtccgcatggccgaacccaaaggcgacacatttggccccgtggagaccgcggtgtggacgccagttctgccggcgcccatggacgccgacctgtaccgggcgtgccgtaacataaacaagagcggcagctgtgggggagctgccagtggtagtgtgctcacgtctgtgagcaatgccgcctcggacggtggtgctggtggcaatggcaccaccgtccgattgagcaatgccggctcaggaggtggtggtggtggcaatggcgggctggaggggagacctgtggtggtggagtgcaagcccaagagggaggtcagcggcaggaaagaggatttctactggccacaggattttgtgctcggggatgttgtgtgggcgaggtctgggaagaagtccccgacatggcctgcgctggtgattgatcccctgttgcatgcgccggaagtcgtgctcaactcctgcgttcctggcgccctctgcgtcatgttttttggttattccgctaacgggcatggcagggactatggatgggttaagcaaggaatgatctttccctttgtggactacctagacaggtttcaaggacagcctctgtataagctcagaccaagcaaattccgtgcagcaattgaggaggctttccttgctgaacgtggtttttttgatctcgaaacggatggggtatgctcaccgcgaaagtctgtaaataagcagtctgatcctattggttttcaggaagaggctgcttcaaataacgagcaagaatgccaatctgagtctcaggttgttggcaaatcggcactgtgttgtgatagctgtggtaatcgtctaccatccaaggtttcaaagaaaaggaagcaagcgggtgagcagatgctttgtatgcactgtgaaaagttattgcagtcgaaacaatactgtggcatatgcaagaaaatttggcaccacacagatggtggaaactgggtttgttgtgatgagtgccagatttgggttcacgttgaatgtgatctaacatgcaacaacgtcgaggatttggaaaatgcagattatttctgtccggattgcaaatcaaaaagtaaaacagttccagcaactgaaaatttgaatacttccacttcagaatgtgccagcacttctaagggaaaactgaccgcaatgatagctgtttgctgcaatggcgaggatgcactgtatgtacctgagaagcacatgatactatgtcaatgtaagtcttgcaaggaaaggatgatgagtctgaatgagtgggagaagcatactggctcaaggaaaaagaattggaagatgagtattagacaaaagagtactggggaactactcattaatttgctggatgatattccttgtgggacatcgaagtattctaacccaggcattaagaaagaagagctgctacaattgcaagctaatccttacagtcctgtctgtgctaaatggacaactgaacgatgtgctgtttgtcgatgggttgaggattgggactacaataaaattataatttgcaacagatgccaaatagctgttcatcaagagtgctatggagcatgtgctgtacaagatcttacaacatggctttgtcgagcatgtgaatccccccaacagaaaagagaatgttgtctatgccctgtcaaagggggcgctctcaagccaacagacattgatggactgtgggttcatgttacatgtgcctggtttcagcctaaagtatcatttccggttgatgagacgatggagccagctatgggaataatgagcatccctgtagaatactttaagaagacttgcgtcatatgcaagcaaatgcatggtgcctgcacacaatgctacaaatgctctacctattaccacgcaatatgtgcgtcaagagctggatattgcatggagttgcaatgctctgaaagaagtggcaggcacattacaaaaatggtttcatactgtgattttcatagtactcctgacccagacaatgtgttgatagtgaagacaccggaaggtgttttctctaccaaattttttctccaaaatggtgagaaacagacagctgcaagactcgtcaggaaggaaaatcaccaggagaaagtgcttcctcctataatttctgactgtctagtcgcaaagtgcctgacctatgaaatgtcgaaatacaagaaacaaccaggagaggctattgcccaccggattatgggacctcgtcaccactctcaggattttattgatggtcttaatgcatgcatggatcgtaaggatgaccaatctttttcaacatttaaagagcgacttcggtatttacagaaaactgaaaatttgagggtctcgtgtggtcgatctggaattcatggatgggggctcttcgccgcaaggaatattcaggagggtcaaatggttattgagtaccgtggcgaacaagttagacggtgtgttgctgacttgagggaagcacagtaccatagagaaaaaaaggattgctatgtgagctaccatttattgtgcttacttatattgttacttcctgttactggtgcgaaagtagatacatatacacaattttctgattgctatactttgctccaagttttgagctttccaatacaaatctagaagaataggatcttgaagtcttgaattttggtgaaaacttaagaggttgcagaagcaatttgttgtagcaagaaagagcataacaaatgtatgactgatactgaacattttgcacccactcccctatttcattgactcttcattctgctgcgcagttgttcaagataagcgaagatgttgtcatcgatgctaccgacaaaggaaacatagcgcgcctaattaatcactcgtgtatgccgaactgctatgctaggatcatgaccgtcagcgatgacaggagcgagatcattctgattgccaagagagacgtctctgccggagaagagctgacgtacgactacttgtttgaccctgatgagtccgaagactgcagggttccatgcctgtgcaaggctcctaactgccgtgggtacatgaactagaagactaaccaacctcagaaacagggactaaagactaacgtgaccccccttacagttacagaggccaaaggctggccatttttcccggaattcttccgttggcttctcggtttatatttactggaaagtttattagttctcgtggctgcccaagttttgaaccattttgtttagatattgcgattgagggcagccaccccattgtatattctttcattgttgtaataagataccagtataatcaagaatgctgactttgaaatggaaagaagaaaaaactcaacttgatgcc

SEQ ID NO: 28990 - DNA, 3584 bp, Zea Mays
ccgagtcgtcttcccccatcacaattcacatctcccctcgctccctgcctccccggccatcgcatcgtgttcgaaatattcaaaacccaccaattcctcggattccgacactcgggtggagggaaccccaaatttttgcccccgcgtcgcctccgccttccaccctccgccccgcaaatctccaaatccgtttcggccccgaaccggacaccgccgcgcttgcttaaatcccgacgcgacgctcgcggaggcggcggaaccctataaggcctggatcccgctccgcgcccccgcccccgcccgatttcaggctctagggttacgcatgccctagcctccgctgcccgtggtgccggtgccatgcctgcgacccgcatcccgctcaagcgctgcaccgccgtcgtccccggcgtggaggatcccggccccgctgcaagcatgccgcccgctaagcgccgccgcgagcgcgtcgtcccgtcgcggttcaggggttcgatgccgccgcccgctcccgtcggggaggaggtggaggtggaggacagggacggggacgtgtacaacgtcgaggtccgcatggccgaacccaaaggcgacacatttggccccgtggagaccgcggtgtggacgccagttctgccggcgcccatggacgccgacctgtaccgggcgtgccgtaacataaacaagagcggcagctgtgggggagctgccagtggtagtgtgctcacgtctgtgagcaatgccgcctcggacggtggtgctggtggcaatggcaccaccgtccgattgagcaatgccggctcaggaggtggtggtggtggcaatggcgggctggaggggagacctgtggtggtggagtgcaagcccaagagggaggtcagcggcaggaaagaggatttctactggccacaggattttgtgctcggggatgttgtgtgggcgaggtctgggaagaagtccccgacatggcctgcgctggtgattgatcccctgttgcatgcgccggaagtcgtgctcaactcctgcgttcctggcgccctctgcgtcatgttttttggttattccgctaacgggcatggcagggactatggatgggttaagcaaggaatgatctttccctttgtggactacctagacaggtttcaaggacagcctctgtataagctcagaccaagcaaattccgtgcagcaattgaggaggctttccttgctgaacgtggtttttttgatctcgaaacggatggggtatgctcaccgcgaaagtctgtaaataagcagtctgatcctattggttttcaggaagaggctgcttcaaataacgagcaagaatgccaatctgagtctcaggttgttggcaaatcggcactgtgttgtgatagctgtggtaatcgtctaccatccaaggtttcaaagaaaaggaagcaagcgggtgagcagatgctttgtatgcactgtgaaaagttattgcagtcgaaacaatactgtggcatatgcaagaaaatttggcaccacacagatggtggaaactgggtttgttgtgatgagtgccagatttgggttcacgttgaatgtgatctaacatgcaacaacgtcgaggatttggaaaatgcagattatttctgtccggattgcaaatcaaaaagtaaaacagttccagcaactgaaaatttgaatacttccacttcagaatgtgccagcacttctaagggaaaactgaccgcaatgatagctgtttgctgcaatggcgaggatgcactgtatgtacctgagaagcacatgatactatgtcaatgtaagtcttgcaaggaaaggatgatgagtctgaatgagtgggagaagcatactggctcaaggaaaaagaattggaagatgagtattagacaaaagagtactggggaactactcattaatttgctggatgatattccttgtgggacatcgaagtattctaacccaggcattaagaaagaagagctgctacaattgcaagctaatccttacagtcctgtctgtgctaaatggacaactgaacgatgtgctgtttgtcgatgggttgaggattgggactacaataaaattataatttgcaacagatgccaaatagctgttcatcaagagtgctatggagcatgtgctgtacaagatcttacaacatggctttgtcgagcatgtgaatccccccaacagaaaagagaatgttgtctatgccctgtcaaagggggcgctctcaagccaacagacattgatggactgtgggttcatgttacatgtgcctggtttcagcctaaagtatcatttccggttgatgagacgatggagccagctatgggaataatgagcatccctgtagaatactttaagaagacttgcgtcatatgcaagcaaatgcatggtgcctgcacacaatgctacaaatgctctacctattaccacgcaatatttgcaatgctctgaaagaagtggcaggcacattacaaaaatggtttcatactgtgattttcatagtactcctgacccagacaatgtgttgatagtgaagacaccggaaggtgttttctctaccaaattttttctccaaaatggtgagaaacagacagctgcaagactcgtcaggaaggaaaatcaccaggagaaagtgcttcctcctataatttctgactgtctagtcgcaaagtgcctgacctatgaaatgtcgaaatacaagaaacaaccaggagaggctattgcccaccggattatgggacctcgtcaccactctcaggattttattgatggtcttaatgcatgcatggatcgtaaggatgaccaatctttttcaacatttaaagagcgacttcggtatttacagaaaactgaaaatttgagggtctcgtgtggtcgatctggaattcatggatgggggctcttcgccgcaaggaatattcaggagggtcaaatggttattgagtaccgtggcgaacaagttagacggtgtgttgctgacttgagggaagcacagtaccatagagaaaaaaaggattgctatttgttcaagataagcgaagatgttgtcatcgatgctaccgacaaaggaaacatagcgcgcctaattaatcactcgtgtatgccgaactgctatgctaggatcatgaccgtcagcgatgacaggagcgagatcattctgattgccaagagagacgtctctgccggagaagagctgacgtacgactacttgtttgaccctgatgagtccgaagactgcagggttccatgcctgtgcaaggctcctaactgccgtgggtacatgaactagaagactaaccaacctcagaaacagggactaaagactaacgtgaccccccttacagttacagaggccaaaggctggccatttttcccggaattcttccgttggcttctcggtttatatttactggaaagtttattagttctcgtggctgcccaagttttgaaccattttgtttagatattgcgattgagggcagccaccccattgtatattctttcattgttgtaataagataccagtataatcaagaatgctgactttgaaatggaaagaagaaaaaactcaacttgatgcc

SEQ ID NO: 28991 - DNA, 3548 bp, Zea Mays
gtcgtcttcccccatcacaattcacatctcccctcgctccctgcctccccggccatcgcatcgtgttcgaaatattcaaaacccaccaattcctcggattccgacactcgggtggagggaaccccaaatttttgcccccgcgtcgcctccgccttccaccctccgccccgcaaatctccaaatccgtttcggccccgaaccggacaccgccgcgcttgcttaaatcccgacgcgacgctcgcggaggcggcggaaccctataaggcctggatcccgctccgcgcccccgcccccgcccgatttcaggctctagggttacgcatgccctagcctccgctgcccgtggtgccggtgccatgcctgcgacccgcatcccgctcaagcgctgcaccgccgtcgtccccggcgtggaggatcccggccccgctgcaagcatgccgcccgctaagcgccgccgcgagcgcgtcgtcccgtcgcggttcaggggttcgatgccgccgcccgctcccgtcggggaggaggtggaggtggaggacagggacggggacgtgtacaacgtcgaggtccgcatggccgaacccaaaggcgacacatttggccccgtggagaccgcggtgtggacgccagttctgccggcgcccatggacgccgacctgtaccgggcgtgccgtaacataaacaagagcggcagctgtgggggagctgccagtggtagtgtgctcacgtctgtgagcaatgccgcctcggacggtggtgctggtggtggtggtggcaatggcgggctggaggggagacctgtggtggtggagtgcaagcccaagagggaggtcagcggcaggaaagaggatttctactggccacaggattttgtgctcggggatgttgtgtgggcgaggtctgggaagaagtccccgacatggcctgcgctggtgattgatcccctgttgcatgcgccggaagtcgtgctcaactcctgcgttcctggcgccctctgcgtcatgttttttggttattccgctaacgggcatggcagggactatggatgggttaagcaaggaatgatctttccctttgtggactacctagacaggtttcaaggacagcctctgtataagctcagaccaagcaaattccgtgcagcaattgaggaggctttccttgctgaacgtggtttttttgatctcgaaacggatggggtatgctcaccgcgaaagtctgtaaataagcagtctgatcctattggttttcaggaagaggctgcttcaaataacgagcaagaatgccaatctgagtctcaggttgttggcaaatcggcactgtgttgtgatagctgtggtaatcgtctaccatccaaggtttcaaagaaaaggaagcaagcgggtgagcagatgctttgtatgcactgtgaaaagttattgcagtcgaaacaatactgtggcatatgcaagaaaatttggcaccacacagatggtggaaactgggtttgttgtgatgagtgccagatttgggttcacgttgaatgtgatctaacatgcaacaacgtcgagattatttctgtccggattgcaaatcaaaaagtaaaacagttccagcaactgaaaatttgaatacttccacttcagaatgtgccagcacttctaagggaaaactgaccgcaatgatagctgtttgctgcaatggcgaggatgcactgtatgtacctgagaagcacatgatactatgtcaatgtaagtcttgcaaggaaaggatgatgagtctgaatgagtgggagaagcatactggctcaaggaaaaagaattggaagatgagtattagacaaaagagtactggggaactactcattaatttgctggatgatattccttgtgggacatcgaagtattctaacccaggcattaagaaagaagagctgctacaattgcaagctaatccttacagtcctgtctgtgctaaatggacaactgaacgatgtgctgtttgtcgatgggttgaggattgggactacaataaaattataatttgcaacagatgccaaatagctgttcatcaagagtgctatggagcatgtgctgtacaagatcttacaacatggctttgtcgagcatgtgaatccccccaacagaaaagagaatgttgtctatgccctgtcaaagggggcgctctcaagccaacagacattgatggactgtgggttcatgttacatgtgcctggtttcagcctaaagtatcatttccggttgatgagacgatggagccagctatgggaataatgagcatccctgtagaatactttaagaagacttgcgtcatatgcaagcaaatgcatggtgcctgcacacaatgctacaaatgctctacctattaccacgcaatatgtgcgtcaagagctggatattgcatggagttgcaatgctctgaaagaagtggcaggcacattacaaaaatggtttcatactgtgattttcatagtactcctgacccagacaatgtgttgatagtgaagacaccggaaggtgttttctctaccaaattttttctccaaaatggtgagaaacagacagctgcaagactcgtcaggaaggaaaatcaccaggagaaagtgcttcctcctataatttctgactgtctagtcgcaaagtgcctgacctatgaaatgtcgaaatacaagaaacaaccaggagaggctattgcccaccggattatgggacctcgtcaccactctcaggattttattgatggtcttaatgcatgcatggatcgtaaggatgaccaatctttttcaacatttaaagagcgacttcggtatttacagaaaactgaaaatttgagggtctcgtgtggtcgatctggaattcatggatgggggctcttcgccgcaaggaatattcaggagggtcaaatggttattgagtaccgtggcgaacaagttagacggtgtgttgctgacttgagggaagcacagtaccatagagaaaaaaaggattgctatttgttcaagataagcgaagatgttgtcatcgatgctaccgacaaaggaaacatagcgcgcctaattaatcactcgtgtatgccgaactgctatgctaggatcatgaccgtcagcgatgacaggagcgagatcattctgattgccaagagagacgtctctgccggagaagagctgacgtacgactacttgtttgaccctgatgagtccgaagactgcagggttccatgcctgtgcaaggctcctaactgccgtgggtacatgaactagaagactaaccaacctcagaaacagggactaaagactaacgtgaccccccttacagttacagaggccaaaggctggccatttttcccggaattcttccgttggcttctcggtttatatttactggaaagtttattagttctcgtggctgcccaagttttgaaccattttgtttagatattgcgattgagggcagccaccccattgtatattctttcattgttgtaataagataccagtataatcaagaatgctgactttgaaatggaaagaagaaaaaactcaacttgatgcc

SEQ ID NO: 28992 - DNA, 3607 bp, Zea Mays
cacaattcacatctcccctcgctccctgcctccccggccatcgcatcgtgttcgaaatattcaaaacccaccaattcctcggattccgacactcgggtggagggaaccccaaatttttgcccccgcgtcgcctccgccttccaccctccgccccgcaaatctccaaatccgtttcggccccgaaccggacaccgccgcgcttgcttaaatcccgacgcgacgctcgcggaggcggcggaaccctataaggcctggatcccgctccgcgcccccgcccccgcccgatttcaggctctagggttacgcatgccctagcctccgctgcccgtggtgccggtgccatgcctgcgacccgcatcccgctcaagcgctgcaccgccgtcgtccccggcgtggaggatcccggccccgctgcaagcatgccgcccgctaagcgccgccgcgagcgcgtcgtcccgtcgcggttcaggggttcgatgccgccgcccgctcccgtcggggaggaggtggaggtggaggacagggacggggacgtgtacaacgtcgaggtccgcatggccgaacccaaaggcgacacatttggccccgtggagaccgcggtgtggacgccagttctgccggcgcccatggacgccgacctgtaccgggcgtgccgtaacataaacaagagcggcagctgtgggggagctgccagtggtagtgtgctcacgtctgtgagcaatgccgcctcggacggtggtgctggtggcaatggcaccaccgtccgattgagcaatgccggctcaggaggtggtggtggtggcaatggcgggctggaggggagacctgtggtggtggagtgcaagcccaagagggaggtcagcggcaggaaagaggatttctactggccacaggattttgtgctcggggatgttgtgtgggcgaggtctgggaagaagtccccgacatggcctgcgctggtgattgatcccctgttgcatgcgccggaagtcgtgctcaactcctgcgttcctggcgccctctgcgtcatgttttttggttattccgctaacgggcatggcagggactatggatgggttaagcaaggaatgatctttccctttgtggactacctagacaggtttcaaggacagcctctgtataagctcagaccaagcaaattccgtgcagcaattgaggaggctttccttgctgaacgtggtttttttgatctcgaaacggatggggtatgctcaccgcgaaagtctgtaaataagcagtctgatcctattggttttcaggaagaggctgcttcaaataacgagcaagaatgccaatctgagtctcaggttgttggcaaatcggcactgtgttgtgatagctgtggtaatcgtctaccatccaaggtttcaaagaaaaggaagcaagcgggtgagcagatgctttgtatgcactgtgaaaagttattgcagtcgaaacaatactgtggcatatgcaagaaaatttggcaccacacagatggtggaaactgggtttgttgtgatgagtgccagatttgggttcacgttgaatgtgatctaacatgcaacaacgtcgaggatttggaaaatgcagattatttctgtccggattgcaaatcaaaaagtaaaacagttccagcaactgaaaatttgaatacttccacttcagaatgtgccagcacttctaagggaaaactgaccgcaatgatagctgtttgctgcaatggcgaggatgcactgtatgtacctgagaagcacatttattgttggcaggatactatgtcaatgtaagtcttgcaaggaaaggatgatgagtctgaatgagtgggagaagcatactggctcaaggaaaaagaattggaagatgagtattagacaaaagagtactggggaactactcattaatttgctggatgatattccttgtgggacatcgaagtattctaacccaggcattaagaaagaagagctgctacaattgcaagctaatccttacagtcctgtctgtgctaaatggacaactgaacgatgtgctgtttgtcgatgggttgaggattgggactacaataaaattataatttgcaacagatgccaaatagctgttcatcaagagtgctatggagcatgtgctgtacaagatcttacaacatggctttgtcgagcatgtgaatccccccaacagaaaagagaatgttgtctatgccctgtcaaagggggcgctctcaagccaacagacattgatggactgtgggttcatgttacatgtgcctggtttcagcctaaagtatcatttccggttgatgagacgatggagccagctatgggaataatgagcatccctgtagaatactttaagaagacttgcgtcatatgcaagcaaatgcatggtgcctgcacacaatgctacaaatgctctacctattaccacgcaatatgtgcgtcaagagctggatattgcatggagttgcaatgctctgaaagaagtggcaggcacattacaaaaatggtttcatactgtgattttcatagtactcctgacccagacaatgtgttgatagtgaagacaccggaaggtgttttctctaccaaattttttctccaaaatggtgagaaacagacagctgcaagactcgtcaggaaggaaaatcaccaggagaaagtgcttcctcctataatttctgactgtctagtcgcaaagtgcctgacctatgaaatgtcgaaatacaagaaacaaccaggagaggctattgcccaccggattatgggacctcgtcaccactctcaggattttattgatggtcttaatgcatgcatggatcgtaaggatgaccaatctttttcaacatttaaagagcgacttcggtatttacagaaaactgaaaatttgagggtctcgtgtggtcgatctggaattcatggatgggggctcttcgccgcaaggaatattcaggagggtcaaatggttattgagtaccgtggcgaacaagttagacggtgtgttgctgacttgagggaagcacagtaccatagagaaaaaaaggattgctatttgttcaagataagcgaagatgttgtcatcgatgctaccgacaaaggaaacatagcgcgcctaattaatcactcgtgtatgccgaactgctatgctaggatcatgaccgtcagcgatgacaggagcgagatcattctgattgccaagagagacgtctctgccggagaagagctgacgtacgactacttgtttgaccctgatgagtccgaagactgcagggttccatgcctgtgcaaggctcctaactgccgtgggtacatgaactagaagactaaccaacctcagaaacagggactaaagactaacgtgaccccccttacagttacagaggccaaaggctggccatttttcccggaattcttccgttggcttctcggtttatatttactggaaagtttattagttctcgtggctgcccaagttttgaaccattttgtttagatattgcgattgagggcagccaccccattgtatattctttcattgttgtaataagataccagtataatcaagaatgctgactttgaaatggaaagaagaaaaaactcaacttgatgcc

SEQ ID NO: 28993 - DNA, 591 bp, Zea Mays
gtgcttacttatattgttacttcctgttactgttgttcaagataagcgaagatgttgtcatcgatgctaccgacaaaggaaacatagcgcgcctaattaatcactcgtgtatgccgaactgctatgctaggatcatgaccgtcagcgatgacaggagcgagatcattctgattgccaagagagacgtctctgccggagaagagctgacgtacgactacttgtttgaccctgatgagtccgaagactgcagggttccatgcctgtgcaaggctcctaactgccgtgggtacatgaactagaagactaaccaacctcagaaacagggactaaagactaacgtgaccccccttacagttacagaggccaaaggctggccatttttcccggaattcttccgttggcttctcggtttatatttactggaaagtttattagttctcgtggctgcccaagttttgaaccattttgtttagatattgcgattgagggcagccaccccattgtatattctttcattgttgtaataagataccagtataatcaagaatgctgactttgaaatggaaagaagaaaaaactcaacttgatgcc

SEQ ID NO: 28994 - DNA, 1478 bp, Zea Mays
caatgatcgcgcacgtccctgtccggagagtccagaccagccctatcgccgccggagccgcacgcagccacaggaagctgatggccgcgccgaaaagcagtccaatcagccagccattcaattcaatacaagtggcctgaatcgaaaacaggacaggcgcgcacctctggagactggactcatccgttcgggtcgtcatgaaaagccagtccacgccactgccacaaactccgacgccgacggcggccccaggaggaggaggaggaggacatgagcagcccgtggctccgggcggccggctcgccgcgctcctgccaagggggacgatggcgaggcggcgagccgcgctggcggcgctgctagtgctgctgctgctggcggcgtgcacggcggcggcggccgccgtgaccgtgtcgcggaagcagcggcagcggcaccaccccggcggggcgtcggcgtcggcggcgcggtcctgcgaccccttcgcggcggcaggcgcgtgggtggaggacgggtcgtacccgctctacgactcggcgcgctgccccttcatccgcgacgagttcgcgtgcgcgcgcttcggccgccccgacacggcgtacctccggtaccggtggcggctggacgcgccgtgcgcgcagcccgccttcgacggggccgcgctgctccggatgtggcgcggcaagacggccatgttcgtcggcgactcgctggcgctcaaccagtacgagtcgctgctctgcatgctccacgccgccgcgggccccgccgcgcggaccaccctgtcgccgccgtccgggaagatcgacccctcctccaccgtccgcttcgaggggccaggactggggcgcgtcgccgaagaagacgtgcatgggggagacgcggccgctcaacgccacggggccctacccgggcggcccgatcccgcagcaggcgatcctgcgcggcgtgctggcggccatggccaagcccgtctacctgctcgacttcacctacctctcgcagctgcgcaaggacgcgcaccccaccaagtacgacggcggcatcttcggcggcgactgcacgcactggtgcgtcgccggcctccccgacacctggaacgtcctcttctacgccgcgctcaccgccgggcaggggcacaactgatggatgagtactacgttttttctttctttcctttttctttttaccgacacgcagtgttacgtagctcaataagtaaaggaaaagaaaaagatagcagattgatttcgtatagttacgagggggccttcaaaagatttttcaacctaaatgagttgatagaagaatatcaaaagagaatattgtaattcattcccgaattcagttggcatttttcctgggggtgctggcatttaatttcctgaattcaattgcaaatttatccagttttcttggatggctcattttcgttcaaacgaaggatttatattttgtatgaaaaaataaagttcttt

SEQ ID NO: 28995 - DNA, 1778 bp, Zea Mays
cctatcgccgccggagccgcacgcagccacaggaagctgatggccgcgccgaaaagcagtccaatcagccagccattcaattcaatacaagtggcctgaatcgaaaacaggacaggcgcgcacctctggagactggactcatccgttcgggtcgtcatgaaaagccagtccacgccactgccacaaactccgacgccgacggcggccccaggaggaggaggaggaggacatgagcagcccgtggctccgggcggccggctcgccgcgctcctgccaagggggacgatggcgaggcggcgagccgcgctggcggcgctgctagtgctgctgctgctggcggcgtgcacggcggcggcggccgccgtgaccgtgtcgcggaagcagcggcagcggcaccaccccggcggggcgtcggcgtcggcggcgcggtcctgcgaccccttcgcggcggcaggcgcgtgggtggaggacgggtcgtacccgctctacgactcggcgcgctgccccttcatccgcgacgagttcgcgtgcgcgcgcttcggccgccccgacacggcgtacctccggtaccggtggcggctggacgcgccgtgcgcgcagcccgccttcgacggggccgcgctgctccggatgtggcgcggcaagacggccatgttcgtcggcgactcgctggcgctcaaccagtacgagtcgctgctctgcatgctccacgccgccgcgggccccgccgcgcggaccaccctgtcgccgccgtccgggaagatcgacccctcctccaccgtccgcttcgaggactacaacgtgaccgtcgtgtactacctgacgcactacctggtggacctcgtgacggagccgcacaccggccggcgcgtcctcaagctggacgccatcgaccaggcccgcgactggctcgccgccgacgtgctcgtcttcgactcctggcactggtggccgcgcaccggcgccacgcagccctgggactacatccaggtgggcgacacggtggtgaaggacatggaccgcacgcaggccttcgccaaggcgctgcacacctgggccaggtgggtcgacgccaaccttgtccagaccgacaccaaggtcttcttccaggggatctcgccttcccactacaggggccaggactggggcgcgtcgccgaagaagacgtgcatgggggagacgcggccgctcaacgccacggggccctacccgggcggcccgatcccgcagcaggcgatcctgcgcggcgtgctggcggccatggccaagcccgtctacctgctcgacttcacctacctctcgcagctgcgcaaggacgcgcaccccaccaagtacgacggcggcatcttcggcggcgactgcacgcactggtgcgtcgccggcctccccgacacctggaacgtcctcttctacgccgcgctcaccgccgggcaggggcacaactgatggatgagtactacgttttttctttctttcctttttctttttaccgacacgcagtgttacgtagctcaataagtaaaggaaaagaaaaagatagcagattgatttcgtatagttacgagggggccttcaaaagatttttcaacctaaatgagttgatagaagaatatcaaaagagaatattgtaattcattcccgaattcagttggcatttttcctgggggtgctggcatttaatttcctgaattcaattgcaaatttatccagttttcttggatggctcattttcgttcaaacgaaggatttatattttgtatgaaaaaataaagttcttt

SEQ ID NO: 28996 - DNA, 1087 bp, Zea Mays
gccatgagacgacctcacgccgccgccgccgctaccgctctcgctgccctcctcctcctcgtcctgtgcctcgccgccgcgttgacccgccacggcagcggaatctgccagcaggcggggaggacgccgacgaggaagatgctgctggccatgacaataagcttcgacgacgacgacgctgccgcctcgccctcgccatccggtcaccaccgccatcctcaccaccatcaccaacaccaacaccaccaccaccaccacgcgggcaggcggcgatggaaccggcggcaggggaccattccaccaccgtcagacgatgctggcgaggcccaggcggtcgacccgcgctacggcgtgcagaagcggctggttccttcgggccccaaccccttgcatcactgaggaggtgtgaggagctagcaagcaacaagtcgtctcggcgccggtggcacccgcaacgcaacacgattagcagcaacgccggccggccatgcgcagctttataattttcatggcggccgcacagctagcatgcacaggctggttcggccttccacggtgagtatatatacttctgtctacgtggcgcacatcatgcatcttgctgtgtggatccgatcgatcgggttcgagccatcgtttgttgtggagttggagctactagctgaactgctgacgaagcatgctgcgtatttcgctccggtgtcagcaggcatcgcacagccttattaactagtagctagctatagtattattcgtttccattcgtgtgttcatgcgtatgtaaatgtaatcttggtcatctccagctgcaaaagcaagtgaaacaattggagagagagagagagagggtaattgatcactagctagctacatatacacacacacatacaacgatcgaggagagagcatatatgcctatgcttggcttcctctttaattaattagtttccattccgtttccaattcgttcattttttttttctgtttcttgatcatgatcttcaaacaacgaatcgatactggtgctgctgtaattctgatgatcatccgcagcatatctccaactccaatgcaaagaaaatttcgg

SEQ ID NO: 28997 - DNA, 1232 bp, Zea Mays
ttctgccctcacaaattaacaatacaacgagccaacaagttgatgtggagaccagatcagatcacggacgacacagacggccaccaaatctgcacctgccccagatgcagcagaggtagtcgccacggcgccacctgcccactgcactgcccccagagcctccaagctgcatatcggaagtgaagcgcctcgcagtcctcctctcggatctcgcggtggaagtcgccggtccactcgatcagcgagcgagtcggtgccgcgcggcggattccccgacccgagcaaaggaaccggacatgcggccgcggctggtgctcttcggcgactccataaccgagctgtccttcgcgtccggcggatggggggccgcgctcaccgaccgcttcgcccgccaggctgacgtggtgctgcgcgggctcagcggctacaacacgcggtgggcgctcaagcacgtgccgctcaaggagtaccagagcaacctccgcgccatctgcgcctatttcaaggagcgatggccctccactgctgtcatactcatcactcccccaccgatttacgagccagcgagaatccgagacatgtatggagacgacgagccttcacgccaaccagaaaggagcaatgaggctgccggcgcttacgcacaggcatgcatagatgttgccacagaattgaaccatccagttatagacatctggaccaagatgcaggaatttccagactggcaaacatctgcattgagcgacgggctccacttcaccccagtaggaaacaagatcctgttcgaggaggtggtgaagacgctggagacgagcatcggtttcagccaggagcggctcccgtcggacctcccgctgttccacgagatcgaccccaaggaccccatgaaagccttcggagcttagcttgggccttatcggaggagacgcacggtcgttggatcagccacgtctgctgcatttgagttcgtcgtcagtatgcccgaggcctgctgaggccattacaggaacagtgagctttaataagcggtgttttcagtaccgtttggttgtcagcgcatcacgtgttgttggaacactgtggttggataaaaaaatcataccctctccgtccgaaattaaaattcattttaccttttttataattcgtacaataattaattaatacatgtgttatatatatatatagattcattattatttatttgaatataaacataaacataaagaact

SEQ ID NO: 28998 - DNA, 725 bp, Zea Mays
caaaaatcaagtcattggtttgccagttagaaagtgagaattgcatccatgcacactgctgctttcaagacatgtatggagacgacgagccttcacgccaaccagaaaggagcaatgaggctgccggcgcttacgcacaggcatgcatagatgttgccacagaattgaaccatccagttatagacatctggaccaagatgcaggaatttccagactggcaaacatctgcattgagcgacgggctccacttcaccccagtaggaaacaagatcctgttcgaggaggtggtgaagacgctggagacgagcatcggtttcagccaggagcggctcccgtcggacctcccgctgttccacgagatcgaccccaaggaccccatgaaagccttcggagcttagcttgggccttatcggaggagacgcacggtcgttggatcagccacgtctgctgcatttgagttcgtcgtcagtatgcccgaggcctgctgaggccattacaggaacagtgagctttaataagcggtgttttcagtaccgtttggttgtcagcgcatcacgtgttgttggaacactgtggttggataaaaaaatcataccctctccgtccgaaattaaaattcattttaccttttttataattcgtacaataattaattaatacatgtgttatatatatatatagattcattattatttatttgaatataaacataaacataaagaact

SEQ ID NO: 28999 - DNA, 722 bp, Zea Mays
tagatccatactgatactgctgctcatcactctgccaggaacctcctgcagtagtctgtagtcgagacatgtatggagacgacgagccttcacgccaaccagaaaggagcaatgaggctgccggcgcttacgcacaggcatgcatagatgttgccacagaattgaaccatccagttatagacatctggaccaagatgcaggaatttccagactggcaaacatctgcattgagcgacgggctccacttcaccccagtaggaaacaagatcctgttcgaggaggtggtgaagacgctggagacgagcatcggtttcagccaggagcggctcccgtcggacctcccgctgttccacgagatcgaccccaaggaccccatgaaagccttcggagcttagcttgggccttatcggaggagacgcacggtcgttggatcagccacgtctgctgcatttgagttcgtcgtcagtatgcccgaggcctgctgaggccattacaggaacagtgagctttaataagcggtgttttcagtaccgtttggttgtcagcgcatcacgtgttgttggaacactgtggttggataaaaaaatcataccctctccgtccgaaattaaaattcattttaccttttttataattcgtacaataattaattaatacatgtgttatatatatatatagattcattattatttatttgaatataaacataaacataaagaact

SEQ ID NO: 29000 - DNA, 714 bp, Zea Mays
catagctttatgaagagaatctatcagcaactgaggataagtttatgagtcctatgagacatgtatggagacgacgagccttcacgccaaccagaaaggagcaatgaggctgccggcgcttacgcacaggcatgcatagatgttgccacagaattgaaccatccagttatagacatctggaccaagatgcaggaatttccagactggcaaacatctgcattgagcgacgggctccacttcaccccagtaggaaacaagatcctgttcgaggaggtggtgaagacgctggagacgagcatcggtttcagccaggagcggctcccgtcggacctcccgctgttccacgagatcgaccccaaggaccccatgaaagccttcggagcttagcttgggccttatcggaggagacgcacggtcgttggatcagccacgtctgctgcatttgagttcgtcgtcagtatgcccgaggcctgctgaggccattacaggaacagtgagctttaataagcggtgttttcagtaccgtttggttgtcagcgcatcacgtgttgttggaacactgtggttggataaaaaaatcataccctctccgtccgaaattaaaattcattttaccttttttataattcgtacaataattaattaatacatgtgttatatatatatatagattcattattatttatttgaatataaacataaacataaagaact

SEQ ID NO: 29001 - DNA, 737 bp, Zea Mays
tgtttatatctgtatttctagacatgatgtccagtaatccaactacctggcttgatgtaatgacttcttcaatcatcgaagacatgtatggagacgacgagccttcacgccaaccagaaaggagcaatgaggctgccggcgcttacgcacaggcatgcatagatgttgccacagaattgaaccatccagttatagacatctggaccaagatgcaggaatttccagactggcaaacatctgcattgagcgacgggctccacttcaccccagtaggaaacaagatcctgttcgaggaggtggtgaagacgctggagacgagcatcggtttcagccaggagcggctcccgtcggacctcccgctgttccacgagatcgaccccaaggaccccatgaaagccttcggagcttagcttgggccttatcggaggagacgcacggtcgttggatcagccacgtctgctgcatttgagttcgtcgtcagtatgcccgaggcctgctgaggccattacaggaacagtgagctttaataagcggtgttttcagtaccgtttggttgtcagcgcatcacgtgttgttggaacactgtggttggataaaaaaatcataccctctccgtccgaaattaaaattcattttaccttttttataattcgtacaataattaattaatacatgtgttatatatatatatagattcattattatttatttgaatataaacataaacataaagaact

SEQ ID NO: 29002 - DNA, 2723 bp, Zea Mays
atgtaccaatgtgtagggctggtttgttatgggcgccggcgagttggatggacgcgccttgtcggacgcggagcagcagtagcggcgggcaaccaggcgggggatctggatccgaggcaccaccaccgggctcctcacggcggcgacgcaggcggcggcggagaaggaggaggaggcggaggagcgcagcaagaagcagatgagcagcagcggcaccacaacaaccggctgctgcagttccaccagcaagtgcagcagaaccaagacccgccgccggtccccctctttcagctccagcacctgcaggccgcggcggccgtgaggcagcggggcggcttgtcggccgagtatgcccttctcgaccccatgggcgacgccggccagtcccactcccaccgccaccaccacggcttccagccgcagctcctgtccttcggaggagtcggccagcaccacatgcaccagttcacggcgcaggcgcccgcggcgtctcactcctcgcggccgcggataggaggggtgggcgcgggcggcgaggccgcggccgccacgtccgcgtcgcactcgcgcgcgaggggcggcgccggggagatcgtggccgtgcagggagggcacattgtgcgctccacggggcgcaaggaccgccacagcaaggtgtgcacggcgcgcgggccgcgggaccggcgcgtgcgcctctctgcgcacaccgccatccagttctacgacgtgcaggaccggctgggctacgaccgccccagcaaggccgtcgactggctcatcaagaacgccaaggacgccatcgacaagctcgagacgctgcccgcgtggcagcccacggccaatgccgccgcgccgccgtcctcctcgacgcaccccgactccgccgagaactccgacgaccaggcgcaggccatcaccgtcgccgcgcacgctccgttcgacttctccggcgccggtggagcaagcggcggcgccgcgggcttcctcccggcgtcgctcgactcggactccatcgcggacacgatcaagtcgttctttcccatggctggcacgggtggcggcggcgaggcgtcgtcgtccacggcggcggcgcagtcgtcggccatgggcttccaaagctacacgcccgacctcctgtcgcgcaccggcagccacagccaggagctccggctgtcgctgcagtctctcccagaccccatgttccaccagcagcaggaccggtcggaagcccacggcggcaatggctcggcgcagcaggcgctcttctccggcgccgccagctactcgtttggcggcggcgccatgtggggcgagcaggcgcagagccagcgcatggtgccgtggaccgtgcccgacccaggcggcgggagcgctggcggctacctgttcaacgtgtcgcagcaggcggcgcacatgcaggcggcgtttggcggccagagccagttcttcttccagaggggaccccttcagtccagtaaccagccctccgagcgaggatggccggagagcgtcgaagccgacaacccgatgcagcacggcgggctcagccccgctgtgtcggccatcgggttctcgcccggcgtcggcttctccgggatccgcatccccaccaggatgcagggcgacgaggagcacaacggcggcggcaatggcgacaagccgccgccgccgtccgtgtcctcggcttctcaccactgacgacggcagagcagtggagcgcagattactccgcgcgcccaccatgccaccaaccaccatcacgagcatttcagcagcataccatgcatgaattcagcaaacacatatcaccgtcagctagctcctcaacatgcaccgcccaggtagttactttgctgctgcttcctacgacaacggatggctgcagcaaaatggaggagcaaggttgggagcgaagcactctttttgactggctggttggttggccggtcggtcggtcggtcggtttctctaccatctctcgctgctttgtgtacgtcactggtttttgctccaagaactcactcactcactcggagcttctcttgttagaaattaggcctgtgagaacgcagcacattggctagccagcaggttctttcttcactagatctcttgctgcttgtccgtttgctgcgttgttacagtaggtttagttgatgttctagttgctgtagtagttctcaagcttttgcatcttaattttgctgttgttctcgctggcgctctgcacggatcgatgggggttaagctagtgtgcttcctcctggggttcagggagcagctataagcggcagcgcagcgccagccagcggatgatgttgttgttgttgttagcctgataattaagcggatggggacaggagtctttggttctttttaaaataatctctctgatgtgattggcgtttgagacggattgtgcgtgcctgcctgccctgctaagatcttgttcagcattttaaaactgtcatgtgcatgtgcacctagctaggatggtgccattgccaatctccaagctgctagctgctgcctagctataacacgcacagtagtaatactttatcttgtctttgttcttgttgcatgttgaaccattgtttggaattggaagtgagaaatttaaagaccttccccacttaatggcagcgcagagcacaggagtaggggatttagcgcgcgctcttttgtgttacagtacagtagtacggggatggaagaaaaag

SEQ ID NO: 29003 - DNA, 2720 bp, Zea Mays
atgtaccaatgtgtagggctggtttgttatgggcgccggcgagttggatggacgcgccttgtcggacgcggagcagcagtagcggcgggcaaccaggcgggggatctggatccgaggcaccaccaccgggctcctcacggcggcgacgcaggcggcggcggagaaggaggaggaggcggaggagcgcagcaagaagcagatgagcagcagcggcaccacaacaaccggctgctgcagttccaccagcaagtgcagcagaaccaagacccgccgccggtccccctctttcagctccagcacctgcaggccgcggcggccgtgaggcagcggggcggcttgtcggccgagtatgcccttctcgaccccatgggcgacgccggccagtcccactcccaccgccaccaccacggcttccagccgcagctcctgtccttcggaggagtcggccagcaccacatgcaccagttcacggcgcaggcgcccgcggcgtctcactcctcgcggccgcggataggaggggtgggcgcgggcggcgaggccgcggccgccacgtccgcgtcgcactcgcgcgcgaggggcggcgccggggagatcgtggccgtgcagggagggcacattgtgcgctccacggggcgcaaggaccgccacagcaaggtgtgcacggcgcgcgggccgcgggaccggcgcgtgcgcctctctgcgcacaccgccatccagttctacgacgtgcaggaccggctgggctacgaccgccccagcaaggccgtcgactggctcatcaagaacgccaaggacgccatcgacaagctcgagacgctgcccgcgtggcagcccacggccaatgccgccgcgccgccgtcctcctcgacgcaccccgactccgccgagaactccgacgaccaggcgcaggccatcaccgtcgccgcgcacgctccgttcgacttctccggcgccggtggagcaagcggcggcgccgcgggcttcctcccggcgtcgctcgactcggactccatcgcggacacgatcaagtcgttctttcccatggctggcacgggtggcggcggcgaggcgtcgtcgtccacggcggcggcgcagtcgtcggccatgggcttccaaagctacacgcccgacctcctgtcgcgcaccggcagccacagccaggagctccggctgtcgctgcagtctctcccagaccccatgttccaccagcagcaggaccggtcggaagcccacggcggcaatggctcggcgcagcaggcgctcttctccggcgccgccagctactcgtttggcggcggcgccatgtggggcgagcaggcgcagagccagcgcatggtgccgtggaccgtgcccgacccaggcggcgggagcgctggcggctacctgttcaacgtgtcgcagcaggcggcgcacatgcaggcggcgtttggcggccagagccagttcttcttccagaggggaccccttcagtccagtaaccagccctccgagcgaggatggccggagagcgtcgaagccgacaacccgatgcagcacggcgggctcagccccgctgtgtcggccatcgggttctcgcccggcgtcggcttctccgggatccgcatccccaccaggatgcagggcgacgaggagcacaacggcggcggcaatggcgacaagccgccgccgccgtccgtgtcctcggcttctcaccactgacgacggcagagcagtggagcgcagattactccgcgcgcccaccatgccaccaaccaccatcacgagcatttcagcagcataccatgcatgaattcagcaaacacatatcaccgtcagctagctcctcaacatgcaccgccgtagttactttgctgctgcttcctacgacaacggatggctgcagcaaaatggaggagcaaggttgggagcgaagcactctttttgactggctggttggttggccggtcggtcggtcggtcggtttctctaccatctctcgctgctttgtgtacgtcactggtttttgctccaagaactcactcactcactcggagcttctcttgttagaaattaggcctgtgagaacgcagcacattggctagccagcaggttctttcttcactagatctcttgctgcttgtccgtttgctgcgttgttacagtaggtttagttgatgttctagttgctgtagtagttctcaagcttttgcatcttaattttgctgttgttctcgctggcgctctgcacggatcgatgggggttaagctagtgtgcttcctcctggggttcagggagcagctataagcggcagcgcagcgccagccagcggatgatgttgttgttgttgttagcctgataattaagcggatggggacaggagtctttggttctttttaaaataatctctctgatgtgattggcgtttgagacggattgtgcgtgcctgcctgccctgctaagatcttgttcagcattttaaaactgtcatgtgcatgtgcacctagctaggatggtgccattgccaatctccaagctgctagctgctgcctagctataacacgcacagtagtaatactttatcttgtctttgttcttgttgcatgttgaaccattgtttggaattggaagtgagaaatttaaagaccttccccacttaatggcagcgcagagcacaggagtaggggatttagcgcgcgctcttttgtgttacagtacagtagtacggggatggaagaaaaag

SEQ ID NO: 29004 - DNA, 3167 bp, Zea Mays
gacgaaaatgaggcgcccaaatcgacgcatgccagctcctccaaatttggcttcccaaacacccttcttgcacctcgctgtccaccctgtccagcaacctgcacgctcatcagctagcgccagcaagggagctagcgatagggacagcgagtggcagcggcactcacaagtcacgagagtgaagagaagagaagagtgacacacacgcacacgcactctccccttctctctcctcacaaaatcccaaatcccagtcttatcatcctgtcttgctgcctcccttgtgcctcctgcgctcggagctcccacactcccgaggggaaaaagaaagcgagaaagcttcgagctttgcctcccccgtccccccacccccacccccaagggtaaaatgtgatgttgccatccatccgaatccgagaatccgattgcttctagtttgtctccccaactcctcgcctcgcctctcctcctggttatgggcgccggcgagttggatggacgcgccttgtcggacgcggagcagcagtagcggcgggcaaccaggcgggggatctggatccgaggcaccaccaccgggctcctcacggcggcgacgcaggcggcggcggagaaggaggaggaggcggaggagcgcagcaagaagcagatgagcagcagcggcaccacaacaaccggctgctgcagttccaccagcaagtgcagcagaaccaagacccgccgccggtccccctctttcagctccagcacctgcaggccgcggcggccgtgaggcagcggggcggcttgtcggccgagtatgcccttctcgaccccatgggcgacgccggccagtcccactcccaccgccaccaccacggcttccagccgcagctcctgtccttcggaggagtcggccagcaccacatgcaccagttcacggcgcaggcgcccgcggcgtctcactcctcgcggccgcggataggaggggtgggcgcgggcggcgaggccgcggccgccacgtccgcgtcgcactcgcgcgcgaggggcggcgccggggagatcgtggccgtgcagggagggcacattgtgcgctccacggggcgcaaggaccgccacagcaaggtgtgcacggcgcgcgggccgcgggaccggcgcgtgcgcctctctgcgcacaccgccatccagttctacgacgtgcaggaccggctgggctacgaccgccccagcaaggccgtcgactggctcatcaagaacgccaaggacgccatcgacaagctcgagacgctgcccgcgtggcagcccacggccaatgccgccgcgccgccgtcctcctcgacgcaccccgactccgccgagaactccgacgaccaggcgcaggccatcaccgtcgccgcgcacgctccgttcgacttctccggcgccggtggagcaagcggcggcgccgcgggcttcctcccggcgtcgctcgactcggactccatcgcggacacgatcaagtcgttctttcccatggctggcacgggtggcggcggcgaggcgtcgtcgtccacggcggcggcgcagtcgtcggccatgggcttccaaagctacacgcccgacctcctgtcgcgcaccggcagccacagccaggagctccggctgtcgctgcagtctctcccagaccccatgttccaccagcagcaggaccggtcggaagcccacggcggcaatggctcggcgcagcaggcgctcttctccggcgccgccagctactcgtttggcggcggcgccatgtggggcgagcaggcgcagagccagcgcatggtgccgtggaccgtgcccgacccaggcggcgggagcgctggcggctacctgttcaacgtgtcgcagcaggcggcgcacatgcaggcggcgtttggcggccagagccagttcttcttccagaggggaccccttcagtccagtaaccagccctccgagcgaggatggccggagagcgtcgaagccgacaacccgatgcagcacggcgggctcagccccgctgtgtcggccatcgggttctcgcccggcgtcggcttctccgggatccgcatccccaccaggatgcagggcgacgaggagcacaacggcggcggcaatggcgacaagccgccgccgccgtccgtgtcctcggcttctcaccactgacgacggcagagcagtggagcgcagattactccgcgcgcccaccatgccaccaaccaccatcacgagcatttcagcagcataccatgcatgaattcagcaaacacatatcaccgtcagctagctcctcaacatgcaccgccgtagttactttgctgctgcttcctacgacaacggatggctgcagcaaaatggaggagcaaggttgggagcgaagcactctttttgactggctggttggttggccggtcggtcggtcggtcggtttctctaccatctctcgctgctttgtgtacgtcactggtttttgctccaagaactcactcactcactcggagcttctcttgttagaaattaggcctgtgagaacgcagcacattggctagccagcaggttctttcttcactagatctcttgctgcttgtccgtttgctgcgttgttacagtaggtttagttgatgttctagttgctgtagtagttctcaagcttttgcatcttaattttgctgttgttctcgctggcgctctgcacggatcgatgggggttaagctagtgtgcttcctcctggggttcagggagcagctataagcggcagcgcagcgccagccagcggatgatgttgttgttgttgttagcctgataattaagcggatggggacaggagtctttggttctttttaaaataatctctctgatgtgattggcgtttgagacggattgtgcgtgcctgcctgccctgctaagatcttgttcagcattttaaaactgtcatgtgcatgtgcacctagctaggatggtgccattgccaatctccaagctgctagctgctgcctagctataacacgcacagtagtaatactttatcttgtctttgttcttgttgcatgttgaaccattgtttggaattggaagtgagaaatttaaagaccttccccacttaatggcagcgcagagcacaggagtaggggatttagcgcgcgctcttttgtgttacagtacagtagtacggggatggaagaaaaag

SEQ ID NO: 29005 - DNA, 2928 bp, Zea Mays
cccaaatcccagtcttatcatcctgtcttgctgcctcccttgtgcctcctgcgctcggagctcccacactcccgaggggaaaaagaaagcgagaaagcttcgagctttgcctcccccgtccccccacccccacccccaagggtaaaatgtgatgttgccatccatccgaatccgagaatccgattgcttctagtttgtctccccaactcctcgcctcgcctctcctcctggttatgggcgccggcgagttggatggacgcgccttgtcggacgcggagcagcagtagcggcgggcaaccaggcgggggatctggatccgaggcaccaccaccgggctcctcacggcggcgacgcaggcggcggcggagaaggaggaggaggcggaggagcgcagcaagaagcagatgagcagcagcggcaccacaacaaccggctgctgcagttccaccagcaagtgcagcagaaccaagacccgccgccggtccccctctttcagctccagcacctgcaggccgcggcggccgtgaggcagcggggcggcttgtcggccgagtatgcccttctcgaccccatgggcgacgccggccagtcccactcccaccgccaccaccacggcttccagccgcagctcctgtccttcggaggagtcggccagcaccacatgcaccagttcacggcgcaggcgcccgcggcgtctcactcctcgcggccgcggataggaggggtgggcgcgggcggcgaggccgcggccgccacgtccgcgtcgcactcgcgcgcgaggggcggcgccggggagatcgtggccgtgcagggagggcacattgtgcgctccacggggcgcaaggaccgccacagcaaggtgtgcacggcgcgcgggccgcgggaccggcgcgtgcgcctctctgcgcacaccgccatccagttctacgacgtgcaggaccggctgggctacgaccgccccagcaaggccgtcgactggctcatcaagaacgccaaggacgccatcgacaagctcgagacgctgcccgcgtggcagcccacggccaatgccgccgcgccgccgtcctcctcgacgcaccccgactccgccgagaactccgacgaccaggcgcaggccatcaccgtcgccgcgcacgctccgttcgacttctccggcgccggtggagcaagcggcggcgccgcgggcttcctcccggcgtcgctcgactcggactccatcgcggacacgatcaagtcgttctttcccatggctggcacgggtggcggcggcgaggcgtcgtcgtccacggcggcggcgcagtcgtcggccatgggcttccaaagctacacgcccgacctcctgtcgcgcaccggcagccacagccaggagctccggctgtcgctgcagtctctcccagaccccatgttccaccagcagcaggaccggtcggaagcccacggcggcaatggctcggcgcagcaggcgctcttctccggcgccgccagctactcgtttggcggcggcgccatgtggggcgagcaggcgcagagccagcgcatggtgccgtggaccgtgcccgacccaggcggcgggagcgctggcggctacctgttcaacgtgtcgcagcaggcggcgcacatgcaggcggcgtttggcggccagagccagttcttcttccagaggggaccccttcagtccagtaaccagccctccgagcgaggatggccggagagcgtcgaagccgacaacccgatgcagcacggcgggctcagccccgctgtgtcggccatcgggttctcgcccggcgtcggcttctccgggatccgcatccccaccaggatgcagggcgacgaggagcacaacggcggcggcaatggcgacaagccgccgccgccgtccgtgtcctcggcttctcaccactgacgacggcagagcagtggagcgcagattactccgcgcgcccaccatgccaccaaccaccatcacgagcatttcagcagcataccatgcatgaattcagcaaacacatatcaccgtcagctagctcctcaacatgcaccgcccaggtagttactttgctgctgcttcctacgacaacggatggctgcagcaaaatggaggagcaaggttgggagcgaagcactctttttgactggctggttggttggccggtcggtcggtcggtcggtttctctaccatctctcgctgctttgtgtacgtcactggtttttgctccaagaactcactcactcactcggagcttctcttgttagaaattaggcctgtgagaacgcagcacattggctagccagcaggttctttcttcactagatctcttgctgcttgtccgtttgctgcgttgttacagtaggtttagttgatgttctagttgctgtagtagttctcaagcttttgcatcttaattttgctgttgttctcgctggcgctctgcacggatcgatgggggttaagctagtgtgcttcctcctggggttcagggagcagctataagcggcagcgcagcgccagccagcggatgatgttgttgttgttgttagcctgataattaagcggatggggacaggagtctttggttctttttaaaataatctctctgatgtgattggcgtttgagacggattgtgcgtgcctgcctgccctgctaagatcttgttcagcattttaaaactgtcatgtgcatgtgcacctagctaggatggtgccattgccaatctccaagctgctagctgctgcctagctataacacgcacagtagtaatactttatcttgtctttgttcttgttgcatgttgaaccattgtttggaattggaagtgagaaatttaaagaccttccccacttaatggcagcgcagagcacaggagtaggggatttagcgcgcgctcttttgtgttacagtacagtagtacggggatggaagaaaaag

SEQ ID NO: 29006 - DNA, 143 bp, Zea Mays
tggacctgctgcttgcctgcttgcttgttcgatcgcttctcgccgtcagagtcgcttcacagagaggcacggaaaggtacgcgtcgtatcgtatgcatgccagtggtggtggtggtggccaggcctctgcccgacccgtccat

SEQ ID NO: 29007 - DNA, 680 bp, Zea Mays
ctcatcagagctcactcactagagaaagaaagaaaaagggcagagggccagccaggccaccgcgggtagctagcacccgccgccaagcaaagcaaacaccaccaccacccccgccgctcttcctgcaaatgagcatgagcacgcccaactcgtggctcttcgcctcggacaactcgcgctacagcacccgcgcgcggctgctcttcatggggctctccttcgccatcggcatcctcacgttcctcctctacctcgccatctggtacatctgcagcagccggcgccgcctgctcctccgcggccgcggccgcggcagccatccgtccgcgcccgggatcggcgcggcggaagaggagggggaccgcggcatgagcgcggccgcgatcgccgcgctgcccacgttcgcgcacgccggcggggcggcgctcgactgccccgtgtgcctcgcgcaggtggaggccggcgagaagctgcggcggctgcccaagtgcgcgcactcgttccacgccgactgcgtcgacgcctggctccgagcgcactccacctgccccatgtgccgcgccgccgtcctcgtcggccccgccgcggccgccgccgccgccgccgccaccaagcagcccgaccccgccgccgccgccgcggaggcgctgccgccacccgtgtagtagtgtgcggccggc

SEQ ID NO: 29008 - DNA, 2281 bp, Zea Mays
gttacggcgacggagggaggcaagattccacgattctcgccgtagatcacccaccaggccggccaccgccaccgatcggcagcccccgcactacatccagattccagatcacacacacaccgccactcgcgctcgcgctccgacaagtacgtctataaatacctccgcaccctgctcgtgcgctcccctgagccacaggtacacctccatttggtggcctgcaatgcaaaacccctgcctcgtggtgctcatccctcctccgcctccctctatctcgctgctcgatcttgccacctgcaggggaatcggacgaaatcggtgcctgaacttgcgtcttgtcagtctgaccacgcgcatgggctgttcttgatctcaacccggcgcgcgttgtcactcgccacttctcttcagttgagtgtccatggagctgggagctccacacgcaccgtcgtcctgcatttgttcctcgcatcctttcctcgttctgtgacggcccggtcggatcatccaagaccgaccgacccacacacacacacacaacaaagaaccctcgcgcctcccccggtcggccgaccggtggttagatgcaacgggagatggtgcatgggcacggcgacggcaaccaccaccaacaccagcagctgccgaggtacagcgccgccgcggccgccaccggcgtggcgcgggcgtcgaagaagagcaagcccaagaagatcccgcagcgcggcctcggcgtggcgcagctcgagaagctccggatcgaggagcagaagatggagggatccatgccggtgtcggggcccacgcacctcggcgtcggcgtcggcgggttcggccacctactcccgatgcaccctccgccacacgcgccgctcccgcttctgccgaggcccggcgcggacggcggcgtgcactgcggctacccttcggtgctctgggacccagcgtcggcgtcggcggtggcggaccccatgaagcacccgttctacaagaggagcctgtgcccgctccctccgcttccaacggtgagcgtgggcctgtcgctgacggcggcgtcgtcgagccacccaacggagcccccttcaaaccaaatgtacagcagcggcggcggcggcgcggagactgcggcggcggaggacgacgaggacagggaggcggccggcgtggacagaccctggcccttggtgttcgagggcttgaacacgaccgccttccggacgacggcggcggggaaggcccctctcgcagtcgccgccaggacaacgagagaggccgccgccgccgccgctggcttgccagacgcctgtgccgccgccgacctgagcagatacgagttcagcagagccaccacgaactattacagcccggcctccgcctgcagcttgaacgcgagttttccagactggtcatcgccggagttggggcactgcaagagcagcaaggagaaggagcctgcccctgcctacctcaccttgagcgcgcagcctgcgccacgcgggaagcagcctcctcctgcgctcccctcgatcaaactcccggagttgggtcactggggcgtcatgcagcctcctcagcacgggagcgcttcggcgtcgtcgtccgcgtcggcgtcgcggccgttctacagcttcatgccggctggtccggttcgcatcgacagaccccggatcgggatcaaggccgacgacgcctctgacggcgtcgacctggaactgaagctgtgaaggcgctcatcgctggacccctctgttcctagctggtaaatttgacgccgaacctgaagcgggaactgggaacagagctcgtcgtcgtcgagaagaaaagtttctggcgccgtgttctcggtttgtaacctgaaacacgatgtatcggtatttgcgttcttttttttttctcctcaacattttcccgctcccaataaacatctggtgcgcatggagatggagtgtgtgcagcgtcgagcaggtcttcagtgaggaaaggagagcacgtgcacgatcggggttgcaagcttgcagctggcctctgtggggggtcttttctgtacagatctagcaaggcagcgtcgtggcacacccagatacgcaccagacagtcaggtagatgtctgccaagatatgcaaatatggttgtagatgttctggttttcctttggatcatttgtgtttgtggatgtagtgctacgtgcaatggaatcaccacatttcccattctatttgacactttaattacatcgaaactctatcactcatggatgtttgaatgcactagagtcaatgat

SEQ ID NO: 29009 - DNA, 2261 bp, Zea Mays
gttacggcgacggagggaggcaagattccacgattctcgccgtagatcacccaccaggccggccaccgccaccgatcggcagcccccgcactacatccagattccagatcacacacacaccgccactcgcgctcgcgctccgacaagtacgtctataaatacctccgcaccctgctcgtgcgctcccctgagccacaggtacacctccatttggtggcctgcaatgcaaaacccctgcctcgtggtgctcatccctcctccgcctccctctatctcgctgctcgatcttgccacctgcaggggaatcggacgaaatcggtgcctgaacttgcgtcttgtcagtctgaccacgcgcatgggctgttcttgatctcaacccggcgcgcgttgtcactcgccacttctcttcagttgagtgtccatggagctgggagctccacacgcaccgtcgtcctgcatttgttcctcgcatcctttcctcgttctgtgacggcccggtcggatcatccaagaccgaccgacccacacacacacacacaacaaagaaccctcgcgcctcccccggtcggccgaccggtggttagatgcaacgggagatggtgcatgggcacggcgacggcaaccaccaccaacaccagcagctgccgaggtacagcgccgccgcggccgccaccggcgtggcgcgggcgtcgaagaagagcaagcccaagaagatcccgcagcgcggcctcggcgtggcgcagctcgagaagctccggatcgaggagcagaagatggagggatccatgccggtgtcggggcccacgcacctcggcgtcggcgtcggcgggttcggccacctactcccgatgcaccctccgccacacgcgccgctcccgcttctgccgaggcccggcgcggacggcggcgtgcactgcggctacccttcggtgctctgggacccagcgtcggcgtcggcggtggcggaccccatgaagcacccgttctacaagaggagcctgtgcccgctccctccgcttccaacggtgagcgtgggcctgtcgctgacggcggcgtcgtcgagccacccaacggagcccccttcaaaccaaatgtacagcagcggcggcggcggcgcggagactgcggcggcggaggacgacgaggacagggtacacgctgtcgttgaggaggcggccggcgtggacagaccctggcccttggtgttcgagggcttgaacacgaccgccttccggacgacggcggcggggaaggcccctctcgcagtcgccgccaggacaacgagagaggccgccgccgccgccgctggcttgccagacgcctgtgccgccgccgacctgagcagatacgagttcagcagagccaccacgaactattacagactggtcatcgccggagttggggcactgcaagagcagcaaggagaaggagcctgcccctgcctacctcaccttgagcgcgcagcctgcgccacgcgggaagcagcctcctcctgcgctcccctcgatcaaactcccggagttgggtcactggggcgtcatgcagcctcctcagcacgggagcgcttcggcgtcgtcgtccgcgtcggcgtcgcggccgttctacagcttcatgccggctggtccggttcgcatcgacagaccccggatcgggatcaaggccgacgacgcctctgacggcgtcgacctggaactgaagctgtgaaggcgctcatcgctggacccctctgttcctagctggtaaatttgacgccgaacctgaagcgggaactgggaacagagctcgtcgtcgtcgagaagaaaagtttctggcgccgtgttctcggtttgtaacctgaaacacgatgtatcggtatttgcgttcttttttttttctcctcaacattttcccgctcccaataaacatctggtgcgcatggagatggagtgtgtgcagcgtcgagcaggtcttcagtgaggaaaggagagcacgtgcacgatcggggttgcaagcttgcagctggcctctgtggggggtcttttctgtacagatctagcaaggcagcgtcgtggcacacccagatacgcaccagacagtcaggtagatgtctgccaagatatgcaaatatggttgtagatgttctggttttcctttggatcatttgtgtttgtggatgtagtgctacgtgcaatggaatcaccacatttcccattctatttgacactttaattacatcgaaactctatcactcatggatgtttgaatgcactagagtcaatgat

SEQ ID NO: 29010 - DNA, 2261 bp, Zea Mays
caagattccacgattctcgccgtagatcacccaccaggccggccaccgccaccgatcggcagcccccgcactacatccagattccagatcacacacacaccgccactcgcgctcgcgctccgacaagtacgtctataaatacctccgcaccctgctcgtgcgctcccctgagccacaggtacacctccatttggtggcctgcaatgcaaaacccctgcctcgtggtgctcatccctcctccgcctccctctatctcgctgctcgatcttgccacctgcaggggaatcggacgaaatcggtgcctgaacttgcgtcttgtcagtctgaccacgcgcatgggctgttcttgatctcaacccggcgcgcgttgtcactcgccacttctcttcagttgagtgtccatggagctgggagctccacacgcaccgtcgtcctgcatttgttcctcgcatcctttcctcgttctgtgacggcccggtcggatcatccaagaccgaccgacccacacacacacacacaacaaagaaccctcgcgcctcccccggtcggccgaccggtggttagatgcaacgggagatggtgcatgggcacggcgacggcaaccaccaccaacaccagcagctgccgaggtacagcgccgccgcggccgccaccggcgtggcgcgggcgtcgaagaagagcaagcccaagaagatcccgcagcgcggcctcggcgtggcgcagctcgagaagctccggatcgaggagcagaagatggagggatccatgccggtgtcggggcccacgcacctcggcgtcggcgtcggcgggttcggccacctactcccgatgcaccctccgccacacgcgccgctcccgcttctgccgaggcccggcgcggacggcggcgtgcactgcggctacccttcggtgctctgggacccagcgtcggcgtcggcggtggcggaccccatgaagcacccgttctacaagaggagcctgtgcccgctccctccgcttccaacggtgagcgtgggcctgtcgctgacggcggcgtcgtcgagccacccaacggagcccccttcaaaccaaatgtacagcagcggcggcggcggcgcggagactgcggcggcggaggacgacgaggacagggtacacgctgtcgttgaggaggcggccggcgtggacagaccctggcccttggtgttcgagggcttgaacacgaccgccttccggacgacggcggcggggaaggcccctctcgcagtcgccgccaggacaacgagagaggccgccgccgccgccgctggcttgccagacgcctgtgccgccgccgacctgagcagatacgagttcagcagagccaccacgaactattacagcttgaacgcgagttttccagactggtcatcgccggagttggggcactgcaagagcagcaaggagaaggagcctgcccctgcctacctcaccttgagcgcgcagcctgcgccacgcgggaagcagcctcctcctgcgctcccctcgatcaaactcccggagttgggtcactggggcgtcatgcagcctcctcagcacgggagcgcttcggcgtcgtcgtccgcgtcggcgtcgcggccgttctacagcttcatgccggctggtccggttcgcatcgacagaccccggatcgggatcaaggccgacgacgcctctgacggcgtcgacctggaactgaagctgtgaaggcgctcatcgctggacccctctgttcctagctggtaaatttgacgccgaacctgaagcgggaactgggaacagagctcgtcgtcgtcgagaagaaaagtttctggcgccgtgttctcggtttgtaacctgaaacacgatgtatcggtatttgcgttcttttttttttctcctcaacattttcccgctcccaataaacatctggtgcgcatggagatggagtgtgtgcagcgtcgagcaggtcttcagtgaggaaaggagagcacgtgcacgatcggggttgcaagcttgcagctggcctctgtggggggtcttttctgtacagatctagcaaggcagcgtcgtggcacacccagatacgcaccagacagtcaggtagatgtctgccaagatatgcaaatatggttgtagatgttctggttttcctttggatcatttgtgtttgtggatgtagtgctacgtgcaatggaatcaccacatttcccattctatttgacactttaattacatcgaaactctatcactcatggatgtttgaatgcactagagtcaatgat

SEQ ID NO: 29011 - DNA, 2163 bp, Zea Mays
gtcagtgatgctatttttttttttttttggtcagtattttgcagctaaaaggataattcacatttgttgctatcaaggtttttgaaagttttatatgattcagagaaatatatattcttcggctagtgggtctgctcattgatggaaggcaaccagattttggtccagtcagagcagagccttataccaggtgtgcaaactcttgtcatcggtcaagagtttgcagatgttgacacttgtcggagggctgtcaaggacatggccattgctttgcactatgagctccgtgtggtgaaatctgatcgtagccgtttcatcgcaaagtgctcaaaagaaggttgcccttggcgtgtgcacatcgctaagtgccctggtgttccaactttcactgtcaggactttgcatggggaccacaaatgtgagggtgttctgaacctgcatcatcagcaggctactgttggttgggttgctaggtctgtcgaggcaaggctcagggataaccctcagattaagccaaaggagatactgcaggatattcgggagcagcatggtgtcgctgtttcttatatgcaggcatggcgtggaaaggagagaagcatggctgcagttaatggtactcttgaggatggataccgccttcttcctgcatactgtgagcagattgttaagacgaatcctggtagcgtcgcaacatatggaggtattggaccagggaatgccttccagcggctgtttgtctcgtttcatgcatccatttatggtttcttgaatgggtgcaggccccttctagaaattgacaaggctgacttgaagggaaagtatcttgggacattgctttgtgcttcagctattgatgctgatcacatgatgttccctctagcatttggtgttgttgattctgagagtgatgataactggaattggtttatatcggaattgaggaagatgcttggagttaacacagataagatgccggtcttgactatactttctgagagaaagcggcaagtggttaaagcagttggatctaatttccccactgcttttcatggtttttgcctgagatacgtgagcgagagtttccttgacgagttcaagaatactaaactgcttaaccttttctggagtgctgtttatgctctcacagcatcagaatttgatgcaaaggtaaatgaaatgatgcgagttcaagatgtcatgccatggttacagcgtttcccaccaaacctgtgggcagtctcttgctttcagggtatcagatacggccattttagtcttgggataaccgagatattgtacaacttgtcgcttgactgtcacgaacttcccatcgtgcaggccatcgagcacataaggcaccaactgacttgctggtttgctgagcgtcagaacttggcacagtcatacaactcagttcttgttccgtcagctgagaaacttgtttcagaagccatccatgactcgcagtgctaccaggtccttcgagcaaacaaggtggagtttgagatcgtgtcgtcggagcggacaaacatcgtggacactgaagctaggtcctgctcatgccgccgatggcaaatctacggcattccatgcgcacatgctaccgccgcgctgctttcgtgtggcgaagacccgcgcttctatgctcatgactgcttcagtgtaatgaagtaccgagaaacatattcgcagccaatacatccaattccagacaggagccactggagcaattcttctcccgggttacaaggtgtggccagcaaggccgatgtgatgatgctcagcccacccaatatccggaggcctcctggtcgacccaagatgaagattctaaagatcgagagcatgaagcggccgaaacggatcgttcagtgtggacgatgtcatcttgtagggcattctcaaaagaagtgctctctgcgaagctgtgactcgtatccacattgatgtaccctgaacttcgttttattgataatttaggaatttcattcttgcttgttcgtatcaggtgcaggtagttctcttatggaagtgctactgtagttgctctgcctctgaaaccatgtcgacgttgagtctatgatggcactggaagtgtctatacgcaagccgccgtttcaggagcaaaaatgagatcctagaaagtcaaagagcaacagccag

SEQ ID NO: 29012 - DNA, 2761 bp, Zea Mays
aaagcacacaacttttagaagaacgatcacacacacttacgtacactctagtgactatcaatccgaagactagaccgtcacccatgatcctgagcaaaaaagaccttaaccacttgcatcaaacgttacgtagcctccaccataaaaagacgagaatctgacttttacagtacagtccacgtgcgaagctaatggaagatagtatggataacctaattgtttctgacacctgacaaaagcaacatgttcaagctcaccgccaccaaggagaaacgctagctgcttttcctcgagaagtacgaagaagccaagatgtggtgggtttgcttgacgaatctgacattctgactgaagtttggacatagcattggggtgggtgcctgactgcctggtcagggttcgcaccgagatccttggacggaagaactgaggcgatttcgacacaatcttcttgggctcaaacaggtgaacggagaattcaggtcccacttcatccgacgatcacgcatccactccatttgccactgacctctctgttactgcgtccaggggtaagatcttgagagagcaacgcaagaacagagctcactagtagctgtatagcaatcttcgttttcttgttaaaaagggagaaaaacaagagagcacagcagatatttttgtattccattcctgaacctggtctcactttccattccattccattccattggatgccaaaccaaatcacaacccgtggttgaaaccaggacaagctcgcaagaatttggcatcagcagtccctagtagccgtttggaccttccgtagtctgaaaccaccaaagtttggccacggaatctgtagacatgaaaactaagtctccagatttttattaggtgtatacccaaacctgtcaaaatctggaaactacgaagcttctgttctgaagatggctattgccagggaacggcggtgtcttgtttgcgctcacttgacgcatatctgcccaaaagggtttcatgtttctctctgattcaactattgtcaccaggagcagaaagcagaagcagtacatgtcttctaccaataggcagttacaaatcgttttcaagagtcccatcagaaattcagaatccaacttgcagaagagtaacacagtgtggtgtgaaagaaggatgcatgtctatgtaataacaaggcaagtaccccgtgagttatctccactcttcatgaatcaacgtatatatttccaggtgctcagactctcgaacaagggtcacgagttagcaaagctgagagtgatgcagggatcaaaagcaaccaaatggatacatgtgatgaagctaaaaggtactagaacagatgttggcggcccagtatacaggcttctagttctagcgaaggtgcaaactcacaggcagcatgtgacaaaagttcagcatctggaaggcaacgaatgcattgtaagaaaggccaagctgaaccccgcaatcggaatatttatatttcttcacaacggattaagtaaactcctttttatttatatatctgtccatacaacttcattggcgaagccttttggagggttcctgctgtatgcctgcattggtacatcagcaaagaaaaacaaggacgatattttcaatatacctctccaataacagtcatgtgttgcaagaaaggcacatgaatgcaggtataatctaggcaacatgtgtaatataatgtgtgcaattgaacgggaatactaaatattgatcaggaggtgcttgcatgcactagagctaattgttagttgactaaaaaattgctagtgaaattagctagctaacaaatatctagttagactgtttgaatgtcttcaactaattttaacagctaactattagctttagtgcattcaaatatggccttaatcttcagcaactttgctgcattttccaatgatgccgaactgtttgctttggatggcagagtaatgatgccaagctggctaaaaagttactagtagaatactagaattagctagctagcaaatagttagctaactattagttgatttgctaaaagtagctaatagctgaactattagctagggtgtttgaattcctgcggctaatcttagcaactaactataagctctagtgcattcaaacataccttcgtcgaccacatccttgacggccttgcagttgtgtgataagtacgaagctgcggtgtatatcatttagtttggtgtaatatttaacaagtttagatatttacaaatacatgtttaaactacaggaatctaagtgacagcgtgcgacaagttcatgagcctcttatgcatttcactcaatttaataacaataagttagccatgctaagctttcatatcaatatctcaactgcatatatttcatctaattcacactatcagaaggcagctgaagttttgcacattcactcattgcataaatttcatgtcccataggtcataaaatggtatggcttcatttagacagaaaatcatgacaaactatatatcttaggagcgaccttttcttgctactaagaatatagttttctatatcttaagaagaaatttcaaaaacttttagtgattgattatttccatctgacactgaaaattttgcattgagtctaaaaaggcgatacaacacaatgagctagcagataccattcgtagctaacctaccaaaaaacacgagcagaaaactaagaccattcgtttgcagagaaacaaagagaccaaaaaaatgtcactttccattgaag

SEQ ID NO: 29013 - DNA, 5255 bp, Zea Mays
atggaagatattagcaatatatttcacaatgacctgctcccatctctaggagcaaaagcaaacgagtcaatcaagttgaggaaattcatcatttctccttatgattcgtgttacagaacctgggagacgttcttgcttgtgcttgttgtttactcagcatggatctgtccatttgagctagcatttctgagacatctctcatgggtgctttttctggttgagaacattgtcaacagcttctttgctatagatatcatcctaacctttttcctggcataccttgataaaaaatcatatcttctagtggataatccgaaaaggattgcagcaagcatgtatgcagatatatctcctcttggttcatttttgacgtttgctcaacaattccatatcaagcgtttggtctactatttaaaaagcatgcaaatggcctcgcttacagaattcttaacatgctacggttatggcgccttcgtcgcctcagtgatctatttgccaggtaagtgtttttttcaaaacttaaaaataagatagccagaaactaatagggtaaagcatctcctgtagactagaaaaggatattaggttggactactactggataaggtgcatcaaactaatatctgtaagtttgtgtgtttccttcaaacataaaacaagtcaaatatgtagtacctcaatagaataaacttactatattttcgagtaaattctgcaggttactctttttacagtacattgttcaggatgtttcaattacctgatagctgatagataccccaatccagcaagaacctggataggagcagcaagaccagactacagatcagagagcctatgggttcgatatgttacatcgatttattggtctattacaacacttacaacaactggttatggagacttgcatgcagagaatccaagagagatgttattcagtatatgctacatgctgtttaatctgggactgacagcatacctcataggaaacatgacaaatctggttgtccagggaagttgccgtaccagaaatttcgtaagttctcttccaaatacccgcagctaatgtttgtatagctctgctaatgtcgatgttactgctttgcacagttaaacaggacagaactagaaaatagggaagggggtattttaaggggaaattgaggcatgtgccctcaagtactatatgtcaggaactcaggatatacctttgttcagagaattatgtgatctttcctttcttgcatgatgcagagggacacaatccatgcagcttcccagtttgcctcaagaaatcagttacctgaatacataagggatgaaatgctatctcatatttgcctaaggtataagacagagagtctgaaacagaaggaaactttggacagtctccccaagggaatccgatcaggcatagcataccacttattcttccctgtcattgaaaaagtgtacctttttcgtggtgtttcttatacttgcatgctccaactggtcactgcaatggaagcagagtactttccaccgagagaacttgtgatactacaaaatgaagcaccgacagatgtttacatattagtttccggagcagtggaagaacgattcgtgattgatggggttgaaaacgtccagggagtaatgtacgctggcgaaatatttggtgaaattggggctctgtgcagtgttccccagccatttacaatctgtacaaccaaaatttcacaactcctgagggtgagcacaactgtgctaaaaaatattatagaggaaaacaaagacgacgaacaaattgtacttaacaatattttccaggtgtttatagttttatataaaatgatattctgttatataatgtacttgttgtatgtagaaaggggaactaattttagtattaattatttggcagaaaacagcccaagatcaaagattctctactgaggttagcgggaaatttcttggaaaactcaatcaagaattcagaaagcccaacaactattcagccttcaatcaagtcggtcaagaaaatgaatcagaagcaaaaggaagagtaacatcatgttgcagaaatgagcgctgtaaagaactcaacgaatcagagagatgcaatcatgtaactattcacaaaactgcaaaacaggatgacttcaacataatcaatagttttcctgctaaaggtgaaagcaaggaaaaacatattctcacaaatttgatgtttatggagtctgtgtacagaggagaggcagatgttcatcgacaaatattacctgacagtagcctgacaagatctgaagaggatggcagttctgtggttttagaaataaagagagtgacaattcatgtatatccacagcagaacaaaaaatatgtgccctgtgcaaaagttataaaactaccaggatctctggatgaacttttcaacatagcttgtaagtattctttaactcattcacatcattaggtattgtaggcatctatgtgagagtatagcaaccttcacagagaagtcccaaagaagcttcgacttcgatgtagaaaacagggcaagcttccttgagaagtccttctggcttcaatatgtcacgaagagcctaggtttcaaattgcttattgctggagtactttgcatcccattttatacaaaaaatcaaaacaatcttcctgaatgaagtgaaaataaagggtaaaacaaagtattgatcagcaaaaacactgccagcctgcagtccatcaggacatttaatactgcagaaattgtgcttgcctgaaaagaaaacattagaaggttaagttgtccaagattgagttataatcactgaaatattcagcattggttgtacggacattatatgaataaatattgatttatgacctattgaccttccagtttatctattgtttcattagaatatcaaactgtatttgcattggtttaagtgtgatagaggcccataactagtccacataccattagtgagaaaataaaggaaaggcagtcgataccactgtcttatcctacaattcttggtgcaggtcagaagttctctggctattgcccaaccaaagtgttcaatcaagaatttgcagaaattgatgatgttacagttattcgagatggtgaccgtttgtttcttatggaatcttgattacggaagctcaatatcatcaaggcatcaactaagaaaagagtaagaattcctattcctttagaaaaccaatcactagaatggttcctgatcagctcccttgcgccgatttatgagccatgaccacagaggctcgctatgatcagtccttgagttgggctatacttcagcgagaggagttgaaggcggtggtgccagaggggttacgactcttgatgtgggcagccacgacacttttttttccagtcacataggtggcagtctagtctcaggactgaaggctactaatttgtgtttatcttaaacttttcttatgttgttagttgtgtgttctaaacaaaagccggaagttgtatcgaggctttgtatcttcttggtgtactgttcttggtatctataaaatgcttcctttatcgaaaaaaatattagtcctccaacctctaataaaagagtacagtaggcctaccgaacatggttgcctatccaacattccttaaaagtcctagacttcacagaactctagcgatctgactgatgcaagtccatgcagaagtttgatgatctcatagatggcatgtggccaacgtaaaagttcctagggccatcttgtattttttcctctacgaggcaatgcaccataactattacaacagtgtacgaggtatccagtttatccatgttgtatgaacaaaaaggctctttcgcttcctcaaacatagcactgccgaacaaccacaaactttgtcatctaagacgtttgtttaaaaaaatttcatgtactagtgtttcaaaatacaaagtctctaatgattagatgagctgctattacttctgaggaaacattcaatctagatttacttagtcaagatcagatgcaaaacaatcagtgtttcaccttgcaaaaaagcaaggacatcggactgaagcagcagcaggcggagacgataactgctaaaggagaataattggatgattaattgcttagggaatagtacaatatatacgctaaaaaacctagggttacatccctcagcctatccctaagaccctaataggacacatgggccaggttctagacccatagatacaatagagagtctaatgtccttccttgtagtcggaactctagccacaatgtattgagaccggatagaaactctgaaaacactgaggggaggccttcaatgaagatattggcgaattttgaagtcatcgaagcgtggagaagtcgaagatccctgatggctacatgatcatggacagagtggagatcaatccacgatgatattgggacaggatagaaactccaaaggcacttgagttgcttggtgcctgcggatttcagggtcgacctcacatttaacgtattatatttgcggccatttatcattaatgaggatgagcttgagtcgaggatgactcaaatgcaagtagggaaagagaatgatgacacccctctcacgatacaaccctaggggcccttcgcgtcttgaagcaccacttgctccgaacattagagtacctagcgcatcaaccttcgaggcacctctggccctgacccctaggacacctcaagcatctactcttagagcacattctgccccgactcctagggcatctcatgcattgacccctaaggcacctcctaccctgaccactagggcacctcttgccccgaccccagggcacctcggccatctgccctcaccccttccaatgacaccacgatgcataaacaacaaggaccaacgactcatgctcacgctcatcaacttaattatcaattacaatcgttcctaacaaaccatttactcttcttaagaagggatgctactaaagtcttgattcttgaaatgattatcttattattagaaatggtggagagaattcacttggttgtggaacaaaggtttaaaggatggaaacattagtttggagcacctaaacttggcccttttagccttatttcccaaagacctcttaggaggggtggattaggattttagttaccctggccgcctaacatactccctccagtacagtaaaggtagtcgtttaggacatgattgtgcataccaaggagtgattaattatcatagagttttccctgtt

SEQ ID NO: 29014 - DNA, 4670 bp, Zea Mays
atggaagatattagcaatatatttcacaatgacctgctcccatctctaggagcaaaagcaaacgagtcaatcaagttgaggaaattcatcatttctccttatgattcgtgttacagaacctgggagacgttcttgcttgtgcttgttgtttactcagcatggatctgtccatttgagctagcatttctgagacatctctcatgggtgctttttctggttgagaacattgtcaacagcttctttgctatagatatcatcctaacctttttcctggcataccttgataaaaaatcatatcttctagtggataatccgaaaaggattgcagcaagcatgtatgcagatatatctcctcttggttcatttttgacgtttgctcaacaattccatatcaagcgtttggtctactatttaaaaagcatgcaaatggcctcgcttacagaattcttaacatgctacggttatggcgccttcgtcgcctcagtgatctatttgccaggatgtttcaattacctgatagctgatagataccccaatccagcaagaacctggataggagcagcaagaccagactacagatcagagagcctatgggttcgatatgttacatcgatttattggtctattacaacacttacaacaactggttatggagacttgcatgcagagaatccaagagagatgttattcagtatatgctacatgctgtttaatctgggactgacagcatacctcataggaaacatgacaaatctggttgtccagggaagttgccgtaccagaaatttcgtaagttctcttccaaatacccgcagctaatgtttgtatagctctgctaatgtcgatgttactgctttgcacagttaaacaggacagaactagaaaatagggaagggggtattttaaggggaaattgaggcatgtgccctcaagtactatatgtcaggaactcaggatatacctttgttcagagaattatgtgatctttcctttcttgcatgatgcagagggacacaatccatgcagcttcccagtttgcctcaagaaatcagttacctgaatacataagggatgaaatgctatctcatatttgcctaaggtataagacagagagtctgaaacagaaggaaactttggacagtctccccaagggaatccgatcaggcatagcataccacttattcttccctgtcattgaaaaagtgtacctttttcgtggtgtttcttatacttgcatgctccaactggtatgaacaagaaaaatagttctctgctatgacagttgaagaatgtatacaataaataccaaaaacaactcaatgctaatgaagtgatctatcttcgcaggtcactgcaatggaagcagagtactttccaccgagagaacttgtgatactacaaaatgaagcaccgacagatgtttacatattagtttccggagcagtggttagtgcatctataattttagtattcataatttttctacaggttctaacatccaagcatatatgctatcattctgaaatgtatttccgcaggaagaacgattcgtgattgatggggttgaaaacgtgagtcatatgctcatgcatattgataaaaaaatgatatttcagaatctgaaatgcatcactagaaaatgcaggtccagggagtaatgtacgctggcgaaatatttggtgaaattggggctctgtgcagtgttccccagccatttacaatctgtacaaccaaaatttcacaactcctgagggtgagcacaactgtgctaaaaaatattatagaggaaaacaaagacgacgaacaaattgtacttaacaatattttccaggtgtttatagttttatataaaatgatattctgttatataatgtacttgttgtatgtagaaaggggaactaattttagtattaattatttggcagaaaacagcccaagatcaaagattctctactgaggttagcgggaaatttcttggaaaactcaatcaagaattcagaaagcccaacaactattcagccttcaatcaagtcggtcaagaaaatgaatcagaagcaaaaggaagagtaacatcatgttgcagaaatgagcgctgtaaagaactcaacgaatcagagagatgcaatcatgtaactattcacaaaactgcaaaacaggatgacttcaacataatcaatagttttcctgctaaaggtgaaagcaaggaaaaacatattctcacaaatttgatgtttatggagtctgtgtacagaggagaggcagatgttcatcgacaaatattacctgacagtagcctgacaagatctgaagaggatggcagttctgtggttttagaaataaagagagtgacaattcatgtatatccacagcagaacaaaaaatatgtgccctgtgcaaaagttataaaactaccaggatctctggatgaacttttcaacatagcttgtcagaagttctctggctattgcccaaccaaagtgttcaatcaagaatttgcagaaattgatgatgttacagttattcgagatggtgaccgtttgtttcttatggaatcttgattacggaagctcaatatcatcaaggcatcaactaagaaaagagtaagaattcctattcctttagaaaaccaatcactagaatggttcctgatcagctcccttgcgccgatttatgagccatgaccacagaggctcgctatgatcagtccttgagttgggctatacttcagcgagaggagttgaaggcggtggtgccagaggggttacgactcttgatgtgggcagccacgacacttttttttccagtcacataggtggcagtctagtctcaggactgaaggctactaatttgtgtttatcttaaacttttcttatgttgttagttgtgtgttctaaacaaaagccggaagttgtatcgaggctttgtatcttcttggtgtactgttcttggtatctataaaatgcttcctttatcgaaaaaaatattagtcctccaacctctaataaaagagtacagtaggcctaccgaacatggttgcctatccaacattccttaaaagtcctagacttcacagaactctagcgatctgactgatgcaagtccatgcagaagtttgatgatctcatagatggcatgtggccaacgtaaaagttcctagggccatcttgtattttttcctctacgaggcaatgcaccataactattacaacagtgtacgaggtatccagtttatccatgttgtatgaacaaaaaggctctttcgcttcctcaaacatagcactgccgaacaaccacaaactttgtcatctaagacgtttgtttaaaaaaatttcatgtactagtgtttcaaaatacaaagtctctaatgattagatgagctgctattacttctgaggaaacattcaatctagatttacttagtcaagatcagatgcaaaacaatcagtgtttcaccttgcaaaaaagcaaggacatcggactgaagcagcagcaggcggagacgataactgctaaaggagaataattggatgattaattgcttagggaatagtacaatatatacgctaaaaaacctagggttacatccctcagcctatccctaagaccctaataggacacatgggccaggttctagacccatagatacaatagagagtctaatgtccttccttgtagtcggaactctagccacaatgtattgagaccggatagaaactctgaaaacactgaggggaggccttcaatgaagatattggcgaattttgaagtcatcgaagcgtggagaagtcgaagatccctgatggctacatgatcatggacagagtggagatcaatccacgatgatattgggacaggatagaaactccaaaggcacttgagttgcttggtgcctgcggatttcagggtcgacctcacatttaacgtattatatttgcggccatttatcattaatgaggatgagcttgagtcgaggatgactcaaatgcaagtagggaaagagaatgatgacacccctctcacgatacaaccctaggggcccttcgcgtcttgaagcaccacttgctccgaacattagagtacctagcgcatcaaccttcgaggcacctctggccctgacccctaggacacctcaagcatctactcttagagcacattctgccccgactcctagggcatctcatgcattgacccctaaggcacctcctaccctgaccactagggcacctcttgccccgaccccagggcacctcggccatctgccctcaccccttccaatgacaccacgatgcataaacaacaaggaccaacgactcatgctcacgctcatcaacttaattatcaattacaatcgttcctaacaaaccatttactcttcttaagaagggatgctactaaagtcttgattcttgaaatgattatcttattattagaaatggtggagagaattcacttggttgtggaacaaaggtttaaaggatggaaacattagtttggagcacctaaacttggcccttttagccttatttcccaaagacctcttaggaggggtggattaggattttagttaccctggccgcctaacatactccctccagtacagtaaaggtagtcgtttaggacatgattgtgcataccaaggagtgattaattatcatagagttttccctgtt

SEQ ID NO: 29015 - DNA, 2792 bp, Zea Mays
cgccgactgcacggacggggaagcctcctggagagtggactccctttccttctataaatccggctcctcccaatccaggatcttcccagcctcgccgccccaccaccccagcattgccttaccttgccttgccttgccctgccctccattccacctccacctcgccgcccaaatccccccacccaacaatcccccatggggtcgcaggccatcgaggcgcaccgcgcgggcgcggaggtgtaccgcggcgcggcgctgtgcgcggagaagtcgacggagctgctggcagaggcgcacctcccgctgggcctgctgccgctggccgacatggaggaggtcggctacaaccgcgccacgggcttcgtgtggctgcgccagaggaagtcgctcacgcacacgttccgcccgatcgcgcgccaggtctcgtacgccgccgaggtcaccgccttcgtggaggaccggcggatgaggcgcatgaccggggtcaagaccaaggagctcctcatctgggtcaccctctccgacatgttcgtcgacagggacgacccctccaagatcaccttcaagacgcccaccgggctcggcaggacctaccccgtctccgccttcgctaaggaaggcgccggtgacgacggcgcggcggccaagcacaaggatgatgcccccgccccgaccgccgccggtaaggctgctgccagcaagtgaggtgcgcggcgtccggagctttttaccttgccgtagtcgccatacttgcctccccaataatggcgtttgtaccccctctacctgcttcaaattagtgtgttttatgaatggaaacgaccatccaactttccatccgtccttgcaatgtgtcacggcgggatgtttttactacacatcagctttaccagtttcaagattgtttttttccctaatcttgagttaaaacaaaaactaataagtgctcaattttcctaacgacttccacccagtcagttcacgttaagctatcttcaatggctttccggacatgcatagctgtccggtagttaatactaggatgccaggaattcttgacagagacgggccagcaaaaacagaacagaccaagcagactccacttccacggacgagtcattggcaattttgccattatcatttgtgggcttcgccagtatgccatcggacccacaaatcatagacacagacggtcccaccagtcatagacacgggatggcataataacaggcagccaaaattgagagtggcaaaatagcaaatttctctccacggggacgtaccagcactccagcagacatatagctgtacgccatgagctccttgcttcaccagtaaagctcaccaattatttgtatcctgcaagctgaaactgaaagcaactgcaaataatgtgtctcagtgtacttgaaaacgactcgaccacaatccagaagcaagaaaaaaaatctctcagaaaccaccaaaactgggtgctttctacgtgcttctgcagctaacctcacgccggcggactctagcaagagcacgaacgagggccaagcgctcgaaacccagcgacgtggaagcgcctgcgccgcgagcatccttccagagcgcggggccaaggccaagcagaggtatttatcatcgcagccgatccccagccgcacgaacggaggtcgagcaccagacctcatctcactccgctaccccctcatcctgccatccaccagaagcagtgcaagcatatggcgcgccgtgccagcctgctcctcgccgcggcgctgctcgtcgccgtcgctgccgcggcggtgccgccgacgtgcgagcgcatcgagtgcccggcgtacgaggtggtggacagcgccaacgggttcgagatccggcggtacacggacgccatgtggatcaccacggcgcccatcgaggacatctccttcgtcgccgccacgcgcaccggcttcctacagtaagccaccacctctcgcctccacacgcacgcttccgtcccttattgggccgccttcaaatgggccagagccaaagagagaaaataatacgtgctcgcacgtagtccttagctgtggtgggctcacaccggatacgcgcgcgcgattgcaggctgttcgactacatccagggcaagaacgcgtacaaccagacgatcgagatgacggcgccggtgctgacgcgggtgtcgcccagcgacgggcccttctgcgcctccgccttcgccgtgagcttctacgtgccggccaagaaccaggcggacccgccgccggccgagggcctgcgcgtggaccgctgggccggggccaggtacgcggccgtgcgccgcttcgggggcttcgtggcggacgccgacgtcggggagcaggcggcgcggctcgaggccagcctccagggcacccggtgggccgccgccgtcaacgacgcgcgcagggccgacccggcctcgccctacaccgtcgcgcagtacaactcgcccttcgagttcaccggcagggtcaacgagatctggatgctcttcgacgcggacgacgacgccagtatgtgatgcgattccaagcgtgctctcggggcactgaggcgtttagggaaggacgcgcatgcacctgtgcagtgcagctgtgctaccatgaagtatttcgtgctcttgtgcgctagcttcgtttactttcgacttttcgagtaaggaataaggtgcctcttgttgcaataatgataaagctaatcctgcttgtaattacatttcgtggcatggccattccggcaacatgtccagtaaaaaaaaactttttagtttcatc

SEQ ID NO: 29016 - DNA, 365 bp, Zea Mays
atgcagattcaccgggatgcaaatggatctacattattgaagggatttaggaaaccatcaccgaacaacaacctattagagtgtactcaacatgcttacgatatctgcactgtggaccagggctctcttctgaagcaactagcaaataagagtatcagtggtggtgtagctgctgttctagctgaaagggacaaggaagagatggagatggacatagcaaagctagaagttggctccatggaaacatctgtaatatgtaggagtgacggtcctctaattctagcatacttgaggaagcctcgacaaacctgaagtttgaacgtatgacagatgacatcttggttacttttgtggatggacatctt

SEQ ID NO: 29017 - DNA, 3301 bp, Zea Mays
ccgactagcccgagccaccgcgagcttgcccccacgcatatcctagacccacgtgtcggcgtgccagcgcggggggccgcgtatctcgctccgtgagcgcgggtccggccggggtggtgagtcgtggtgccaattattaaagacttcgcttcgactcggggggaaaaacaaaaagtccaggacgccaaggctctctcctctcagtttttattgggtgaagaggggccggagcggcggagggggataggggggccggagccgagcggcggagtttctggaggtagacgacgcaggagctcgaaaccctaatcctgaggctgcccgcggcggcgatcgcctcctcttccttggacttatcttgcttcaactattaaggcggagtcaccatgaacgaccaaactaatgaaaaatgtccactttgcttgaacaagatggatttgacagataaacaactgaagccatgtaaatgtggatatgagatatgtctttggtgttggcatcgtataattgatgaatctggcgggaggtgccctggatgccgttctgtatataacaaggataagatcttggagacaagcgccaggaaccaaattttaaaggaactttgtgctgataagtccaactatcaaaaagaacaagtcaagtctcataagcaaacatctgcaaaagttcagttgggacagtcagaaccaaaagatccaaatagcattcgtgtgattcaacggaagcttgtctatattgttggtatgccaactgagttcgccagcgagaagttgctgagacagaagagtttccttggacaatatggaaagatagaaaacattatcattgataatgttggagctaaccaacaggttcctgactctggacgtgtatatgttacatttgcaaaagaagtagaagctatcagatgcatacaggcagttgatggttattccttggatggtcgacctttgaaagcaacctttggtgtgacaagatattgtcatatatggctcagcaataaggactgctacaagccaaactgttcgtatgtgcattataaagccccagcagaagaaatttgtacaaaagatgatgtttctgtggtgtgtgcaaggctgcagcactccatgggaatgagtaccaagtgtctccaacatcgttcgggacgtactttgccccctccatgtgactgcagttcaagaaatacaactgccagtggaatctccaaagatatttgcatcaatgatgacagattactacccaatggtgctatcaagtatactagtttaccatcagtcaccactccacgggactcaagcctttcttctggcagtcctccatcgccggcaagtattgttcttcatcaaaggaatgaccatgagagattacacaataatcagcaaaatttgtctgacctcaaacctcaaaggtacataccacctggagggcgtaactgttcaagtgaaatgactacatcagtaaagcatatgcagcctattgagggtgcttggttgcacagctcatcaaatgagcatttgggctccaataacgacaaatctcaagcatcttcacagttaggaaacgataattcaaatcccaagcaaattacttcagcagaaaatggaacatctgacaccgtgcagcaaaagccacagtatgctgatgtagtttctcaaggacaagttgcaccagtgcggcgtcttactgtacttaacaggccgtcaattgcttctagcgatactaggcctaaagcaacaggacaagttgtcaatggtacttcaacaagcttcacaaaacttactttggttcaaaaggcacaagggagctgcattacaattcctagaaaccatccagttccccagatcccagaggaacctgcgcatctgttcgcttcagctagtgttaaatctcatgctggagtagagataatgaatgaatgctcagatatcaaagaaaagatagttcttggaggttataagcaactaccagagagcactgtgtcacacagattgactgcatcacagaatatgagcagcggaactcttcccagtaatctttctgcatcttatgccaaaactcaaggatctgctggatcacacaatctttcagatttgaacatgaagcttgtagcaaagaatcgatcacagctggtaaatcaacaaaatgcaccagtttcagtttctaatacaggtatagcaagagcaagtttctgctgcagcactcttaataagaatgcatcgttgtctgatggtgatagctcgcacaataggcgctgggacacaattcggtctggtcatattgtttcctctcattcttcagatagcactatgctatcaagaccagccagtgcagtatcatccactgatgtggcatctctgcatagaaaggaaaggagacaagcttgtcctcctggatttgagaagcctcatctgtactccggttcaggcaaagcttgctctggacattgctctgcacctgatgccctggtacaagattgtggtattccagatcaacaagactttactagcttgactacagattgcctgaaagatgatggagatgtcacacaaaatctaagcatgaacatctcttcaccacccagtttgaccgataccaaccggaactggagtcagagtcacagacagtttccaggcaccctctttggttggtcaaatgaccctcagtattcattttaccctggtggctcgtcacatccacgtcaagaggctgaaaattgggatggaacttccactagttacatggctactgctactgggggatacaaagtattttcccagggaacaacttcagacatgaggggtggtatggcaggcacattgctccaacagccaataatgtcaactcatgatagatggactgatggaagcagcgattctggaaggaactgccctcaggttgacatttcgtaccgcatgtacagcctattctagcaccagggcgagaggtctgcttcctagaccctaacaacagacatgtacaagtcataccttctaacctagtagatgccaagatgatggatggtggcgaaaatggtgtcagggagtgcttcgtgtttgttgctaaagcttgtaaagatcaaacatggaggagcttcatgtacaaagactgcaggggtgggtatttggtttaacatttggtaaacagtcattctttcacgcatttgctttgcctttgcttgggtgaaatgtgaatttgcgctctcggaccgggtaccaggtgggtgccgggcgcttctcgtttccttgtcctctttttttgtttttgcccccacgctttcagtatagcatgttccata

SEQ ID NO: 29018 - DNA, 3128 bp, Zea Mays
aagtccaggacgccaaggctctctcctctcagtttttattgggtgaagaggggccggagcggcggagggggataggggggccggagccgagcggcggagtttctggaggtagacgacgcaggagctcgaaaccctaatcctgaggctgcccgcggcggcgatcgcctcctcttccttggacttatcttgcttcaactattaaggcggagtcaccatgaacgaccaaactaatgaaaaatgtccactttgcttgaacaagatggatttgacagataaacaactgaagccatgtaaatgtggatatgagatatgtctttggtgttggcatcgtataattgatgaatctggcgggaggtgccctggatgccgttctgtatataacaaggataagatcttggagacaagcgccaggaaccaaattttaaaggaactttgtgctgataagtccaactatcaaaaagaacaagtcaagtctcataagcaaacatctgcaaaagttcagttgggacagtcagaaccaaaagatccaaatagcattcgtgtgattcaacggaagcttgtctatattgttggtatgccaactgagttcgccagcgagaagttgctgagacagaagagtttccttggacaatatggaaagatagaaaacattatcattgataatgttggagctaaccaacaggttcctgactctggacgtgttatgttacatttgcaaaagaagtagaagctatcagatgcatacaggcagttgatggttattccttggatggtcgacctttgaaagcaacctttggtgtgacaagatattgtcatatatggctcagcaataaggactgctacaagccaaactgttcgtatgtgcattataaagccccagcagaagaaatttgtacaaaagatgatgtttctgtggtgtgtgcaaggctgcagcactccatgggaatgagtaccaagtgtctccaacatcgttcgggacgtactttgccccctccatgtgactgcagttcaagaaatacaactgccagtggaatctccaaagatatttgcatcaatgatgacagattactacccaatggtgctatcaagtatactagtttaccatcagtcaccactccacgggactcaagcctttcttctggcagtcctccatcgccggcaagtattgttcttcatcaaaggaatgaccatgagagattacacaataatcagcaaaatttgtctgacctcaaacctcaaaggtacataccacctggagggcgtaactgttcaagtgaaatgactacatcagtaaagcatatgcagcctattgagggtgcttggttgcacagctcatcaaatgagcatttgggctccaataacgacaaatctcaagcatcttcacagttaggaaacgataattcaaatcccaagcaaattacttcagcagaaaatggaacatctgacaccgtgcagcaaaagccacagtatgctgatgtagtttctcaaggacaagttgcaccagtgcggcgtcttactgtacttaacaggccgtcaattgcttctagcgatactaggcctaaagcaacaggacaagttgtcaatggtacttcaacaagcttcacaaaacttactttggttcaaaaggcacaagggagctgcattacaattcctagaaaccatccagttccccagatcccagaggaacctgcgcatctgttcgcttcagctagtgttaaatctcatgctggagtagagataatgaatgaatgctcagatatcaaagaaaagatagttcttggaggttataagcaactaccagagagcactgtgtcacacagattgactgcatcacagaatatgagcagcggaactcttcccagtaatctttctgcatcttatgccaaaactcaaggatctgctggatcacacaatctttcagatttgaacatgaagcttgtagcaaagaatcgatcacagctggtaaatcaacaaaatgcaccagtttcagtttctaatacaggtatagcaagagcaagtttctgctgcagcactcttaataagaatgcatcgttgtctgatggtgatagctcgcacaataggcgctgggacacaattcggtctggtcatattgtttcctctcattcttcagatagcactatgctatcaagaccagccagtgcagtatcatccactgatgtggcatctctgcatagaaaggaaaggagacaagcttgtcctcctggatttgagaagcctcatctgtactccggttcaggcaaagcttgctctggacattgctctgcacctgatgccctggtacaagattgtggtattccagatcaacaagactttactagcttgactacagattgcctgaaagatgatggagatgtcacacaaaatctaagcatgaacatctcttcaccacccagtttgaccgataccaaccggaactggagtcagagtcacagacagtttccaggcaccctctttggttggtcaaatgaccctcagtattcattttaccctggtggctcgtcacatccacgtcaagaggctgaaaattgggatggaacttccactagttacatggctactgctactgggggatacaaagtattttcccagggaacaacttcagacatgaggggtggtatggcaggcacattgctccaacagccaataatgtcaactcatgatagatggactgatggaagcagcgattctggaaggaactgccctcaggttgacatttcgtaccgcatgtacagcctattctagcaccagggcgagaggtctgcttcctagaccctaacaacagacatgtacaagtcataccttctaacctagtagatgccaagatgatggatggtggcgaaaatggtgtcagggagtgcttcgtgtttgttgctaaagcttgtaaagatcaaacatggaggagcttcatgtacaaagactgcaggggtgggtatttggtttaacatttggtaaacagtcattctttcacgcatttgctttgcctttgcttgggtgaaatgtgaatttgcgctctcggaccgggtaccaggtgggtgccgggcgcttctcgtttccttgtcctctttttttgtttttgcccccacgctttcagtatagcatgttccata

SEQ ID NO: 29019 - DNA, 3234 bp, Zea Mays
aagtccaggacgccaaggctctctcctctcagtttttattgggtgaagaggggccggagcggcggagggggataggggggccggagccgagcggcggagtttctggaggtagacgacgcaggagctcgaaaccctaatcctgaggctgcccgcggcggcgatcgcctcctcttccttggacttatcttgcttcaactattaaggcggagtcaccatgaacgaccaaactaatgaaaaatgtccactttgcttgaacaagatggatttgacagataaacaactgaagccatgtaaatgtggatatgagatatgtctttggtgttggcatcgtataattgatgaatctggcgggaggtgccctggatgccgttctgtatataacaaggataagatcttggagacaagcgccaggaaccaaattttaaaggaactttgtgctgataagtccaactatcaaaaagaacaagtcaagtctcataagcaaacatctgcaaaagttcagttgggacagtcagaaccaaaagatccaaatagcattcgtgtgattcaacggaagcttgtctatattgttggtatgccaactgagttcgccagcgagaagttgctgagacagaagagtttccttggacaatatggaaagatagaaaacattatcattgataatgttggagctaaccaacaggttcctgactctggacgtgtatatgttacatttgcaaaagaagtagaagctatcagatgcatacaggcagttgatggttattccttggatggtcgacctttgaaagcaacctttggtgtgacaagatattgtcatatatggctcagcaataaggactgctacaagccaaactgttcgtatgtgcattataaagccccagcagaagaaatttgtacaaaagatgatgtttctgtggtgtgtgcaaggtcctccttctgcgcggtggccatggccgccgccgtctctaatcgccttgtcgttgcaatcgcgaggaaggcggatgagacaggagagggttttgaagtggtcaggctgcagcactccatgggaatgagtaccaagtgtctccaacatcgttcgggacgtactttgccccctccatgtgactgcagttcaagaaatacaactgccagtggaatctccaaagatatttgcatcaatgatgacagattactacccaatggtgctatcaagtatactagtttaccatcagtcaccactccacgggactcaagcctttcttctggcagtcctccatcgccggcaagtattgttcttcatcaaaggaatgaccatgagagattacacaataatcagcaaaatttgtctgacctcaaacctcaaaggtacataccacctggagggcgtaactgttcaagtgaaatgactacatcagtaaagcatatgcagcctattgagggtgcttggttgcacagctcatcaaatgagcatttgggctccaataacgacaaatctcaagcatcttcacagttaggaaacgataattcaaatcccaagcaaattacttcagcagaaaatggaacatctgacaccgtgcagcaaaagccacagtatgctgatgtagtttctcaaggacaagttgcaccagtgcggcgtcttactgtacttaacaggccgtcaattgcttctagcgatactaggcctaaagcaacaggacaagttgtcaatggtacttcaacaagcttcacaaaacttactttggttcaaaaggcacaagggagctgcattacaattcctagaaaccatccagttccccagatcccagaggaacctgcgcatctgttcgcttcagctagtgttaaatctcatgctggagtagagataatgaatgaatgctcagatatcaaagaaaagatagttcttggaggttataagcaactaccagagagcactgtgtcacacagattgactgcatcacagaatatgagcagcggaactcttcccagtaatctttctgcatcttatgccaaaactcaaggatctgctggatcacacaatctttcagatttgaacatgaagcttgtagcaaagaatcgatcacagctggtaaatcaacaaaatgcaccagtttcagtttctaatacaggtatagcaagagcaagtttctgctgcagcactcttaataagaatgcatcgttgtctgatggtgatagctcgcacaataggcgctgggacacaattcggtctggtcatattgtttcctctcattcttcagatagcactatgctatcaagaccagccagtgcagtatcatccactgatgtggcatctctgcatagaaaggaaaggagacaagcttgtcctcctggatttgagaagcctcatctgtactccggttcaggcaaagcttgctctggacattgctctgcacctgatgccctggtacaagattgtggtattccagatcaacaagactttactagcttgactacagattgcctgaaagatgatggagatgtcacacaaaatctaagcatgaacatctcttcaccacccagtttgaccgataccaaccggaactggagtcagagtcacagacagtttccaggcaccctctttggttggtcaaatgaccctcagtattcattttaccctggtggctcgtcacatccacgtcaagaggctgaaaattgggatggaacttccactagttacatggctactgctactgggggatacaaagtattttcccagggaacaacttcagacatgaggggtggtatggcaggcacattgctccaacagccaataatgtcaactcatgatagatggactgatggaagcagcgattctggaaggaactgccctcaggttgacatttcgtaccgcatgtacagcctattctagcaccagggcgagaggtctgcttcctagaccctaacaacagacatgtacaagtcataccttctaacctagtagatgccaagatgatggatggtggcgaaaatggtgtcagggagtgcttcgtgtttgttgctaaagcttgtaaagatcaaacatggaggagcttcatgtacaaagactgcaggggtgggtatttggtttaacatttggtaaacagtcattctttcacgcatttgctttgcctttgcttgggtgaaatgtgaatttgcgctctcggaccgggtaccaggtgggtgccgggcgcttctcgtttccttgtcctctttttttgtttttgcccccacgctttcagtatagcatgttccata

SEQ ID NO: 29020 - DNA, 3042 bp, Zea Mays
aagtccaggacgccaaggctctctcctctcagtttttattgggtgaagaggggccggagcggcggagggggataggggggccggagccgagcggcggagtttctggaggtagacgacgcaggagctcgaaaccctaatcctgaggctgcccgcggcggcgatcgcctcctcttccttggacttatcttgcttcaactattaaggcggagtcaccatgaacgaccaaactaatgaaaaatgtccactttgcttgaacaagatggatttgacagataaacaactgaagccatgtaaatgtggatatgagtattctattttggataacatggcccatttaaaggaactttgtgctgataagtccaactatcaaaaagaacaagtcaagtctcataagcaaacatctgcaaaagttcagttgggacagtcagaaccaaaagatccaaatagcattcgtgtgattcaacggaagcttgtctatattgttggtatgccaactgagttcgccagcgagaagttgctgagacagaagagtttccttggacaatatggaaagatagaaaacattatcattgataatgttggagctaaccaacaggttcctgactctggacgtgtatatgttacatttgcaaaagaagtagaagctatcagatgcatacaggcagttgatggttattccttggatggtcgacctttgaaagcaacctttggtgtgacaagatattgtcatatatggctcagcaataaggactgctacaagccaaactgttcgtatgtgcattataaagccccagcagaagaaatttgtacaaaagatgatgtttctgtggtgtgtgcaaggctgcagcactccatgggaatgagtaccaagtgtctccaacatcgttcgggacgtactttgccccctccatgtgactgcagttcaagaaatacaactgccagtggaatctccaaagatatttgcatcaatgatgacagattactacccaatggtgctatcaagtatactagtttaccatcagtcaccactccacgggactcaagcctttcttctggcagtcctccatcgccggcaagtattgttcttcatcaaaggaatgaccatgagagattacacaataatcagcaaaatttgtctgacctcaaacctcaaaggtacataccacctggagggcgtaactgttcaagtgaaatgactacatcagtaaagcatatgcagcctattgagggtgcttggttgcacagctcatcaaatgagcatttgggctccaataacgacaaatctcaagcatcttcacagttaggaaacgataattcaaatcccaagcaaattacttcagcagaaaatggaacatctgacaccgtgcagcaaaagccacagtatgctgatgtagtttctcaaggacaagttgcaccagtgcggcgtcttactgtacttaacaggccgtcaattgcttctagcgatactaggcctaaagcaacaggacaagttgtcaatggtacttcaacaagcttcacaaaacttactttggttcaaaaggcacaagggagctgcattacaattcctagaaaccatccagttccccagatcccagaggaacctgcgcatctgttcgcttcagctagtgttaaatctcatgctggagtagagataatgaatgaatgctcagatatcaaagaaaagatagttcttggaggttataagcaactaccagagagcactgtgtcacacagattgactgcatcacagaatatgagcagcggaactcttcccagtaatctttctgcatcttatgccaaaactcaaggatctgctggatcacacaatctttcagatttgaacatgaagcttgtagcaaagaatcgatcacagctggtaaatcaacaaaatgcaccagtttcagtttctaatacaggtatagcaagagcaagtttctgctgcagcactcttaataagaatgcatcgttgtctgatggtgatagctcgcacaataggcgctgggacacaattcggtctggtcatattgtttcctctcattcttcagatagcactatgctatcaagaccagccagtgcagtatcatccactgatgtggcatctctgcatagaaaggaaaggagacaagcttgtcctcctggatttgagaagcctcatctgtactccggttcaggcaaagcttgctctggacattgctctgcacctgatgccctggtacaagattgtggtattccagatcaacaagactttactagcttgactacagattgcctgaaagatgatggagatgtcacacaaaatctaagcatgaacatctcttcaccacccagtttgaccgataccaaccggaactggagtcagagtcacagacagtttccaggcaccctctttggttggtcaaatgaccctcagtattcattttaccctggtggctcgtcacatccacgtcaagaggctgaaaattgggatggaacttccactagttacatggctactgctactgggggatacaaagtattttcccagggaacaacttcagacatgaggggtggtatggcaggcacattgctccaacagccaataatgtcaactcatgatagatggactgatggaagcagcgattctggaaggaactgccctcaggttgacatttcgtaccgcatgtacagcctattctagcaccagggcgagaggtctgcttcctagaccctaacaacagacatgtacaagtcataccttctaacctagtagatgccaagatgatggatggtggcgaaaatggtgtcagggagtgcttcgtgtttgttgctaaagcttgtaaagatcaaacatggaggagcttcatgtacaaagactgcaggggtgggtatttggtttaacatttggtaaacagtcattctttcacgcatttgctttgcctttgcttgggtgaaatgtgaatttgcgctctcggaccgggtaccaggtgggtgccgggcgcttctcgtttccttgtcctctttttttgtttttgcccccacgctttcagtatagcatgttccata

SEQ ID NO: 29021 - DNA, 2358 bp, Zea Mays
cacttattgcataaatgcccatcatgtttctacaaagtattagactttcatatacctcttttgtctgtcatatcttatatctattaaaaccctttgctggggccaaccgagtatgaagatgagcagtccagctgaacctgtagcactaatgacttggctgcagcactccatgggaatgagtaccaagtgtctccaacatcgttcgggacgtactttgccccctccatgtgactgcagttcaagaaatacaactgccagtggaatctccaaagatatttgcatcaatgatgacagattactacccaatggtgctatcaagtatactagtttaccatcagtcaccactccacgggactcaagcctttcttctggcagtcctccatcgccggcaagtattgttcttcatcaaaggaatgaccatgagagattacacaataatcagcaaaatttgtctgacctcaaacctcaaaggtacataccacctggagggcgtaactgttcaagtgaaatgactacatcagtaaagcatatgcagcctattgagggtgcttggttgcacagctcatcaaatgagcatttgggctccaataacgacaaatctcaagcatcttcacagttaggaaacgataattcaaatcccaagcaaattacttcagcagaaaatggaacatctgacaccgtgcagcaaaagccacagtatgctgatgtagtttctcaaggacaagttgcaccagtgcggcgtcttactgtacttaacaggccgtcaattgcttctagcgatactaggcctaaagcaacaggacaagttgtcaatggtacttcaacaagcttcacaaaacttactttggttcaaaaggcacaagggagctgcattacaattcctagaaaccatccagttccccagatcccagaggaacctgcgcatctgttcgcttcagctagtgttaaatctcatgctggagtagagataatgaatgaatgctcagatatcaaagaaaagatagttcttggaggttataagcaactaccagagagcactgtgtcacacagattgactgcatcacagaatatgagcagcggaactcttcccagtaatctttctgcatcttatgccaaaactcaaggatctgctggatcacacaatctttcagatttgaacatgaagcttgtagcaaagaatcgatcacagctggtaaatcaacaaaatgcaccagtttcagtttctaatacaggtatagcaagagcaagtttctgctgcagcactcttaataagaatgcatcgttgtctgatggtgatagctcgcacaataggcgctgggacacaattcggtctggtcatattgtttcctctcattcttcagatagcactatgctatcaagaccagccagtgcagtatcatccactgatgtggcatctctgcatagaaaggaaaggagacaagcttgtcctcctggatttgagaagcctcatctgtactccggttcaggcaaagcttgctctggacattgctctgcacctgatgccctggtacaagattgtggtattccagatcaacaagactttactagcttgactacagattgcctgaaagatgatggagatgtcacacaaaatctaagcatgaacatctcttcaccacccagtttgaccgataccaaccggaactggagtcagagtcacagacagtttccaggcaccctctttggttggtcaaatgaccctcagtattcattttaccctggtggctcgtcacatccacgtcaagaggctgaaaattgggatggaacttccactagttacatggctactgctactgggggatacaaagtattttcccagggaacaacttcagacatgaggggtggtatggcaggcacattgctccaacagccaataatgtcaactcatgatagatggactgatggaagcagcgattctggaaggaactgccctcaggttgacatttcgtaccgcatgtacagcctattctagcaccagggcgagaggtctgcttcctagaccctaacaacagacatgtacaagtcataccttctaacctagtagatgccaagatgatggatggtggcgaaaatggtgtcagggagtgcttcgtgtttgttgctaaagcttgtaaagatcaaacatggaggagcttcatgtacaaagactgcaggggtgggtatttggtttaacatttggtaaacagtcattctttcacgcatttgctttgcctttgcttgggtgaaatgtgaatttgcgctctcggaccgggtaccaggtgggtgccgggcgcttctcgtttccttgtcctctttttttgtttttgcccccacgctttcagtatagcatgttccata

SEQ ID NO: 29022 - DNA, 1801 bp, Zea Mays
gttcgatcatgcccacgcggctggctgggctggctctctccggtttccgtttcgcttcctgccccccgatcctctctcgcgtacatttcccagtctccaccccggaaatggccagaacctgaggcactagaacccacccgcccgcggctctctccagcagccccccaatccatcgacgccgttggcgagggcgcacaggcgcgcgtcgcaccacatccgccacccacaacacaccaccgtcctcatctccggtgtgcaggcagagacgcgggatggcctcgcgccagtagtatccgcccggcactttctaccccacccatccggccgcgggtgggtttgaccgagatcggcaggcggccgtcggcgtctcgctcgctcgatccgcctcgtctcagtcctacctaggtatggcggcggcggtggcagagggatcggcttcttcggcggcgaaggaggtggagtaccaggcgggcgtgcagaagctggtggacctgctgtccaacctcaacccggccgccaaggagttcgtcccctccgcggccgcgtctccgcccaagaaggcgctgtcggcggatgcgccggtgttcgattaccactccatcggaggcgggaatggggccaccgacgctgcgttttacgttgggtttgggcaccagccgcgcacgagggggaatggatacatcaaccaaggaaggaggaggacaaatggtagagtgaggcgggcagacagagaggacagcattaggcgaactgtttatgtctctgaacttgaccatactgtgacagaggagagacttgctgatatctttaccacctgtgggcaagttgttgattgcagaatttgtggtgatccccactcagttcttaggtttgcattcattgagttctctgatgaagagggcgccagaactgcgcttaacctgggaggcacaatttttggtttctaccctgttagagttttgccgtcaaagacagctatcttacctgttaatccaaagtttcttcccaggacggatgacgagaaggaaatggtcatgcgaactgtctattgtacaaacatagataagatggttactcagttagatgtaaagaaattctttgaagaactttgcggtgaggtctctcggttgaggcttctaggggataatgtacattccacaaggattgcttttgttgaatttgtccatgctgagggtgccatcatggctctgaattgcagcgggatgattttgggaacactgcctgtcaggcatgacctcccctctagccacattctccatttctctttatttggtgagcccttccaagactccggtgaagccccgtgtaaatcgagtgggatctaactgactctgcgcaagctgaactggattgttcacgggaaggcgtcgccataagctgaaggcttccgcggtccggtgcatcatgatgcgtctgctcacattcttacaaacgttttctttgtacccttttgcaaacctgttgttggaagggaactggttagatcaggcccttctatagccagctttcggtttctcctgtttcactggacgtgatggaaccactgaggatgactatcttggcaatcagccatcaaagtaacttctgttaatgtccttgttgttaagctaattggtgtgtaaacgtcttacatgtgaatcatcacagttagggtccgtttggtttctttagtccagatactaaagtttagtccataccttatttagttattataggtactaaaagtattcagaatatattaaatgactcgtaagaagtcaaaaatatctattaacattct

SEQ ID NO: 29023 - DNA, 1053 bp, Zea Mays
tttccgtttcgcttcctgccccccgatcctctctcgcgtacatttcccagtctccaccccggaaatggccagaacctgaggcactagaacccacccgcccgcggctctctccagcagccccccaatccatcgacgccgttggcgagggcgcacaggcgcgcgtcgcaccacatccgccacccacaacacaccaccgtcctcatctccggtgtgcaggcagagacgcgggatggcctcgcgccagtagtatccgcccggcactttctaccccacccatccggccgcgggtgggtttgaccgagatcggcaggcggccgtcggcgtctcgctcgctcgatccgcctcgtctcagtcctacctaggtatggcggcggcggtggcagagggatcggcttcttcggcggcgaaggaggtggagtaccaggcgggcgtgcagaagctggtggacctgctgtccaacctcaacccggccgccaaggagttcgtcccctccgcggccgcgtctccgcccaagaaggcgctgtcggcggatgcgccggtgttcgattaccactccatcggaggcgggaatggggccaccgacgctgcgttttacgttgggtttgggcaccagccgcgcacgagggggaatggatacatcaaccaaggaaggaggaggacaaatggtagagtgaggcgggcagacagagaggacagcattaggcgaactgtttatgtctctgaacttgaccatactgtgacagaggagagacttgctgatatctttaccacctgtgggcaagttgttgattgcagaatttgtggtgatccccactcagttcttaggtttgcattcattgagttctctgatgaagagggcgccagaactgcgcttaacctgggaggcacaatttttggtttctaccctgttagagttttgccgtcaaagacagctatcttacctgttaatccaaagtttcttcccaggacggatgacgagaaggaaatggtcatgcgaactgtctattgtacaaacatagataagatgatcttgggtgcaagtttctgaagcta

SEQ ID NO: 29024 - DNA, 2226 bp, Zea Mays
tttccgtttcgcttcctgccccccgatcctctctcgcgtacatttcccagtctccaccccggaaatggccagaacctgaggcactagaacccacccgcccgcggctctctccagcagccccccaatccatcgacgccgttggcgagggcgcacaggcgcgcgtcgcaccacatccgccacccacaacacaccaccgtcctcatctccggtgtgcaggcagagacgcgggatggcctcgcgccagtagtatccgcccggcactttctaccccacccatccggccgcgggtgggtttgaccgagatcggcaggcggccgtcggcgtctcgctcgctcgatccgcctcgtctcagtcctacctaggtatggcggcggcggtggcagagggatcggcttcttcggcggcgaaggaggtggagtaccaggcgggcgtgcagaagctggtggacctgctgtccaacctcaacccggccgccaaggagttcgtcccctccgcggccgcgtctccgcccaagaaggcgctgtcggcggatgcgccggtgttcgattaccactccatcggaggcgggaatggggccaccgacgctgcgttttacgttgggtttgggcaccagccgcgcacgagggggaatggatacatcaaccaaggaaggaggaggacaaatggtagagtgaggcgggcagacagagaggacagcattaggcgaactgtttatgtctctgaacttgaccatactgtgacagaggagagacttgctgatatctttaccacctgtgggcaagttgttgattgcagaatttgtggtgatccccactcagttcttaggtttgcattcattgagttctctgatgaagagggcgccagaactgcgcttaacctgggaggcacaatttttggtttctaccctgttagagttttgccgtcaaagacagctatcttacctgttaatccaaagtttcttcccaggacggatgacgagaaggaaatggtcatgcgaactgtctattgtacaaacatagataagatggttactcagttagatgtaaagaaattctttgaagaactttgcggtgaggtctctcggttgaggcttctaggggataatgtacattccacaaggattgcttttgttgaatttgtccatgtaagaacaaaacttttttttccgcactggttagttctgtttatattgttaaataatgttctaatgcctacctgcatttagtttactagcaagtgatgtttgctggttagatcctctagaacaatggactagtttaattcgtctgttttgcatagcatttgctacgccactcatgtcactagtaagctcttgctatgatgctaccctaaaatgggtatgctgcatagcctggaggagctatgttctatcaacttgtgcatgtttggtaatttcttaacagcatatgcatcaaagattcttgtgacactcgctgcaatgattagggacaataagttgataagtttgctcaaacaattgagatttttcctcccagtgctttttttttcctaatcgtatattgacctgcaagatgattgtgctcgtacaggcatgccttctatttgttccttccatactgagtatccgcttaagatggagatattgattctaacttttgaactctgaatcacaggctgagggtgccatcatggctctgaattgcagcgggatgattttgggaacactgcctgtcagggtgagcccttccaagactccggtgaagccccgtgtaaatcgagtgggatctaactgactctgcgcaagctgaactggattgttcacgggaaggcgtcgccataagctgaaggcttccgcggtccggtgcatcatgatgcgtctgctcacattcttacaaacgttttctttgtacccttttgcaaacctgttgttggaagggaactggttagatcaggcccttctatagccagctttcggtttctcctgtttcactggacgtgatggaaccactgaggatgactatcttggcaatcagccatcaaagtaacttctgttaatgtccttgttgttaagctaattggtgtgtaaacgtcttacatgtgaatcatcacagttagggtccgtttggtttctttagtccagatactaaagtttagtccataccttatttagttattataggtactaaaagtattcagaatatattaaatgactcgtaagaagtcaaaaatatctattaacattct

SEQ ID NO: 29025 - DNA, 1708 bp, Zea Mays
tttccgtttcgcttcctgccccccgatcctctctcgcgtacatttcccagtctccaccccggaaatggccagaacctgaggcactagaacccacccgcccgcggctctctccagcagccccccaatccatcgacgccgttggcgagggcgcacaggcgcgcgtcgcaccacatccgccacccacaacacaccaccgtcctcatctccggtgtgcaggcagagacgcgggatggcctcgcgccagtagtatccgcccggcactttctaccccacccatccggccgcgggtgggtttgaccgagatcggcaggcggccgtcggcgtctcgctcgctcgatccgcctcgtctcagtcctacctaggtatggcggcggcggtggcagagggatcggcttcttcggcggcgaaggaggtggagtaccaggcgggcgtgcagaagctggtggacctgctgtccaacctcaacccggccgccaaggagttcgtcccctccgcggccgcgtctccgcccaagaaggcgctgtcggcggatgcgccggtgttcgattaccactccatcggaggcgggaatggggccaccgacgctgcgttttacgttgggtttgggcaccagccgcgcacgagggggaatggatacatcaaccaaggaaggaggaggacaaatggtagagtgaggcgggcagacagagaggacagcattaggcgaactgtttatgtctctgaacttgaccatactaggagagacttgctgatatctttaccacctgtgggcaagttgttgattgcagaatttgtggtgatccccactcagttcttaggtttgcattcattgagttctctgatgaagagggcgccagaactgcgcttaacctgggaggcacaatttttggtttctaccctgttagagttttgccgtcaaagacagctatcttacctgttaatccaaagtttcttcccaggacggatgacgagaaggaaatggtcatgcgaactgtctattgtacaaacatagataagatggttactcagttagatgtaaagaaattctttgaagaactttgcggtgaggtctctcggttgaggcttctaggggataatgtacattccacaaggattgcttttgttgaatttgtccatgctgagggtgccatcatggctctgaattgcagcgggatgattttgggaacactgcctgtcagggtgagcccttccaagactccggtgaagccccgtgtaaatcgagtgggatctaactgactctgcgcaagctgaactggattgttcacgggaaggcgtcgccataagctgaaggcttccgcggtccggtgcatcatgatgcgtctgctcacattcttacaaacgttttctttgtacccttttgcaaacctgttgttggaagggaactggttagatcaggcccttctatagccagctttcggtttctcctgtttcactggacgtgatggaaccactgaggatgactatcttggcaatcagccatcaaagtaacttctgttaatgtccttgttgttaagctaattggtgtgtaaacgtcttacatgtgaatcatcacagttagggtccgtttggtttctttagtccagatactaaagtttagtccataccttatttagttattataggtactaaaagtattcagaatatattaaatgactcgtaagaagtcaaaaatatctattaacattct

SEQ ID NO: 29026 - DNA, 1122 bp, Zea Mays
ggaaggttccccctctttttaatgtaaagagggggaatggatacatcaaccaaggaaggaggaggacaaatggtagagtgaggcgggcagacagagaggacagcattaggcgaactgtttatgtctctgaacttgaccatactgtgacagaggagagacttgctgatatctttaccacctgtgggcaagttgttgattgcagaatttgtggtgatccccactcagttcttaggtttgcattcattgagttctctgatgaagagggcgccagaactgcgcttaacctgggaggcacaatttttggtttctaccctgttagagttttgccgtcaaagacagctatcttacctgttaatccaaagtttcttcccaggacggatgacgagaaggaaatggtcatgcgaactgtctattgtacaaacatagataagatggttactcagttagatgtaaagaaattctttgaagaactttgcggtgaggtctctcggttgaggcttctaggggataatgtacattccacaaggattgcttttgttgaatttgtccatgctgagggtgccatcatggctctgaattgcagcgggatgattttgggaacactgcctgtcagggtgagcccttccaagactccggtgaagccccgtgtaaatcgagtgggatctaactgactctgcgcaagctgaactggattgttcacgggaaggcgtcgccataagctgaaggcttccgcggtccggtgcatcatgatgcgtctgctcacattcttacaaacgttttctttgtacccttttgcaaacctgttgttggaagggaactggttagatcaggcccttctatagccagctttcggtttctcctgtttcactggacgtgatggaaccactgaggatgactatcttggcaatcagccatcaaagtaacttctgttaatgtccttgttgttaagctaattggtgtgtaaacgtcttacatgtgaatcatcacagttagggtccgtttggtttctttagtccagatactaaagtttagtccataccttatttagttattataggtactaaaagtattcagaatatattaaatgactcgtaagaagtcaaaaatatctattaacattct

SEQ ID NO: 29027 - DNA, 916 bp, Zea Mays
ctttggggtgaagggagcggaagtcgccccctccctcgactcccccaggccccaacgccaccgtgtcctcccccgcccacagccgcgtcgcgcaccaactccaattcctcctctccgagcgcccccacccacctcgacgcctcgcctcggccgttgagatctcgcgcgcccgcggcggcatggcgacgcgcaaccggacgccgctctaccgcaagtaccgcgacgcgctgcggcacgtccgcgcgccgcccggggcgccgtcgtcgtccggcggcggcggcggcgggggagggccggtaatcgagatggcctcactcctgcgctccgaccgcccctacgcgcccctcagcaccgacgacccctccgcctccagtagaggcgctgcgacggtcgggctacccccagcctgggtggatgtctctgaagagatatccgcaaacatgcagcgggcaaggacgaaaatggcggagctggctaaggcgcatgccaaagccttgatgccgtcctttggtgatggcagagacgaccaacgagccattgaggttctcacgcacgaggtaacggacttgctaaagaggtcggagaagaggctgcagaagctgtccatgaaagattcgtcagaggactcaaatgtccggaagaatgtccagcgttctcttgctacagacctgcaaaacctgtcaatggagttccggaaaaagcagtcgtcgtatctaaagcagcttcgtcaacaaaaagagggtcaggacggtgttgatttggaaatgaatataaacggagcaaagtctacatttgaagatgatgagtttgacgatgtgggtttcactgaggttcagatgtcaaaacttaagaaaagcgaagccttcactagagaaagggagagagaaattgagcagtctgtttattattgttgtat

SEQ ID NO: 29028 - DNA, 1705 bp, Zea Mays
ggaatctccaccactagatcgagcaaatgtaaggcttgccatagcatgtcggtcgacggtgatcagtggcttaggcagtaaagctgtagtgctctgttctgatttgcaaacgcaaagtagaggcgctgcgacggtcgggctacccccagcctgggtggatgtctctgaagagatatccgcaaacatgcagcgggcaaggacgaaaatggcggagctggctaaggcgcatgccaaagccttgatgccgtcctttggtgatggcagagacgaccaacgagccattgaggttctcacgcacgaggtaacggacttgctaaagaggtcggagaagaggctgcagaagctgtccatgaaagattcgtcagaggactcaaatgtccggaagaatgtccagcgttctcttgctacagacctgcaaaacctgtcaatggagttccggaaaaagcagtcgtcgtatctaaagcagcttcgtcaacaaaaagagggtcaggacggtgttgatttggaaatgaatataaacggagcaaagtctacatttgaagatgatgagtttgacgatgtgggtttcactgaggttcagatgtcaaaacttaagaaaagcgaagccttcactagagaaagggagagagaaattgagcaggttgttgaatcagtcaacgaacttgcacagatcatgaaggatctttcagttctcgtgattgatcagggaaccatcatcgatcggatagactacaacatacagaatgttgcagcttcagttgaggagggttacaaacaattgcaaaaggctgagaggacccagaagaaagggggcatggtgatgtgtgccactgtccttgtcattctaatcttcatcatgatagtccttctgattttgaaggagatcattttctgacatacatacctatctcattctaccgggaacgccgcagttcgtttgaatagcgcgatacggttcgctgatctgaagatagttctcctgcccattttcataatggctgggccagcaactgtcttccgtgttggccacaatttttttgcatcgttgcagatgtagagatgctctattcatacatgcctcatatttatagggaaaagaggattgttttacacgtttcaccttccagtttgccttgcggcgacgaggcttggctggttgtttatgcctctgtataggctgattattactggtatcagcagcctgtgctgtgagccacaagggtttgtttggagctggagggcaatcgctttgatcgtctttgggcctccctcccccatggccaactgagcgccatgcagggatctgatctcattttccagaactctgaaatttcacaaacccgattaatcaactaaattactctagtagaccgaatgttcagccctagatccaatagctgaagatcgttcggtggacaacaagtcaaccactgcgtcaagcatgcattgttttaattttaaaatttaaggtaatgcagctgccatagtagatcatggccccgtttggatctgttttttgcggattatggcgatcaaaagctgcttatctcaaccaaacgctcggattgtcgtgctgcttctgagacaaggcgcttctcgtggacgctgaatttgaactccaccgcggaagcaggtaacaaggcgcgtctcagggaagctgactgctcgtctcctgtttgccatgcgtgctcatcatagttacccg

SEQ ID NO: 29029 - DNA, 2962 bp, Zea Mays
gatgccttttccccacgagggcccacggaggcagtggcttggcgcgcgcggcggcgacgggcacgctccctcgcttccctgtccctgctcacctctgaacccaatctaaccgccgtccgccaccttcgcgcgcgaaaactccccccctcccattcgcgccgccgccgccgaccaccacccatcccggcgacaagggctccccatccggctgatccgtcaggaacctaatcttctcggcgcgagaaacgccgggcggggaacaaaggacaggaccccattccggtgcggcgggaccaatgggctccggcgaatagctcgagcacctcgagctcgccggaaacaaccgaggcggcgcggcgtctgttctccccggcgtgatggcgatgcaggggacaggcaacggatctccaagccgacccaacatttccgtgcccggtcgttgaacgcagcggtggtcccgtctcgtcctccaaggcattgggaacctgagaggcagaggctcggccagcgacggtgggtagcgaactggcgcctggttcccgggttgctattctccgggaggaggcgctcccgttgccatgggtgcgcggcggcggcttcgccagggctctggacggctccagctgctgttttccttcctcgtgctgctgctccaggcacaggccagcgtcggcgcggcttcgatcaacggtgaaggattggcgttgctggaactgaaggtgagggtggaagctgatccccatggcgtattccaggattgggaccccatggacagcagcccatgcagctggtctggcgtgcgatgctttgacgataaagtagagattctgaacttaacaggccggcaattggctggaactctcgcacccgagatcgggagcctccgaggtctaaaatcccttttacttccaaagaacaacttccgcgggcaaatccccagagaatttggagggctgtctgctctagaagtgctagatctgagcagcaacaacctggatggaacagttccagaagaactatgggctatgccactgctcaaacaactctccaagaaggcgtccaagcaatagctgatgatcaggcaggatgcttgagcagaaaactagggtgctggtctttgctgtacaagtgggactttaaggattggatctctctcggtggtctccgagagaaagataacaccaatgtaccaaatttcagtgaggcagacgtaatgcataatttgcagtcatttgcaagtgtcatgcgccgcaggcttcttagtgaaaatgacaacctggctgctcttttgggaaatgatgacaaatcttctgatctgcaaaacctaaaagaaattcagagatctgttgacgtgaattctgtaggaagtggctcgttctctgcatttccgggaatatatggccaagctctggcacctttgcttcctgaagatattgatgctaccacagttcagcagctgtctacagatgtgacccagaccactaatgtagagatgtctggtacaacgtacagcaagtgggcatatattatcacaattcctgctgcaatattgctcattagtctcatagttctgattttggttttgcggaagcgagggcgtgcaccagtagccccttggaaaacagggctaagtggccctattcagaaggccctcgtaacaggtgcccaaaaactgaacagagctgaactcgaagttgcctgtgaagattttagcaacatcatcaatacttttcctacctgtactgtattcaagggcatattgtcaagcggggttgagattggtgttgtctccactaccatatcgtcgagcaaagactggtccaggagtgcggaatcatgcttcaagaaaaagatagatagactgtcaagggtcaaccacaagaacttcatcaacctccttggctattgcctagaaaatgagcctttcacgagaatgatggtgtttgagttcgctccacatggtagtctctcacagcaccttcacgtcaaagagtttgagcatctggactgggctgcgaggatgagggtcatcatgggcgtcgcatactgccttcaatacatgcaccatgagctcagtccacctatggcgatccacgacgtgcggtctgacacaaccttcatttcagatgattatgctgccaagattgcagatgttggtgtatggaacgagcttgctgccaaagcgaaggctggaaaggaggacggcagcagccgtgctgaagctcctccggatctcccaagcaacgcctactgcttcggcgcgctcatgatcgagaccatatccgggagggttcctgacccgtatgatcacaaacccatatgcagctgggcttctgagcatctgaaagacaagaactacggcaagctcgtggacgcgtcgctgaaggagcacaaggaaagcgagctggaggccgtctgcgaggtgatccaagagtgcatcgaccctgacccgacgcggcggccgtcgatgagagacgtcgtgggcaagctgcgagacgctctcggcatctcgcccgaggcggcggcgccgcggctgtcgccgctctggtgggcggagctggagctgctgtcggtgaagtcaacctagtgtggagaacgctgtgtatactgatactgtaccaacatgttccaacgctcctctagctgagctctaacaggattcgtataggggcttcaattcgtgctgctgatgctaccgacatttgtactggccgtaagcggtcgtaatttatgcagagagagagagagagagagagagagacgttgtgaaaaaatgcgattgatgatgtaactcatgtacatgctgatctttatcaaggaggggaaatacagtgacttgtataaatatctgtaatcccaaactcgtgtgactgtatagaaataaaacaaatagctggcgttcccagttgccactcacttaccatcagtgtttcctctgcgtgcgatggtagctcaagttgag

SEQ ID NO: 29030 - DNA, 2947 bp, Zea Mays
cacggaggcagtggcttggcgcgcgcggcggcgacgggcacgctccctcgcttccctgtccctgctcacctctgaacccaatctaaccgccgtccgccaccttcgcgcgcgaaaactccccccctcccattcgcgccgccgccgccgaccaccacccatcccggcgacaagggctccccatccggctgatccgtcaggaacctaatcttctcggcgcgagaaacgccgggcggggaacaaaggacaggaccccattccggtgcggcgggaccaatgggctccggcgaatagctcgagcacctcgagctcgccggaaacaaccgaggcggcgcggcgtctgttctccccggcgtgatggcgatgcaggggacaggcaacggatctccaagccgacccaacatttccgtgcccggtcgttgaacgcagcggtggtcccgtctcgtcctccaaggcattgggaacctgagaggcagaggctcggccagcgacggtgggtagcgaactggcgcctggttcccgggttgctattctccgggaggaggcgctcccgttgccatgggtgcgcggcggcggcttcgccagggctctggacggctccagctgctgttttccttcctcgtgctgctgctccaggcacaggccagcgtcggcgcggcttcgatcaacggtgaaggattggcgttgctggaactgaaggtgagggtggaagctgatccccatggcgtattccaggattgggaccccatggacagcagcccatgcagctggtctggcgtgcgatgctttgacgataaagtagagattctgaacttaacaggccggcaattggctggaactctcgcacccgagatcgggagcctccgaggtctaaaatcccttttacttccaaagaacaacttccgcgggcaaatccccagagaatttggagggctgtctgctctagaagtgctagatctgagcagcaacaacctggatggaacagttccagaagaactatgggctatgccactgctcaaacaactatcccttcatgataatcagctccaagaaggcgtccaagcaatagctgatgatcaggcaggatgcttgagcagaaaactagggtgctggtctttgctgtacaagtgggactttaaggattggatctctctcggtggtctccgagagaaagataacaccaatatttcagtgaggcagacgtaatgcataatttgcagtcatttgcaagtgtcatgcgccgcaggcttcttagtgaaaatgacaacctggctgctcttttgggaaatgatgacaaatcttctgatctgcaaaacctaaaagaaattcagagatctgttgacgtgaattctgtaggaagtggctcgttctctgcatttccgggaatatatggccaagctctggcacctttgcttcctgaagatattgatgctaccacagttcagcagctgtctacagatgtgacccagaccactaatgtagagatgtctggtacaacgtacagcaagtgggcatatattatcacaattcctgctgcaatattgctcattagtctcatagttctgattttggttttgcggaagcgagggcgtgcaccagtagccccttggaaaacagggctaagtggccctattcagaaggccctcgtaacaggtgcccaaaaactgaacagagctgaactcgaagttgcctgtgaagattttagcaacatcatcaatacttttcctacctgtactgtattcaagggcatattgtcaagcggggttgagattggtgttgtctccactaccatatcgtcgagcaaagactggtccaggagtgcggaatcatgcttcaagaaaaagatagactgtcaagggtcaaccacaagaacttcatcaacctccttggctattgcctagaaaatgagcctttcacgagaatgatggtgtttgagttcgctccacatggtagtctctcacagcaccttcacgtcaaagagtttgagcatctggactgggctgcgaggatgagggtcatcatgggcgtcgcatactgccttcaatacatgcaccatgagctcagtccacctatggcgatccacgacgtgcggtctgacacaaccttcatttcagatgattatgctgccaagattgcagatgttggtgtatggaacgagcttgctgccaaagcgaaggctggaaaggaggacggcagcagccgtgctgaagctcctccggatctcccaagcaacgcctactgcttcggcgcgctcatgatcgagaccatatccgggagggttcctgacccgtatgatcacaaacccatatgcagctgggcttctgagcatctgaaagacaagaactacggcaagctcgtggacgcgtcgctgaaggagcacaaggaaagcgagctggaggccgtctgcgaggtgatccaagagtgcatcgaccctgacccgacgcggcggccgtcgatgagagacgtcgtgggcaagctgcgagacgctctcggcatctcgcccgaggcggcggcgccgcggctgtcgccgctctggtgggcggagctggagctgctgtcggtgaagtcaacctagtgtggagaacgctgtgtatactgatactgtaccaacatgttccaacgctcctctagctgagctctaacaggattcgtataggggcttcaattcgtgctgctgatgctaccgacatttgtactggccgtaagcggtcgtaatttatgcagagagagagagagagagagagagagacgttgtgaaaaaatgcgattgatgatgtaactcatgtacatgctgatctttatcaaggaggggaaatacagtgacttgtataaatatctgtaatcccaaactcgtgtgactgtatagaaataaaacaaatagctggcgttcccagttgccactcacttaccatcagtgtttcctctgcgtgcgatggtagctcaagttgag

SEQ ID NO: 29031 - DNA, 2898 bp, Zea Mays
gcacgctccctcgcttccctgtccctgctcacctctgaacccaatctaaccgccgtccgccaccttcgcgcgcgaaaactccccccctcccattcgcgccgccgccgccgaccaccacccatcccggcgacaagggctccccatccggctgatccgtcaggaacctaatcttctcggcgcgagaaacgccgggcggggaacaaaggacaggaccccattccggtgcggcgggaccaatgggctccggcgaatagctcgagcacctcgagctcgccggaaacaaccgaggcggcgcggcgtctgttctccccggcgtgatggcgatgcaggggacaggcaacggatctccaagccgacccaacatttccgtgcccggtcgttgaacgcagcggtggtcccgtctcgtcctccaaggcattgggaacctgagaggcagaggctcggccagcgacggtgggtagcgaactggcgcctggttcccgggttgctattctccgggaggaggcgctcccgttgccatgggtgcgcggcggcggcttcgccagggctctggacggctccagctgctgttttccttcctcgtgctgctgctccaggcacaggccagcgtcggcgcggcttcgatcaacggtgaaggattggcgttgctggaactgaaggtgagggtggaagctgatccccatggcgtattccaggattgggaccccatggacagcagcccatgcagctggtctggcgtgcgatgctttgacgataaagtagagattctgaacttaacaggccggcaattggctggaactctcgcacccgagatcgggagcctccgaggtctaaaatcccttttacttccaaagaacaacttccgcgggcaaatccccagagaatttggagggctgtctgctctagaagtgctagatctgagcagcaacaacctggatggaacagttccagaagaactatgggctatgccactgctcaaacaactctccaagaaggcgtccaagcaatagctgatgatcaggcaggatgcttgagcagaaaactagggtgctggtctttgctgtacaagtgggactttaaggattggatctctctcggtggtctccgagagaaagataacaccaatgtaccaaatttcagtgaggcagacgtaatgcataatttgcagtcatttgcaagtgtcatgcgccgcaggcttcttagtgaaaatgacaacctggctgctcttttgggaaatgatgacaaatcttctgatctgcaaaacctaaaagaaattcagagatctgttgacgtgaattctgtaggaagtggctcgttctctgcatttccgggaatatatggccaagctctggcacctttgcttcctgaagatattgatgctaccacagttcagcagctgtctacagatgtgacccagaccactaatgtagagatgtctggtacaacgtacagcaagtgggcatatattatcacaattcctgctgcaatattgctcattagtctcatagttctgattttggttttgcggaagcgagggcgtgcaccagtagccccttggaaaacagggctaagtggccctattcagaaggccctcgtaacaggtgcccaaaaactgaacagagctgaactcgaagttgcctgtgaagattttagcaacatcatcaatacttttcctacctgtactgtattcaagggcatattgtcaagcggggttgagattggtgttgtctccactaccatatcgtcgagcaaagactggtccaggagtgcggaatcatgcttcaagaaaaagatagactgtcaagggtcaaccacaagaacttcatcaacctccttggctattgcctagaaaatgagcctttcacgagaatgatggtgtttgagttcgctccacatggtagtctctcacagcaccttcacgtcaaagagtttgagcatctggactgggctgcgaggatgagggtcatcatgggcgtcgcatactgccttcaatacatgcaccatgagctcagtccacctatggcgatccacgacgtgcggtctgacacaaccttcatttcagatgattatgctgccaagattgcagatgttggtgtatggaacgagcttgctgccaaagcgaaggctggaaaggaggacggcagcagccgtgctgaagctcctccggatctcccaagcaacgcctactgcttcggcgcgctcatgatcgagaccatatccgggagggttcctgacccgtatgatcacaaacccatatgcagctgggcttctgagcatctgaaagacaagaactacggcaagctcgtggacgcgtcgctgaaggagcacaaggaaagcgagctggaggccgtctgcgaggtgatccaagagtgcatcgaccctgacccgacgcggcggccgtcgatgagagacgtcgtgggcaagctgcgagacgctctcggcatctcgcccgaggcggcggcgccgcggctgtcgccgctctggtgggcggagctggagctgctgtcggtgaagtcaacctagtgtggagaacgctgtgtatactgatactgtaccaacatgttccaacgctcctctagctgagctctaacaggattcgtataggggcttcaattcgtgctgctgatgctaccgacatttgtactggccgtaagcggtcgtaatttatgcagagagagagagagagagagagagagacgttgtgaaaaaatgcgattgatgatgtaactcatgtacatgctgatctttatcaaggaggggaaatacagtgacttgtataaatatctgtaatcccaaactcgtgtgactgtatagaaataaaacaaatagctggcgttcccagttgccactcacttaccatcagtgtttcctctgcgtgcgatggtagctcaagttgag

SEQ ID NO: 29032 - DNA, 2910 bp, Zea Mays
gcacgctccctcgcttccctgtccctgctcacctctgaacccaatctaaccgccgtccgccaccttcgcgcgcgaaaactccccccctcccattcgcgccgccgccgccgaccaccacccatcccggcgacaagggctccccatccggctgatccgtcaggaacctaatcttctcggcgcgagaaacgccgggcggggaacaaaggacaggaccccattccggtgcggcgggaccaatgggctccggcgaatagctcgagcacctcgagctcgccggaaacaaccgaggcggcgcggcgtctgttctccccggcgtgatggcgatgcaggggacaggcaacggatctccaagccgacccaacatttccgtgcccggtcgttgaacgcagcggtggtcccgtctcgtcctccaaggcattgggaacctgagaggcagaggctcggccagcgacggtgggtagcgaactggcgcctggttcccgggttgctattctccgggaggaggcgctcccgttgccatgggtgcgcggcggcggcttcgccagggctctggacggctccagctgctgttttccttcctcgtgctgctgctccaggcacaggccagcgtcggcgcggcttcgatcaacggtgaaggattggcgttgctggaactgaaggtgagggtggaagctgatccccatggcgtattccaggattgggaccccatggacagcagcccatgcagctggtctggcgtgcgatgctttgacgataaagaacttaacaggccggcaattggctggaactctcgcacccgagatcgggagcctccgaggtctaaaatcccttttacttccaaagaacaacttccgcgggcaaatccccagagaatttggagggctgtctgctctagaagtgctagatctgagcagcaacaacctggatggaacagttccagaagaactatgggctatgccactgctcaaacaactatcccttcatgataatcagctccaagaaggcgtccaagcaatagctgatgatcaggcaggatgcttgagcagaaaactagggtgctggtctttgctgtacaagtgggactttaaggattggatctctctcggtggtctccgagagaaagataacaccaatgtaccaaatttcagtgaggcagacgtaatgcataatttgcagtcatttgcaagtgtcatgcgccgcaggcttcttagtgaaaatgacaacctggctgctcttttgggaaatgatgacaaatcttctgatctgcaaaacctaaaagaaattcagagatctgttgacgtgaattctgtaggaagtggctcgttctctgcatttccgggaatatatggccaagctctggcacctttgcttcctgaagatattgatgctaccacagttcagcagctgtctacagatgtgacccagaccactaatgtagagatgtctggtacaacgtacagcaagtgggcatatattatcacaattcctgctgcaatattgctcattagtctcatagttctgattttggttttgcggaagcgagggcgtgcaccagtagccccttggaaaacagggctaagtggccctattcagaaggccctcgtaacaggtgcccaaaaactgaacagagctgaactcgaagttgcctgtgaagattttagcaacatcatcaatacttttcctacctgtactgtattcaagggcatattgtcaagcggggttgagattggtgttgtctccactaccatatcgtcgagcaaagactggtccaggagtgcggaatcatgcttcaagaaaaagatagatagactgtcaagggtcaaccacaagaacttcatcaacctccttggctattgcctagaaaatgagcctttcacgagaatgatggtgtttgagttcgctccacatggtagtctctcacagcaccttcacgtcaaagagtttgagcatctggactgggctgcgaggatgagggtcatcatgggcgtcgcatactgccttcaatacatgcaccatgagctcagtccacctatggcgatccacgacgtgcggtctgacacaaccttcatttcagatgattatgctgccaagattgcagatgttggtgtatggaacgagcttgctgccaaagcgaaggctggaaaggaggacggcagcagccgtgctgaagctcctccggatctcccaagcaacgcctactgcttcggcgcgctcatgatcgagaccatatccgggagggttcctgacccgtatgatcacaaacccatatgcagctgggcttctgagcatctgaaagacaagaactacggcaagctcgtggacgcgtcgctgaaggagcacaaggaaagcgagctggaggccgtctgcgaggtgatccaagagtgcatcgaccctgacccgacgcggcggccgtcgatgagagacgtcgtgggcaagctgcgagacgctctcggcatctcgcccgaggcggcggcgccgcggctgtcgccgctctggtgggcggagctggagctgctgtcggtgaagtcaacctagtgtggagaacgctgtgtatactgatactgtaccaacatgttccaacgctcctctagctgagctctaacaggattcgtataggggcttcaattcgtgctgctgatgctaccgacatttgtactggccgtaagcggtcgtaatttatgcagagagagagagagagagagagagagacgttgtgaaaaaatgcgattgatgatgtaactcatgtacatgctgatctttatcaaggaggggaaatacagtgacttgtataaatatctgtaatcccaaactcgtgtgactgtatagaaataaaacaaatagctggcgttcccagttgccactcacttaccatcagtgtttcctctgcgtgcgatggtagctcaagttgag

SEQ ID NO: 29033 - DNA, 1873 bp, Zea Mays
gtcgctgccaaagtagaatccgtctccgataataaaacacggcagtcagcggcacacttatcgcaaagccagccagccagccagccagcagcggctgtcccaagctgtccaaagccaagccaagcgcggcgcggcggcagtcctctcctcgcagtcgcagcagggccgagccgaccggtcaaaagcactgctgccccaccccaacccaccaccatccccgttccccaacccccaaagccgagagccatcccgcccgcagccgcaaccaggcaagcaagcgggagccgccaactcgtgcctctcggcagcggcgtctgaactctgaaccgaccgaccgaccgaccgttccgttccgttcaccccaccatggaggcgccgccgggaccggggcccatggagctggacgccccacctcccgccgccgccgccgcggcgattcctcccgccggcagcgacaagcacaaggacggggaagggggagacgctgtgacgggccatatcatctccaccaccatcggcgggaagaacggcgagcccaagcggaccatcagttacatggcagaacgtgtcgtgggcacaggctcatttgggatcgtcttccaggctaagtgtctggaaacaggagagaccttcgccatcaagaaggtgctgcaagatcggcgttacaagaaccgggagctgcaacttatgcgtgccatggagcaccccaacgtcatctgcctgaagcactgcttcttctcgacaacgagcagggacgaattgtttttaaaccttgtcatggaattcgtccctgagactctataccgagtcctgaagcactacagcaatgcgaaccagaggatgcctcttatctacgtcaagctctacatgtatcagctttttagaggcctagcttatattcataatgtaccaggagtctgccatagggatgtgaagccacaaaacgttttggttgatcctctcacccaccaggtcaagctctgtgactttggtagtgcaaaagttctgattcctggtgaaccgaacatatcttacatatgctctcgttactatcgtgcccctgagctcatatttggtgcgacggagtatacaagttcaatagacatatggtcagctggttgtgttctagctgagttgcttcttggacagccactatttccaggagagagcgctgttgatcagttggtagagatcatcaaggttcttggtactccaacccgtgaggagatacggtgcatgaatcccaactatactgagttcaggtttcctcagataaaggctcatccatggcacaagattttccacaagagaatgcctcctgaagccatagaccttgcttctcgtctccttcagtattcaccaagtcttcgctgctctgctcttgacgcatgtgctcatcccttcttcgatgagctgcggacaccgaacgcacgcctaccaaacggccgcccgttccctccgctctttaacttcaagcacgaactagcaaatgcctctccggacctcgtcagcaggcgctgtgatggtcgaagttttcggtcttggtttccccttctggagagtgggaggggctcaagcagtacctgagaaaagtagtgaaaccgtgtaaattatctgaccgtgaaggagtactaccgccagtaactggcgcatgttcgtccagtagttatggtaagaatgtaggaggtggagactggttaatgtgtagggtcgttttttttgttttgttttgatattactaccattttgttgtaatgttcgtcggtacttccagcagtagtgtagctggccacgttttgttcgtccgccatgatgtaaatgatcatcgcccaactgtaatgcatgttctctctgatcgtttcgtaaaaaaaat

SEQ ID NO: 29034 - DNA, 3673 bp, Zea Mays
caagctgtccaaagccaagccaagcgcggcgcggcggcagtcctctcctcgcagtcgcagcagggccgagccgaccggtcaaaagcactgctgccccaccccaacccaccaccatccccgttccccaacccccaaagccgagagccatcccgcccgcagccgcaaccaggcaagcaagcgggagccgccaactcgtgcctctcggcagcggcgtctgaactctgaaccgaccgaccgaccgaccgttccgttccgttcaccccaccatggaggcgccgccgggaccggggcccatggagctggacgccccacctcccgccgccgccgccgcggcgattcctcccgccggcagcgacaagcacaaggacggggaagggggagacgctgtgacgggccatatcatctccaccaccatcggcgggaagaacggcgagcccaagcggaccatcagttacatggcagaacgtgtcgtgggcacaggctcatttgggatcgtcttccaggctaagtgtctggaaacaggagagaccttcgccatcaagaaggtgctgcaagatcggcgttacaagaaccgggagctgcaacttatgcgtgccatggagcaccccaacgtcatctgcctgaagcactgcttcttctcgacaacgagcagggacgaattgtttttaaaccttgtcatggaattcgtccctgagactctataccgagtcctgaagcactacagcaatgcgaaccagaggatgcctcttatctacgtcaagctctacatgtatcagctttttagaggcctagcttatattcataatgtaccaggagtctgccatagggatgtgaagccacaaaacgttttggttgatcctctcacccaccaggtcaagctctgtgactttggtagtgcaaaagttctggtatgttgtttttctttcctcgaggatctgtagtcacatccttttgttttatgctcttttttaaaaatattgttatcaaaggtttaatcatgtgcagttacctttatcctatttgagctaagacttattcaacggtttgcggagctgtgttagtctgtattatcattagttcttttacttctgtgtgaaattccaatcttgaacttgactgtaattcatgtgttataataattggactctttacttgtataccgtaaatctttgatccacatgttaatcagttccttatgctgctttgtcagattcctggtgaaccgaacatatcttacatatgctctcgttactatcgtgcccctgagctcatatttggtgcgacggagtatacaagttcaatagacatatggtcagctggttgtgttctagctgagttgcttcttggacagccactatttccaggagagagcgctgttgatcagttggtagagatcatcaaggttcttggtactccaacccgtgaggagatacggtgcatgaatcccaactatactgagttcaggtttcctcagataaaggctcatccatggcacaagattttccacaagagaatgcctcctgaagccatagaccttgcttctcgtctccttcagtattcaccaagtcttcgctgctctgctcttgacgcatgtgctcatcccttcttcgatgagctgcggacaccgaacgcacgcctaccaaacggccgcccgttccctccgctctttaacttcaagcacgaactagcaaatgcctctccggacctcgtcagcaggcttgtgccggagcacattagacggcagatcggtgtcaacttcgggagcagctaggagggcaggcgctgtgatggtcgaagttttcggtcttggtttccccttctggagagtgggaggggctcaagcagtacctgagaaaagtagtgaaaccgtgtaaattatctgaccgtgaaggagtactaccgccagtaactggcgcatgttcgtccagtagttatggtaagaatgtaggaggtggagactggttaatgtgtagggtcgttttttttgttttgttttgatattactaccattttgttgtaatgttcgtcggtacttccagcagtagtgtagctggccacgttttgttcgtccgccatgatgtaaatgatcatcgcccaactgtaatgcatgttctctctgatcgtttcgtagtcctgatgcctgctgtgatgaagctcagagtctgaggcaggaaagtcggaagaacttccggctcccgaaataggaatcgctgccggtgtgaaactacggtgaagttgtatcgaaattttgcatgccaatacagactattctatcggttggaacttggaagttatctgatgagcggttcaatcgcaaatgttcattcccaactcccaaggccacaaatgctctcggattgtagtgggctttacacgaacagtggcttcttaaaatcgtagtttgattttgttcttacacagagatatatcgaaaatcacaggcaacgcgggttggtatcatttcttccgcatcgagtcagttcaaggcatagaaacgggaataattaatagatacagtctagtttttgcgatttatttgaccgggcacaagtgcgtcgctacacattcttgatgtgactcgcaagtcgctgtagcttggagcaattcggtcgtacctatcgggcaaccaaccagtgcaccaggcggagcgcacgactagagccgcggccgcgccggcgccggcccggcgccgtggtccttgacctgggcccacagctggggccacgcggccttcctgatctcggcgacggcctccccgtcccagcccctggcggccagcctctcggcctcagcgacggccgcggccaccacgtcctcggggccgccgtccacggcggcgtccacgaggccccggcgcacggcctcggccgcggccacccggtccccgcgcagcaccaggtcgcgccgggccgcggcgtcggggaccttgtcgcggagcacggcggccacgaagtcgacgaacttgatgccgacgtcgacctcgctcatgtacaggagcccgcgggaggcgcgcatgagcgcggcgtcgtgcgcgagcgccagcgcgcacccggccgccgccgcgtggcccgtcaccgccgccaccgtgggcacgcgcagcgccagcaggtcggccagcagcgcgcggagcccgccgtccatggcgccgtgcaggccgggcggcgccgcgcgcgcccacgccaggtcgaacccgttggagaagaacttcccctccgcggccagcaccagcgcgccggcgccagcggaggcggccacagcggagcggagcgccgcgaggaggtccgggttgaggcggtgctcgccggcgccggtcatggtgatgaggtgcacgcggccgcgcctctcgacggtgcacatgcccttgctgctgctctccattgctgatttggggaccacgacgcagcagccgtgacgagactgcgttcggacaactctacgctatttgctttttaagtatgtctttgggatcagttttttaatcgaccagagtttgagacgagcgtcctatgtgatgcatatggcggctaactttcccgcgatacgatataaaactggaagaaggatgtaattcttcatggatcatctagcgtggagtggttcatgagattttaaaactgttcggctgcactaagcagatcaaatagtagtggctgaataaatatatatataaata

SEQ ID NO: 29035 - DNA, 3313 bp, Zea Mays
gcagtcgcagcagggccgagccgaccggtcaaaagcactgctgccccaccccaacccaccaccatccccgttccccaacccccaaagccgagagccatcccgcccgcagccgcaaccaggcaagcaagcgggagccgccaactcgtgcctctcggcagcggcgtctgaactctgaaccgaccgaccgaccgaccgttccgttccgttcaccccaccatggaggcgccgccgggaccggggcccatggagctggacgccccacctcccgccgccgccgccgcggcgattcctcccgccggcagcgacaagcacaaggacggggaagggggagacgctgtgacgggccatatcatctccaccaccatcggcgggaagaacggcgagcccaagcggaccatcagttacatggcagaacgtgtcgtgggcacaggctcatttgggatcgtcttccaggctaagtgtctggaaacaggagagaccttcgccatcaagaaggtgctgcaagatcggcgttacaagaaccgggagctgcaacttatgcgtgccatggagcaccccaacgtcatctgcctgaagcactgcttcttctcgacaacgagcagggacgaattgtttttaaaccttgtcatggaattcgtccctgagactctataccgagtcctgaagcactacagcaatgcgaaccagaggatgcctcttatctacgtcaagctctacatgtatcagaggcctagcttatattcataatgtaccaggagtctgccatagggatgtgaagccacaaaacgttttggttgatcctctcacccaccaggtcaagctctgtgactttggtagtgcaaaagttctgattcctggtgaaccgaacatatcttacatatgctctcgttactatcgtgcccctgagctcatatttggtgcgacggagtatacaagttcaatagacatatggtcagctggttgtgttctagctgagttgcttcttggacagccactatttccaggagagagcgctgttgatcagttggtagagatcatcaaggttcttggtactccaacccgtgaggagatacggtgcatgaatcccaactatactgagttcaggtttcctcagataaaggctcatccatggcacaagattttccacaagagaatgcctcctgaagccatagaccttgcttctcgtctccttcagtattcaccaagtcttcgctgctctgctcttgacgcatgtgctcatcccttcttcgatgagctgcggacaccgaacgcacgcctaccaaacggccgcccgttccctccgctctttaacttcaagcacgaactagcaaatgcctctccggacctcgtcagcaggcttgtgccggagcacattagacggcagatcggtgtcaacttcgggagcagctaggagggcaggcgctgtgatggtcgaagttttcggtcttggtttccccttctggagagtgggaggggctcaagcagtacctgagaaaagtagtgaaaccgtgtaaattatctgaccgtgaaggagtactaccgccagtaactggcgcatgttcgtccagtagttatggtaagaatgtaggaggtggagactggttaatgtgtagggtcgttttttttgttttgttttgatattactaccattttgttgtaatgttcgtcggtacttccagcagtagtgtagctggccacgttttgttcgtccgccatgatgtaaatgatcatcgcccaactgtaatgcatgttctctctgatcgtttcgtagtcctgatgcctgctgtgatgaagctcagagtctgaggcaggaaagtcggaagaacttccggctcccgaaataggaatcgctgccggtgtgaaactacggtgaagttgtatcgaaattttgcatgccaatacagactattctatcggttggaacttggaagttatctgatgagcggttcaatcgcaaatgttcattcccaactcccaaggccacaaatgctctcggattgtagtgggctttacacgaacagtggcttcttaaaatcgtagtttgattttgttcttacacagagatatatcgaaaatcacaggcaacgcgggttggtatcatttcttccgcatcgagtcagttcaaggcatagaaacgggaataattaatagatacagtctagtttttgcgatttatttgaccgggcacaagtgcgtcgctacacattcttgatgtgactcgcaagtcgctgtagcttggagcaattcggtcgtacctatcgggcaaccaaccagtgcaccaggcggagcgcacgactagagccgcggccgcgccggcgccggcccggcgccgtggtccttgacctgggcccacagctggggccacgcggccttcctgatctcggcgacggcctccccgtcccagcccctggcggccagcctctcggcctcagcgacggccgcggccaccacgtcctcggggccgccgtccacggcggcgtccacgaggccccggcgcacggcctcggccgcggccacccggtccccgcgcagcaccaggtcgcgccgggccgcggcgtcggggaccttgtcgcggagcacggcggccacgaagtcgacgaacttgatgccgacgtcgacctcgctcatgtacaggagcccgcgggaggcgcgcatgagcgcggcgtcgtgcgcgagcgccagcgcgcacccggccgccgccgcgtggcccgtcaccgccgccaccgtgggcacgcgcagcgccagcaggtcggccagcagcgcgcggagcccgccgtccatggcgccgtgcaggccgggcggcgccgcgcgcgcccacgccaggtcgaacccgttggagaagaacttcccctccgcggccagcaccagcgcgccggcgccagcggaggcggccacagcggagcggagcgccgcgaggaggtccgggttgaggcggtgctcgccggcgccggtcatggtgatgaggtgcacgcggccgcgcctctcgacggtgcacatgcccttgctgctgctctccattgctgatttggggaccacgacgcagcagccgtgacgagactgcgttcggacaactctacgctatttgctttttaagtatgtctttgggatcagttttttaatcgaccagagtttgagacgagcgtcctatgtgatgcatatggcggctaactttcccgcgatacgatataaaactggaagaaggatgtaattcttcatggatcatctagcgtggagtggttcatgagattttaaaactgttcggctgcactaagcagatcaaatagtagtggctgaataaatatatatataaata

SEQ ID NO: 29036 - DNA, 3284 bp, Zea Mays
gcagtcgcagcagggccgagccgaccggtcaaaagcactgctgccccaccccaacccaccaccatccccgttccccaacccccaaagccgagagccatcccgcccgcagccgcaaccaggcaagcaagcgggagccgccaactcgtgcctctcggcagcggcgtctgaactctgaaccgaccgaccgaccgaccgttccgttccgttcaccccaccatggaggcgccgccgggaccggggcccatggagctggacgccccacctcccgccgccgccgccgcggcgattcctcccgccggcagcgacaagcacaaggacggggaagggggagacgctgtgacgggccatatcatctccaccaccatcggcgggaagaacggcgagcccaagcggaccatcagttacatggcagaacgtgtcgtgggcacaggctcatttgggatcgtcttccaggctaagtgtctggaaacaggagagaccttcgccatcaagaaggtgctgcaagatcggcgttacaagaaccgggagctgcaacttatgcgtgccatggagcaccccaacgtcatctgcctgaagcactgcttcttctcgacaacgagcagggacgaattgtttttaaaccttgtcatggaattcgtccctgagactctataccgagtcctgaagcactacagcaatgcgaaccagaggatgcctcttatctacgtcaagctctacatgtatcaggagtctgccatagggatgtgaagccacaaaacgttttggttgatcctctcacccaccaggtcaagctctgtgactttggtagtgcaaaagttctgattcctggtgaaccgaacatatcttacatatgctctcgttactatcgtgcccctgagctcatatttggtgcgacggagtatacaagttcaatagacatatggtcagctggttgtgttctagctgagttgcttcttggacagccactatttccaggagagagcgctgttgatcagttggtagagatcatcaaggttcttggtactccaacccgtgaggagatacggtgcatgaatcccaactatactgagttcaggtttcctcagataaaggctcatccatggcacaagattttccacaagagaatgcctcctgaagccatagaccttgcttctcgtctccttcagtattcaccaagtcttcgctgctctgctcttgacgcatgtgctcatcccttcttcgatgagctgcggacaccgaacgcacgcctaccaaacggccgcccgttccctccgctctttaacttcaagcacgaactagcaaatgcctctccggacctcgtcagcaggcttgtgccggagcacattagacggcagatcggtgtcaacttcgggagcagctaggagggcaggcgctgtgatggtcgaagttttcggtcttggtttccccttctggagagtgggaggggctcaagcagtacctgagaaaagtagtgaaaccgtgtaaattatctgaccgtgaaggagtactaccgccagtaactggcgcatgttcgtccagtagttatggtaagaatgtaggaggtggagactggttaatgtgtagggtcgttttttttgttttgttttgatattactaccattttgttgtaatgttcgtcggtacttccagcagtagtgtagctggccacgttttgttcgtccgccatgatgtaaatgatcatcgcccaactgtaatgcatgttctctctgatcgtttcgtagtcctgatgcctgctgtgatgaagctcagagtctgaggcaggaaagtcggaagaacttccggctcccgaaataggaatcgctgccggtgtgaaactacggtgaagttgtatcgaaattttgcatgccaatacagactattctatcggttggaacttggaagttatctgatgagcggttcaatcgcaaatgttcattcccaactcccaaggccacaaatgctctcggattgtagtgggctttacacgaacagtggcttcttaaaatcgtagtttgattttgttcttacacagagatatatcgaaaatcacaggcaacgcgggttggtatcatttcttccgcatcgagtcagttcaaggcatagaaacgggaataattaatagatacagtctagtttttgcgatttatttgaccgggcacaagtgcgtcgctacacattcttgatgtgactcgcaagtcgctgtagcttggagcaattcggtcgtacctatcgggcaaccaaccagtgcaccaggcggagcgcacgactagagccgcggccgcgccggcgccggcccggcgccgtggtccttgacctgggcccacagctggggccacgcggccttcctgatctcggcgacggcctccccgtcccagcccctggcggccagcctctcggcctcagcgacggccgcggccaccacgtcctcggggccgccgtccacggcggcgtccacgaggccccggcgcacggcctcggccgcggccacccggtccccgcgcagcaccaggtcgcgccgggccgcggcgtcggggaccttgtcgcggagcacggcggccacgaagtcgacgaacttgatgccgacgtcgacctcgctcatgtacaggagcccgcgggaggcgcgcatgagcgcggcgtcgtgcgcgagcgccagcgcgcacccggccgccgccgcgtggcccgtcaccgccgccaccgtgggcacgcgcagcgccagcaggtcggccagcagcgcgcggagcccgccgtccatggcgccgtgcaggccgggcggcgccgcgcgcgcccacgccaggtcgaacccgttggagaagaacttcccctccgcggccagcaccagcgcgccggcgccagcggaggcggccacagcggagcggagcgccgcgaggaggtccgggttgaggcggtgctcgccggcgccggtcatggtgatgaggtgcacgcggccgcgcctctcgacggtgcacatgcccttgctgctgctctccattgctgatttggggaccacgacgcagcagccgtgacgagactgcgttcggacaactctacgctatttgctttttaagtatgtctttgggatcagttttttaatcgaccagagtttgagacgagcgtcctatgtgatgcatatggcggctaactttcccgcgatacgatataaaactggaagaaggatgtaattcttcatggatcatctagcgtggagtggttcatgagattttaaaactgttcggctgcactaagcagatcaaatagtagtggctgaataaatatatatataaata

SEQ ID NO: 29037 - DNA, 746 bp, Zea Mays
ctcccattgattaacctccctgtggttcccccaattcaccatccagagccaccactccccctcagcccctcgccccctcctatgcacagtgcactctctccacgcctttgctcctctcggatcttacaaaacacatatgacgcccacaactccccctgcgtcattccctttcatcactgctctgcgctctaagatccactgctgcagctgcccccttccccagatcgaccatgccacagctgaccgggggctgcagaaagcccagaatcctagcatgcctcatcgcttaagcgatgctttgaaaaccatgatcacaaaagaaaggtgttaaaaagttgagggatggatgtggtgccatatttcgacacactggtgaagcttcattgaggagatttgtgagatgattcttgacactagataatatgcaatgaatttcctgtcaccaagtatgttctgcactctaggtgtagagaattaggggaacacctcatacccattgtggaatcacgaggatccatgtgggaagctgaggacgcgcgcgcacagagggagggatccacggacgaggacacactcaagcaggcaagcacgcaggagaagacgcggaggagcaggcacacacgcgggtgttgtgaacgcacagccgtggaatccgcagcacgggaaagaggctagggcagatgaaacaaacggaaggcaacctggatgataccatgtaattacctcttgacataatcaccaaagag

SEQ ID NO: 29038 - DNA, 1843 bp, Zea Mays
ctctatcttctttcgcacgtaatctttacgatgctcaagattatttttacagttagattttctccactcctgaattatcagaaaagctgattagaaaaaaaagttcaaccaggctaaaggttgccgaatcatacgcgccattgctcctgtccacgcaaataatccggagtagttatctgtctcctgttgcggtaagccgccactccgattttccaccgttacaacccaatccattcacagcatctgtaacggcttttcctgcctagctaccatggccacacaccgccactggctgctgctgctcttcctcccttgggccctcctctcccgccgcggcgcgcagcctcccgacgccctgtaccctgtcgtgctgctcccgggcaacacctgcagccagctcgaggcgcgcctcacggacgcgtacgagccgccgccggagtcgccgcaatgcggcgcgggcagcaacgagcgcggccgctggttccgcctgtggaggaacgccacggccatggacgaccccgccgtcgcgccgtgcctcgccgaccagctccgcgtcgtctacgaccccgccgcccgcgacttccgcaatgagccgggcgtggagacccgcgtcctcggctttggctccaccgccgacttcctcgccgacaccgaagccaacaaacctctgcatggggaggctcgtcgaggcgctgcagcaggccgggtaccgcgacggagagacgctgttcggcgcgccgtacgacttccgccaggctcccgcggcgcgggggcagccgtgccgtgccttcgcgcggttcacccggcggctcagggcgctcgtggagcgcgccagcagggagaacggcggcaggcccgtcgtcatcgtgtcgcacagccagggcggctacttcgcgctggagttcctgaaccggagcccgctgccctggcgccggaggtacgtcaagcactacgtcatggcgtccacgggcgccggcgggttcctgctccccctgcggaacctcgcgtccgtgccccgcgacgcgctggaggcccccgacgcgctcgtggcgctgccgtcgccggcggtgttcggtcccggcacgccgccgctggtcgtcacgcgcgccaggaactacacggcgcgggacatcccggagttcctggcggcgatcggagtgcccccgctcggggtcacgctgtacgagacgcgggcgctccccctgcagctcggcttccgggcgccggtggtgcccacgacctgcatcaacggcgtcggccagcccacgatggagcagctcgtgtactgggacggcaacttcagcgagacgccgcaggtggtgtacggcgacggcgatggattcttacccgtggcgagcatagtggccctcgacaccgtcatcggtggtgacccgaggcaggagtactacaagtctatcaagcttgccggcacgtctcacgctggcgttgtctcagatgctgcggctttgaagcgtgtcgtcgatgagattctttggagccctccaatatgagcaagtctgtcagagaccaactctatcgcctgtttttttttttcttttggcagccaatcgatttggaagtattgcctatgtccgaaaacacaataccactaaatcaaattccctacgccccgttccaaaattatactttttatatttttactagatagtttacttttattagatatatagagagagtgcgcgcgagagactgatagcatagtaaaatcatatatctagagaggccaagatgtattgtaatttggaatggaaggagtaaccgagtaagagctaataccctgttgtatactctagcttacatgtacaacgtcatttaatataag

SEQ ID NO: 29039 - DNA, 4063 bp, Zea Mays
gtcctgttcacccacgacgacccacgacgcctgcgtcggccctgcccgaactggcgtgcagagcagtgctccacgacgccgccaccacctgccccagcagcggcacgctccgacaacggcgaccatggcggtgcgggcgcggcggctggggagtctgttccctgctagatccagtagatggctgactcatcgaggcgctcagcagcgggtggaagttcccgtcaaggagtctgtcccgtcaaggagaccgtcgtgccctggacggagtcagagcaagagtcgatcaacattttcctcacgatgattgagcgacacaggcacaattcaccatgatcccatcccccactcaaacctgcaaaatcctgtagccgaacatctcgatggtctcacgtgccattcctttctacaggaatagtgtgtttggatgcatatagagaacacgaagtttaatgtgtttggtgcataatgagaattgaggaaatgggacattctagcatgctatgtgaattgtgaaaggctatagattaatgtgtacaggacgccggcttggaggtacttgcacacaagggtcgagctcggacgtcgtagcggtgcggagggcctcggccgtagcatgccccgccccgccgcgcatgcctgcgcggtcggtgtcccgcagcacccacaccgagtggcctgtcttcaaagtcgtcctcatcctctcctcctggctcaacgagaccatcaacgtctggatgttcatagacctgctcgggttcatgctgttcttcgacctcaccctggtgcacctcggccagtacttcaccaaggtgtctggtatgattgggcacctctcctgctccggcgaccgagctccaaccagggacgtctagcgctagcgcccaggacgcacgaccccctgctcctctatcctcagcgccgagcccctccgtcctgtttctggcagcgaaagcccagcccctgcggcaagctacctactcgatggaatgcccagccgcttgtcggatctacgcagcccctgcgcgacgtcacaaactccggtgaaacctcgctgcccttgctgctctcgagccccttatgtttgataaaatgttaaaactactgaatgattgttctactgcatgatccctagaacggttatacgcgcctcacacaagcatgcgctgaatttctcgctttcccaaccctatcgttttttgggtgtgtatggttttcccaggcagtcaggcgggataacaagcagaggtttagtctgttggaggaagatggcgagctgttgatccgggcgaaccagggacacacactaaaaaaatatagtctggaggtgacctcaatgtaattcaattagtgatggaacatttgggagtctactcattatgtatttcttctatctggaaaaacactcaagggatctttgtttagaggatggagacctaaatctgaccgaccttcattggtggataaatatgcagaaaaaggtatttctgttttttgagaaacaaatgtttgaaaataaattaagattcacaatagtaatatatccgcactttttgtgttatgtgaggtggagtcaagtggaaagatgatcttaaatatacatgttgtcatcttgtatggtgattatgtagtaaaattgatggcaagaaaactactggttactatgactaacacaaaataaaacgttctttttaaaaaaaacttgggtataccgtatactgttattttgatactatggcacttctgtcatgttatatgttttctaaagaatgcttccctgaagcagaacagtcatgttcattatatttcagttatgcatcagtatttgcacttgctaggttgatccttgatttctatggaattcaagtgttggacggatatgtacttatggactagctcagttttggagattagttgttttagttgtttttgtgtcatgtcttctataaagcaaataagttaccatggatcaattttgtgtcagaaggtgactatatcatctctgacaattggaatttcagttgtgagaagctttggtgatagatttttgatatatttctggtttgccactttgtttgcttgtttttttgcatgttttgaacttgttttattattgttaggtgaagcttcaattgatgatatattcttgtcagtatgctctttttgtgcaccttgtttttaatctctggcagaggagaccttcacctaaaaaacaaagatatatgttgaaatggttctttttaaaagattgcaacgtgatccgggtgtcagagattcagaaggtcttggacatcgccgacgagcgtagcctcattgacaccatcttcttctgctacctcgggtgcaatgcaagctaaggtggtcgacaatggtgttcgcggcggcgaactcgcagcgcagccaggtgatgaagccatcgcgctcgtcgacgagccaggcgacgggctcggccacggcggtgccgggggccggcgaggcgatgacggcggcggtggaggccatcgccgtgcgtccctcaccactgcgggccgcagcatagcccagccagcaatgccgaggtccatcaccactgggaaccgtcgtccggaccctctcccatcccgcacccattcctgtcctctgtctctgcgatgcgcttagcgccctcaccacttccacctccccagcctggctagcagcggcggagggaagaagtaccccactctggctagcagcggcggtggcagctcagattagtacggcgctgccccttcttcccccacctgtctttggatctacaaccgcccacccgtcttcggagctgttgtattcctccccacttgcttatctattcctctcaaaatagtgatggatttcggtcctcggatttttaccaatcggacaaatccagtgaattatgttgagaaattgttatactgaatttagtggtaggttggtattacgacctgcaaaacttaggtttggttatatgtttctttactggcctgtaggtacgacgttcttacatactttaagtaccttgacacattgagagtattagaaggtgtctgatcaatttggatacttgctgatccaagccataggtatttgagcttgcaaagaggttcctccaagagaatccagagtatgttgcacagggtgtaactttagctcagttttcgttccagatacctatacctctgcggcaggactatgtcaaaaagaaaccgaagttgataaatgcaagtgatgaagcaagtacaattacctctaagtcttctgaaccagacgaaggtgattgatgcaagcattgtgtatgatccttggacaagggaatcacggatgtttggttttgtcaccatggctgctactaaggaggcagatcactgcatcaaatatctggactgttctgtgttgcaaggtcaggtcataattgtttagaagtactctacacagaacattttattgttttgtcttcaccaccgagaatccaagagcgcctcccatagcctccacatccacaaggtcctgcttgactgcgacgacgtccaggctgatgccctcatcgtggatcgactcgcctcgctctagaaggagtggcccctctggagttgaatatgcagttataaccaatttttaccccttttatcctagaagagttgccaagacacggtataagaccatgataatagactaagagaggatttgtctctaattattatatgttttatttatgcagtcccatgagaactttgagtatttgcagattgatttattaatatattaaagttaaagattgtatgtgttgagtatgtatccattcttgttggaagtgtcttgcaattccaatccaaggatgtataaaagactgcatgggctaagtatgtgttttttcatgtatttggagtatatatactttttgttgcttgagaacatgtatgtacatacatagaagcttgtcaattgtgtgaacttgagttgatccctgtctaacctgagtatatatatatattttgttgcttgagaacgagtatgtacaatagaggcttgacaattgtgtgaacttgagttgaacatgaattttgat

SEQ ID NO: 29040 - DNA, 2406 bp, Zea Mays
cccacgacgacccacgacgcctgcgtcggccctgcccgaactggcgtgcagagcagtgctccacgacgccgccaccacctgccccagcagcggcacgctccgacaacggcgaccatggcggtgcgggcgcggcggctggggagtctgttccctgctagatccagtagatggctgactcatcgaggccctccgtgaacatcatctgcgccggtcgtctgctcggctgcagtggattaggaggcttggtgtggaggcgctcagcagcgggtggaagttcccgtcaaggagtctgtcccgtcaaggagaccgtcgtgccctggacggagtcagagcaagagtcgatcaacattttcctcacgatgattgagcgacacaggcacaattcaccatgatcccatcccccactcaaacctgcaaaatcctgtagccgaacatctcgatggtctcacgtgccattcctttctacaggaataggcctataactgatttcaataagtttatgctgcatttcattcagtgtgtttggatgcatatagagaacacgaagtttaatgtgtttggtgcataatgagaattgaggaaatgggacattctagcatgctatgtgaattgtgaaaggctatagattaatgtgtacagcattttttatgttggaactgcctacatttatgttggtgccgctcccacgagcgcaccaggacgccggcttggaggtacttgcacacaagggtcgagctcggacgtcgtagcggtgcggagggcctcggccgtagcatgccccgccccgccgcgcatgcctgcgcggtcggtgtcccgcagcacccacaccgagtggcctgtcttcaaagtcgtcctcatcctctcctcctggctcaacgagaccatcaacgtctggatgttcatagacctgctcgggttcatgctgttcttcgacctcaccctggtgcacctcggccagtacttcaccaaggtgtctggtatgattgggcacctctcctgctccggcgaccgagctccaaccagggacgtctagcgctagcgcccaggacgcacgaccccctgctcctctatcctcagcgccgagcccctccgtcctgtttctggcagcgaaagcccagcccctgcggcaagctacctactcgatggaatgcccagccgcttgtcggatctacgcagcccctgcgcgacgtcacaaactccgaacggttatacgcgcctcacacaagcatgcgctgaatttctcgctttcccaaccctatcgttttttgggtgtgtatggttttcccaggcagtcaggcgggataacaagcagaggtttagtctgttggaggaagatggcgagctgttgatccgggcgaaccagggacacacactaaaaaaatatagtctggaggtgacctcaatgtaattcaattagtgatggaacatttgggagtctactcattatgtatttcttctatctggaaaaacactcaagggatctttgtttagaggatggagacctaaatctgaccgaccttcattggtggataaatatgcagaaaaagattgcaacgtgatccgggtgtcagagattcagaaggtcttggacatcgccgacgagcgtagcctcattgacaccatcttcttctgctacctcgggtgcaatgcaagctaaggtggtcgacaatggtgttcgcggcggcgaactcgcagcgcagccaggtgatgaagccatcgcgctcgtcgacgagccaggcgacgggctcggccacggcggtgccgggggccggcgaggcgatgacggcggcggtggaggccatcgccgtgcgtccctcaccactgcgggccgcagcatagcccagccagcaatgccgaggtccatcaccactgggaaccgtcgtccggaccctctcccatcccgcacccattcctgtcctctgtctctgcgatgcgcttagcgccctcaccacttccacctccccagcctggctagcagcggcggagggaagaagtaccccactctggctagcagcggcggtggcagctcagattagtacggcgctgccccttcttcccccacctgtctttggatctacaaccgcccacccgtcttcggagctgttgtattcctccccacttgcttatctattcctctcaaaatagtgatggatttcggtcctcggatttttaccaatcggacaaatccagtgaattatgttgagaaattgttatactgaatttagtggtaggttggtattacgacctgcaaaacttaggtttggttatatgtttctttactggcctgtaggtacgacgttcttacatactttaagtaccttgacacattgagagtattagaaggtgtctgatcaatttggatacttgctgatccaagccataggtatttgagcttgcaaagaggtg

SEQ ID NO: 29041 - DNA, 2374 bp, Zea Mays
cccacgacgacccacgacgcctgcgtcggccctgcccgaactggcgtgcagagcagtgctccacgacgccgccaccacctgccccagcagcggcacgctccgacaacggcgaccatggcggtgcgggcgcggcggctggggagtctgttccctgctagatccagtagatggctgactcatcgaggccctccgtgaacatcatctgcgccggtcgtctgctcggctgcagtggattaggaggcttggtgtggaggcgctcagcagcgggtggaagttcccgtcaaggagtctgtcccgtcaaggagaccgtcgtgccctggacggagtcagagcaagagtcgatcaacattttcctcacgatgattgagcgacacaggcacaattcaccatgatcccatcccccactcaaacctgcaaaatcctgtagccgaacatctcgatggtctcacgtgccattcctttctacaggaataggcctataactgatttcaataagtttatgctgcatttcattcagtgtgtttggatgcatatagagaacacgaagtttaatgtgtttggtgcataatgagaattgaggaaatgggacattctagcatgctatgtgaattgtgaaaggctatagattaatgtgtacagcattttttatgttggaactgcctacatttatgttggtgccgctcccacgagcgcaccaggacgccggcttggaggtacttgcacacaagggtcgagctcggacgtcgtagcggtgcggagggcctcggccgtagcatgccccgccccgccgcgcatgcctgcgcggtcggtgtcccgcagcacccacaccgagtggcctgtcttcaaagtcgtcctcatcctctcctcctggctcaacgagaccatcaacgtctggatgttcatagacctgctcgggttcatgctgttcttcgacctcaccctggtgcacctcggccagtacttcaccaaggtgtctggtatgattgggcacctctcctgctccggcgaccgagctccaaccagggacgtctagcgctagcgcccaggacgcacgaccccctgctcctctatcctcagcgccgagcccctccgtcctgtttctggcagcgaaagcccagcccctgcggcaagctacctactcgatggaatgcccagccgcttgtcggatctacgcagcccctgcgcgacgtcacaaactccggcagtcaggcgggataacaagcagaggtttagtctgttggaggaagatggcgagctgttgatccgggcgaaccagggacacacactaaaaaaatatagtctggaggtgacctcaatgtaattcaattagtgatggaacatttgggagtctactcattatgtatttcttctatctggaaaaacactcaagggatctttgtttagaggatggagacctaaatctgaccgaccttcattggtggataaatatgcagaaaaagaggagaccttcacctaaaaaacaaagatatatgttgaaatggttctttttaaaagattgcaacgtgatccgggtgtcagagattcagaaggtcttggacatcgccgacgagcgtagcctcattgacaccatcttcttctgctacctcgggtgcaatgcaagctaaggtggtcgacaatggtgttcgcggcggcgaactcgcagcgcagccaggtgatgaagccatcgcgctcgtcgacgagccaggcgacgggctcggccacggcggtgccgggggccggcgaggcgatgacggcggcggtggaggccatcgccgtgcgtccctcaccactgcgggccgcagcatagcccagccagcaatgccgaggtccatcaccactgggaaccgtcgtccggaccctctcccatcccgcacccattcctgtcctctgtctctgcgatgcgcttagcgccctcaccacttccacctccccagcctggctagcagcggcggagggaagaagtaccccactctggctagcagcggcggtggcagctcagattagtacggcgctgccccttcttcccccacctgtctttggatctacaaccgcccacccgtcttcggagctgttgtattcctccccacttgcttatctattcctctcaaaatagtgatggatttcggtcctcggatttttaccaatcggacaaatccagtgaattatgttgagaaattgttatactgaatttagtggtaggttggtattacgacctgcaaaacttaggtttggttatatgtttctttactggcctgtaggtacgacgttcttacatactttaagtaccttgacacattgagagtattagaaggtgtctgatcaatttggatacttgctgatccaagccataggtatttgagcttgcaaagaggtg

SEQ ID NO: 29042 - DNA, 2319 bp, Zea Mays
cccacgacgacccacgacgcctgcgtcggccctgcccgaactggcgtgcagagcagtgctccacgacgccgccaccacctgccccagcagcggcacgctccgacaacggcgaccatggcggtgcgggcgcggcggctggggagtctgttccctgctagatccagtagatggctgactcatcgaggccctccgtgaacatcatctgcgccggtcgtctgctcggctgcagtggattaggaggcttggtgtggaggcgctcagcagcgggtggaagttcccgtcaaggagtctgtcccgtcaaggagaccgtcgtgccctggacggagtcagagcaagagtcgatcaacattttcctcacgatgattgagcgacacaggcacaattcaccatgatcccatcccccactcaaacctgcaaaatcctgtagccgaacatctcgatggtctcacgtgccattcctttctacaggaataggcctataactgatttcaataagtttatgctgcatttcattcagtgtgtttggatgcatatagagaacacgaagtttaatgtgtttggtgcataatgagaattgaggaaatgggacattctagcatgctatgtgaattgtgaaaggctatagattaatgtgtacagcattttttatgttggaactgcctacatttatgttggtgccgctcccacgagcgcaccaggacgccggcttggaggtacttgcacacaagggtcgagctcggacgtcgtagcggtgcggagggcctcggccgtagcatgccccgccccgccgcgcatgcctgcgcggtcggtgtcccgcagcacccacaccgagtggcctgtcttcaaagtcgtcctcatcctctcctcctggctcaacgagaccatcaacgtctggatgttcatagacctgctcgggttcatgctgttcttcgacctcaccctggtgcacctcggccagtacttcaccaaggtgtctggtatgattgggcacctctcctgctccggcgaccgagctccaaccagggacgtctagcgctagcgcccaggacgcacgaccccctgctcctctatcctcagcgccgagcccctccgtcctgtttctggcagcgaaagcccagcccctgcggcaagctacctactcgatggaatgcccagccgcttgtcggatctacgcagcccctgcgcgacgtcacaaactccggcagtcaggcgggataacaagcagaggtttagtctgttggaggaagatggcgagctgttgatccgggcgaaccagggacacacactaaaaaaatatagtctggaggtgacctcaatgtaattcaattagtgatggaacatttgggagtctactcattatgtatttcttctatctggaaaaacactcaagggatctttgtttagaggatggagacctaaatctgaccgaccttcattggtggataaatatgcagaaaaagattgcaacgtgatccgggtgtcagagattcagaaggtcttggacatcgccgacgagcgtagcctcattgacaccatcttcttctgctacctcgggtgcaatgcaagctaaggtggtcgacaatggtgttcgcggcggcgaactcgcagcgcagccaggtgatgaagccatcgcgctcgtcgacgagccaggcgacgggctcggccacggcggtgccgggggccggcgaggcgatgacggcggcggtggaggccatcgccgtgcgtccctcaccactgcgggccgcagcatagcccagccagcaatgccgaggtccatcaccactgggaaccgtcgtccggaccctctcccatcccgcacccattcctgtcctctgtctctgcgatgcgcttagcgccctcaccacttccacctccccagcctggctagcagcggcggagggaagaagtaccccactctggctagcagcggcggtggcagctcagattagtacggcgctgccccttcttcccccacctgtctttggatctacaaccgcccacccgtcttcggagctgttgtattcctccccacttgcttatctattcctctcaaaatagtgatggatttcggtcctcggatttttaccaatcggacaaatccagtgaattatgttgagaaattgttatactgaatttagtggtaggttggtattacgacctgcaaaacttaggtttggttatatgtttctttactggcctgtaggtacgacgttcttacatactttaagtaccttgacacattgagagtattagaaggtgtctgatcaatttggatacttgctgatccaagccataggtatttgagcttgcaaagaggtg

SEQ ID NO: 29043 - DNA, 2928 bp, Zea Mays
cccacgacgacccacgacgcctgcgtcggccctgcccgaactggcgtgcagagcagtgctccacgacgccgccaccacctgccccagcagcggcacgctccgacaacggcgaccatggcggtgcgggcgcggcggctggggagtctgttccctgctagatccagtagatggctgactcatcgaggccctccgtgaacatcatctgcgccggtcgtctgctcggctgcagtggattaggaggcttggtgtggaggcgctcagcagcgggtggaagttcccgtcaaggagtctgtcccgtcaaggagaccgtcgtgccctggacggagtcagagcaagagtcgatcaacattttcctcacgatgattgagcgacacaggcacaattcaccatgatcccatcccccactcaaacctgcaaaatcctgtagccgaacatctcgatggtctcacgtgccattcctttctacaggaataggcctataactgatttcaataagtttatgctgcatttcattcagtgtgtttggatgcatatagagaacacgaagtttaatgtgtttggtgcataatgagaattgaggaaatgggacattctagcatgctatgtgaattgtgaaaggctatagattaatgtgtacagcattttttatgttggaactgcctacatttatgttggtgccgctcccacgagcgcaccaggacgccggcttggaggtacttgcacacaagggtcgagctcggacgtcgtagcggtgcggagggcctcggccgtagcatgccccgccccgccgcgcatgcctgcgcggtcggtgtcccgcagcacccacaccgagtggcctgtcttcaaagtcgtcctcatcctctcctcctggctcaacgagaccatcaacgtctggatgttcatagacctgctcgggttcatgctgttcttcgacctcaccctggtgcacctcggccagtacttcaccaaggtgtctggtatgattgggcacctctcctgctccggcgaccgagctccaaccagggacgtctagcgctagcgcccaggacgcacgaccccctgctcctctatcctcagcgccgagcccctccgtcctgtttctggcagcgaaagcccagcccctgcggcaagctacctactcgatggaatgcccagccgcttgtcggatctacgcagcccctgcgcgacgtcacaaactccggcagtcaggcgggataacaagcagaggtttagtctgttggaggaagatggcgagctgttgatccgggcgaaccagggacacacactaaaaaaatatagtctggaggtgacctcaatgtaattcaattagtgatggaacatttgggagtctactcattatgtatttcttctatctggaaaaacactcaagggatctttgtttagaggatggagacctaaatctgaccgaccttcattggtggataaatatgcagaaaaagaggagaccttcacctaaaaaacaaagatatatgttgaaatggttctttttaaaagattgcaacgtgatccgggtgtcagagattcagaaggtcttggacatcgccgacgagcgtagcctcattgacaccatcttcttctgctacctcgggtgcaatgcaaggttcctccaagagaatccagagtatgttgcacagggtgtaactttagctcagttttcgttccagatacctatacctctgcggcaggactatgtcaaaaagaaaccgaagttgataaatgcaagtgatgaagcaagtacaattacctctaagtcttctgaaccagacgaagtgaaccctatagcctgggcagttcctacaaaacatgagggcgatgccagtgaagaagcttctctcgccgatgagacacttgcatcagaagtagtgctaacccggaagaggaaaataggaagctctttgtcagtagagccaaaccatctctctgatgaacttgaaccaaagttggaggatgcttagaacggggagacgtctaactgaaaagtaaaagtgggcagcgtcgtgatgccaacttacccccctgccatggttttattggtcctctgcttgtttctcgttttccttgggagttagcttctctgttttatgtggtcgcacacggccttatttgtagtattacaccacaaaagctggctgacccccactgagggagggtgattgatgcaagcattgtgtatgatccttggacaagggaatcacggatgtttggttttgtcaccatggctgctactaaggaggcagatcactgcatcaaatatctggactgttctgtgttgcaagaacattttattgttttgtcttcaccaccgagaatccaagagcgcctcccatagcctccacatccacaaggtcctgcttgactgcgacgacgtccaggctgatgccctcatcgtggatcgactcgcctcgctctagaaggagtggcccctctggagttgaatatgcagttataaccaatttttaccccttttatcctagaagagttgccaagacacggtataagaccatgataatagactaagagaggatttgtctctaattattatatgttttatttatgcagtcccatgagaactttgagtatttgcagattgatttattaatatattaaagttaaagattgtatgtgttgagtatgtatccattcttgttggaagtgtcttgcaattccaatccaaggatgtataaaagactgcatgggctaagtatgtgttttttcatgtatttggagtatatatactttttgttgcttgagaacatgtatgtacatacatagaagcttgtcaattgtgtgaacttgagttgatccctgtctaacctgagtatatatatatattttgttgcttgagaacgagtatgtacaatagaggcttgacaattgtgtgaacttgagttgaacatgaattttgat

SEQ ID NO: 29044 - DNA, 2936 bp, Zea Mays
cccacgacgacccacgacgcctgcgtcggccctgcccgaactggcgtgcagagcagtgctccacgacgccgccaccacctgccccagcagcggcacgctccgacaacggcgaccatggcggtgcgggcgcggcggctggggagtctgttccctgctagatccagtagatggctgactcatcgaggccctccgtgaacatcatctgcgccggtcgtctgctcggctgcagtggattaggaggcttggtgtggaggcgctcagcagcgggtggaagttcccgtcaaggagtctgtcccgtcaaggagaccgtcgtgccctggacggagtcagagcaagagtcgatcaacattttcctcacgatgattgagcgacacaggcacaattcaccatgatcccatcccccactcaaacctgcaaaatcctgtagccgaacatctcgatggtctcacgtgccattcctttctacaggaataggcctataactgatttcaataagtttatgctgcatttcattcagtgtgtttggatgcatatagagaacacgaagtttaatgtgtttggtgcataatgagaattgaggaaatgggacattctagcatgctatgtgaattgtgaaaggctatagattaatgtgtacaggacgccggcttggaggtacttgcacacaagggtcgagctcggacgtcgtagcggtgcggagggcctcggccgtagcatgccccgccccgccgcgcatgcctgcgcggtcggtgtcccgcagcacccacaccgagtggcctgtcttcaaagtcgtcctcatcctctcctcctggctcaacgagaccatcaacgtctggatgttcatagacctgctcgggttcatgctgttcttcgacctcaccctggtgcacctcggccagtacttcaccaaggtgtctggtatgattgggcacctctcctgctccggcgaccgagctccaaccagggacgtctagcgctagcgcccaggacgcacgaccccctgctcctctatcctcagcgccgagcccctccgtcctgtttctggcagcgaaagcccagcccctgcggcaagctacctactcgatggaatgcccagccgcttgtcggatctacgcagcccctgcgcgacgtcacaaactccgaacggttatacgcgcctcacacaagcatgcgctgaatttctcgctttcccaaccctatcgttttttgggtgtgtatggttttcccaggcagtcaggcgggataacaagcagaggtttagtctgttggaggaagatggcgagctgttgatccgggcgaaccagggacacacactaaaaaaatatagtctggaggtgacctcaatgtaattcaattagtgatggaacatttgggagtctactcattatgtatttcttctatctggaaaaacactcaagggatctttgtttagaggatggagacctaaatctgaccgaccttcattggtggataaatatgcagaaaaagattgcaacgtgatccgggtgtcagagattcagaaggtcttggacatcgccgacgagcgtagcctcattgacaccatcttcttctgctacctcgggtgcaatgcaaggttcctccaagagaatccagagtatgttgcacagggtgtaactttagctcagttttcgttccagatacctatacctctgcggcaggactatgtcaaaaagaaaccgaagttgataaatgcaagtgatgaagcaagtacaattacctctaagtcttctgaaccagacgaagtgaaccctatagcctgggcagttcctacaaaacatgagggcgatgccagtgaagaagcttctctcgccgatgagacacttgcatcagaagtagtgctaacccggaagaggaaaataggaagctctttgtcagtagagccaaaccatctctctgatgaacttgaaccaaagttggaggatgcttagaacggggagacgtctaactgaaaagtaaaagtgggcagcgtcgtgatgccaacttacccccctgccatggttttattggtcctctgcttgtttctcgttttccttgggagttagcttctctgttttatgtggtcgcacacggccttatttgtagtattacaccacaaaagctggctgacccccactgagggagggtgattgatgcaagcattgtgtatgatccttggacaagggaatcacggatgtttggttttgtcaccatggctgctactaaggaggcagatcactgcatcaaatatctggactgttctgtgttgcaaggtcaggtcataattgtttagaagtactctacacagaacattttattgttttgtcttcaccaccgagaatccaagagcgcctcccatagcctccacatccacaaggtcctgcttgactgcgacgacgtccaggctgatgccctcatcgtggatcgactcgcctcgctctagaaggagtggcccctctggagttgaatatgcagttataaccaatttttaccccttttatcctagaagagttgccaagacacggtataagaccatgataatagactaagagaggatttgtctctaattattatatgttttatttatgcagtcccatgagaactttgagtatttgcagattgatttattaatatattaaagttaaagattgtatgtgttgagtatgtatccattcttgttggaagtgtcttgcaattccaatccaaggatgtataaaagactgcatgggctaagtatgtgttttttcatgtatttggagtatatatactttttgttgcttgagaacatgtatgtacatacatagaagcttgtcaattgtgtgaacttgagttgatccctgtctaacctgagtatatatatatattttgttgcttgagaacgagtatgtacaatagaggcttgacaattgtgtgaacttgagttgaacatgaattttgat

SEQ ID NO: 29045 - DNA, 2767 bp, Zea Mays
cccacgacgacccacgacgcctgcgtcggccctgcccgaactggcgtgcagagcagtgctccacgacgccgccaccacctgccccagcagcggcacgctccgacaacggcgaccatggcggtgcgggcgcggcggctggggagtctgttccctgctagatccagtagatggctgactcatcgaggccctccgtgaacatcatctgcgccggtcgtctgctcggctgcagtggattaggaggcttggtgtggaggcgctcagcagcgggtggaagttcccgtcaaggagtctgtcccgtcaaggagaccgtcgtgccctggacggagtcagagcaagagtcgatcaacattttcctcacgatgattgagcgacacaggcacaattcaccatgatcccatcccccactcaaacctgcaaaatcctgtagccgaacatctcgatggtctcacgtgccattcctttctacaggaataggcctataactgatttcaataagtttatgctgcatttcattcagtgtgtttggatgcatatagagaacacgaagtttaatgtgtttggtgcataatgagaattgaggaaatgggacattctagcatgctatgtgaattgtgaaaggctatagattaatgtgtacagcattttttatgttggaactgcctacatttatgttggtgccgctcccacgagcgcaccaggacgccggcttggaggtacttgcacacaagggtcgagctcggacgtcgtagcggtgcggagggcctcggccgtagcatgccccgccccgccgcgcatgcctgcgcggtcggtgtcccgcagcacccacaccgagtggcctgtcttcaaagtcgtcctcatcctctcctcctggctcaacgagaccatcaacgtctggatgttcatagacctgctcgggttcatgctgttcttcgacctcaccctggtgcacctcggccagtacttcaccaaggtgtctggtatgattgggcacctctcctgctccggcgaccgagctccaaccagggacgtctagcgctagcgcccaggacgcacgaccccctgctcctctatcctcagcgccgagcccctccgtcctgtttctggcagcgaaagcccagcccctgcggcaagctacctactcgatggaatgcccagccgcttgtcggatctacgcagcccctgcgcgacgtcacaaactccggcagtcaggcgggataacaagcagaggtttagtctgttggaggaagatggcgagctgttgatccgggcgaaccagggacacacactaaaaaaatatagtctggaggtgacctcaatgtaattcaattagtgatggaacatttgggagtctactcattatgtatttcttctatctggaaaaacactcaagggatctttgtttagaggatggagacctaaatctgaccgaccttcattggtggataaatatgcagaaaaaggttcctccaagagaatccagagtatgttgcacagggtgtaactttagctcagttttcgttccagatacctatacctctgcggcaggactatgtcaaaaagaaaccgaagttgataaatgcaagtgatgaagcaagtacaattacctctaagtcttctgaaccagacgaagtgaaccctatagcctgggcagttcctacaaaacatgagggcgatgccagtgaagaagcttctctcgccgatgagacacttgcatcagaagtagtgctaacccggaagaggaaaataggaagctctttgtcagtagagccaaaccatctctctgatgaacttgaaccaaagttggaggatgcttagaacggggagacgtctaactgaaaagtaaaagtgggcagcgtcgtgatgccaacttacccccctgccatggttttattggtcctctgcttgtttctcgttttccttgggagttagcttctctgttttatgtggtcgcacacggccttatttgtagtattacaccacaaaagctggctgacccccactgagggagggtgattgatgcaagcattgtgtatgatccttggacaagggaatcacggatgtttggttttgtcaccatggctgctactaaggaggcagatcactgcatcaaatatctggactgttctgtgttgcaagaacattttattgttttgtcttcaccaccgagaatccaagagcgcctcccatagcctccacatccacaaggtcctgcttgactgcgacgacgtccaggctgatgccctcatcgtggatcgactcgcctcgctctagaaggagtggcccctctggagttgaatatgcagttataaccaatttttaccccttttatcctagaagagttgccaagacacggtataagaccatgataatagactaagagaggatttgtctctaattattatatgttttatttatgcagtcccatgagaactttgagtatttgcagattgatttattaatatattaaagttaaagattgtatgtgttgagtatgtatccattcttgttggaagtgtcttgcaattccaatccaaggatgtataaaagactgcatgggctaagtatgtgttttttcatgtatttggagtatatatactttttgttgcttgagaacatgtatgtacatacatagaagcttgtcaattgtgtgaacttgagttgatccctgtctaacctgagtatatatatatattttgttgcttgagaacgagtatgtacaatagaggcttgacaattgtgtgaacttgagttgaacatgaattttgat

SEQ ID NO: 29046 - DNA, 2824 bp, Zea Mays
cccacgacgacccacgacgcctgcgtcggccctgcccgaactggcgtgcagagcagtgctccacgacgccgccaccacctgccccagcagcggcacgctccgacaacggcgaccatggcggtgcgggcgcggcggctggggagtctgttccctgctagatccagtagatggctgactcatcgaggccctccgtgaacatcatctgcgccggtcgtctgctcggctgcagtggattaggaggcttggtgtggaggcgctcagcagcgggtggaagttcccgtcaaggagtctgtcccgtcaaggagaccgtcgtgccctggacggagtcagagcaagagtcgatcaacattttcctcacgatgattgagcgacacaggcacaattcaccatgatcccatcccccactcaaacctgcaaaatcctgtagccgaacatctcgatggtctcacgtgccattcctttctacaggaataggcctataactgatttcaataagtttatgctgcatttcattcagtgtgtttggatgcatatagagaacacgaagtttaatgtgtttggtgcataatgagaattgaggaaatgggacattctagcatgctatgtgaattgtgaaaggctatagattaatgtgtacagcattttttatgttggaactgcctacatttatgttggtgccgctcccacgagcgcaccaggacgccggcttggaggtacttgcacacaagggtcgagctcggacgtcgtagcggtgcggagggcctcggccgtagcatgccccgccccgccgcgcatgcctgcgcggtcggtgtcccgcagcacccacaccgagtggcctgtcttcaaagtcgtcctcatcctctcctcctggctcaacgagaccatcaacgtctggatgttcatagacctgctcgggttcatgctgttcttcgacctcaccctggtgcacctcggccagtacttcaccaaggtgtctggtatgattgggcacctctcctgccattgctcccttcgtccccagctccggcgaccgagctccaaccagggacgtctagcgctagcgcccaggacgcacgaccccctgctcctctatcctcagcgccgagcccctccgtcctgtttctggcagcgaaagcccagcccctgcggcaagctacctactcgatggaatgcccagccgcttgtcggatctacgcagcccctgcgcgacgtcacaaactccggcagtcaggcgggataacaagcagaggtttagtctgttggaggaagatggcgagctgttgatccgggcgaaccagggacacacactaaaaaaatatagtctggaggtgacctcaatgtaattcaattagtgatggaacatttgggagtctactcattatgtatttcttctatctggaaaaacactcaagggatctttgtttagaggatggagacctaaatctgaccgaccttcattggtggataaatatgcagaaaaaggttcctccaagagaatccagagtatgttgcacagggtgtaactttagctcagttttcgttccagatacctatacctctgcggcaggactatgtcaaaaagaaaccgaagttgataaatgcaagtgatgaagcaagtacaattacctctaagtcttctgaaccagacgaagtgaaccctatagcctgggcagttcctacaaaacatgagggcgatgccagtgaagaagcttctctcgccgatgagacacttgcatcagaagtagtgctaacccggaagaggaaaataggaagctctttgtcagtagagccaaaccatctctctgatgaacttgaaccaaagttggaggatgcttagaacggggagacgtctaactgaaaagtaaaagtgggcagcgtcgtgatgccaacttacccccctgccatggttttattggtcctctgcttgtttctcgttttccttgggagttagcttctctgttttatgtggtcgcacacggccttatttgtagtattacaccacaaaagctggctgacccccactgagggagggtgattgatgcaagcattgtgtatgatccttggacaagggaatcacggatgtttggttttgtcaccatggctgctactaaggaggcagatcactgcatcaaatatctggactgttctgtgttgcaaggtcaggtcataattgtttagaagtactctacacagaacattttattgttttgtcttcaccaccgagaatccaagagcgcctcccatagcctccacatccacaaggtcctgcttgactgcgacgacgtccaggctgatgccctcatcgtggatcgactcgcctcgctctagaaggagtggcccctctggagttgaatatgcagttataaccaatttttaccccttttatcctagaagagttgccaagacacggtataagaccatgataatagactaagagaggatttgtctctaattattatatgttttatttatgcagtcccatgagaactttgagtatttgcagattgatttattaatatattaaagttaaagattgtatgtgttgagtatgtatccattcttgttggaagtgtcttgcaattccaatccaaggatgtataaaagactgcatgggctaagtatgtgttttttcatgtatttggagtatatatactttttgttgcttgagaacatgtatgtacatacatagaagcttgtcaattgtgtgaacttgagttgatccctgtctaacctgagtatatatatatattttgttgcttgagaacgagtatgtacaatagaggcttgacaattgtgtgaacttgagttgaacatgaattttgat

SEQ ID NO: 29047 - DNA, 3800 bp, Zea Mays
cccacgacgacccacgacgcctgcgtcggccctgcccgaactggcgtgcagagcagtgctccacgacgccgccaccacctgccccagcagcggcacgctccgacaacggcgaccatggcggtgcgggcgcggcggctggggagtctgttccctgctagatccagtagatggctgactcatcgaggccctccgtgaacatcatctgcgccggtcgtctgctcggctgcagtggattaggaggcttggtgtggaggcgctcagcagcgggtggaagttcccgtcaaggagtctgtcccgtcaaggagaccgtcgtgccctggacggagtcagagcaagagtcgatcaacattttcctcacgatgattgagcgacacaggcacaattcaccatgatcccatcccccactcaaacctgcaaaatcctgtagccgaacatctcgatggtctcacgtgccattcctttctacaggaataggcctataactgatttcaataagtttatgctgcatttcattcagtgtgtttggatgcatatagagaacacgaagtttaatgtgtttggtgcataatgagaattgaggaaatgggacattctagcatgctatgtgaattgtgaaaggctatagattaatgtgtacagcattttttatgttggaactgcctacatttatgttggtgccgctcccacgagcgcaccaggacgccggcttggaggtacttgcacacaagggtcgagctcggacgtcgtagcggtgcggagggcctcggccgtagcatgccccgccccgccgcgcatgcctgcgcggtcggtgtcccgcagcacccacaccgagtggcctgtcttcaaagtcgtcctcatcctctcctcctggctcaacgagaccatcaacgtctggatgttcatagacctgctcgggttcatgctgttcttcgacctcaccctggtgcacctcggccagtacttcaccaaggtgtctggtatgattgggcacctctcctgctccggcgaccgagctccaaccagggacgtctagcgctagcgcccaggacgcacgaccccctgctcctctatcctcagcgccgagcccctccgtcctgtttctggcagcgaaagcccagcccctgcggcaagctacctactcgatggaatgcccagccgcttgtcggatctacgcagcccctgcgcgacgtcacaaactccgaacggttatacgcgcctcacacaagcatgcgctgaatttctcgctttcccaaccctatcgttttttgggtgtgtatggttttcccaggcagtcaggcgggataacaagcagaggtttagtctgttggaggaagatggcgagctgttgatccgggcgaaccagggacacacactaaaaaaatatagtctggaggtgacctcaatgtaattcaattagtgatggaacatttgggagtctactcattatgtatttcttctatctggaaaaacactcaagggatctttgtttagaggatggagacctaaatctgaccgaccttcattggtggataaatatgcagaaaaagaggagaccttcacctaaaaaacaaagatatatgttgaaatggttctttttaaaagattgcaacgtgatccgggtgtcagagattcagaaggtcttggacatcgccgacgagcgtagcctcattgacaccatcttcttctgctacctcgggtgcaatgcaagctaaggtggtcgacaatggtgttcgcggcggcgaactcgcagcgcagccaggtgatgaagccatcgcgctcgtcgacgagccaggcgacgggctcggccacggcggtgccgggggccggcgaggcgatgacggcggcggtggaggccatcgccgtgcgtccctcaccactgcgggccgcagcatagcccagccagcaatgccgaggtccatcaccactgggaaccgtcgtccggaccctctcccatcccgcacccattcctgtcctctgtctctgcgatgcgcttagcgccctcaccacttccacctccccagcctggctagcagcggcggagggaagaagtaccccactctggctagcagcggcggtggcagctcagattagtacggcgctgccccttcttcccccacctgtctttggatctacaaccgcccacccgtcttcggagctgttgtattcctccccacttgcttatctattcctctcaaaatagtgatggatttcggtcctcggatttttaccaatcggacaaatccagtgaattatgttgagaaattgttatactgaatttagtggtaggttggtattacgacctgcaaaacttaggtttggttatatgtttctttactggcctgtaggtacgacgttcttacatactttaagtaccttgacacattgagagtattagaaggtgtctgatcaatttggatacttgctgatccaagccataggtatttgagcttgcaaagaggttcctccaagagaatccagagtatgttgcacagggtgtaactttagctcagttttcgttccagatacctatacctctgcggcaggactatgtcaaaaagaaaccgaagttgataaatgcaagtgatgaagcaagtacaattacctctaagtcttctgaaccagacgaagtgaaccctatagcctgggcagttcctacaaaacatgagggcgatgccagtgaagaagcttctctcgccgatgagacacttgcatcagaagtagtgctaacccggaagaggaaaataggaagctctttgtcagtagagccaaaccatctctctgatgaacttgaaccaaagttggaggatgcttagaacggggagacgtctaactgaaaagtaaaagtgggcagcgtcgtgatgccaacttacccccctgccatggttttattggtcctctgcttgtttctcgttttccttgggagttagcttctctgttttatgtggtcgcacacggccttatttgtagtattacaccacaaaagctggctgacccccactgagggagggtgattgatgcaagcattgtgtatgatccttggacaagggaatcacggatgtttggttttgtcaccatggctgctactaaggaggcagatcactgcatcaaatatctggactgttctgtgttgcaaggtcaggtcataattgtttagaagtactctacacagaacattttattgttttgtcttcaccaccgagaatccaagagcgcctcccatagcctccacatccacaaggtcctgcttgactgcgacgacgtccaggctgatgccctcatcgtggatcgactcgcctcgctctagaaggagtggcccctctggagttgaatatgcagttataaccaatttttaccccttttatcctagaagagttgccaagacacggtataagaccatgataatagactaagagaggatttgtctctaattattatatgttttatttatgcagtcccatgagaactttgagtatttgcagattgatttattaatatattaaagttaaagattgtatgtgttgagtatgtatccattcttgttggaagtgtcttgcaattccaatccaaggatgtataaaagactgcatgggctaagtatgtgttttttcatgtatttggagtatatatactttttgttgcttgagaacatgtatgtacatacatagaagcttgtcaattgtgtgaacttgagttgatccctgtctaacctgagtatatatatatattttgttgcttgagaacgagtatgtacaatagaggcttgacaattgtgtgaacttgagttgaacatgaattttgat

SEQ ID NO: 29048 - DNA, 2991 bp, Zea Mays
cccacgacgacccacgacgcctgcgtcggccctgcccgaactggcgtgcagagcagtgctccacgacgccgccaccacctgccccagcagcggcacgctccgacaacggcgaccatggcggtgcgggcgcggcggctggggagtctgttccctgctagatccagtagatggctgactcatcgaggccctccgtgaacatcatctgcgccggtcgtctgctcggctgcagtggattaggaggcttggtgtggaggcgctcagcagcgggtggaagttcccgtcaaggagtctgtcccgtcaaggagaccgtcgtgccctggacggagtcagagcaagagtcgatcaacattttcctcacgatgattgagcgacacaggcacaattcaccatgatcccatcccccactcaaacctgcaaaatcctgtagccgaacatctcgatggtctcacgtgccattcctttctacaggaataggcctataactgatttcaataagtttatgctgcatttcattcagtgtgtttggatgcatatagagaacacgaagtttaatgtgtttggtgcataatgagaattgaggaaatgggacattctagcatgctatgtgaattgtgaaaggctatagattaatgtgtacaggtgggaattcattatcggtttactaattatatagctgtttttccctattatctctctcaatttactgtgtataatgtactactaatctggaaattgatgtatgatagcattttttatgttggaactgcctacatttatgttggtgccgctcccacgagcgcaccaggacgccggcttggaggtacttgcacacaagggtcgagctcggacgtcgtagcggtgcggagggcctcggccgtagcatgccccgccccgccgcgcatgcctgcgcggtcggtgtcccgcagcacccacaccgagtggcctgtcttcaaagtcgtcctcatcctctcctcctggctcaacgagaccatcaacgtctggatgttcatagacctgctcgggttcatgctgttcttcgacctcaccctggtgcacctcggccagtacttcaccaaggtgtctggtatgattgggcacctctcctgctccggcgaccgagctccaaccagggacgtctagcgctagcgcccaggacgcacgaccccctgctcctctatcctcagcgccgagcccctccgtcctgtttctggcagcgaaagcccagcccctgcggcaagctacctactcgatggaatgcccagccgcttgtcggatctacgcagcccctgcgcgacgtcacaaactccggcagtcaggcgggataacaagcagaggtttagtctgttggaggaagatggcgagctgttgatccgggcgaaccagggacacacactaaaaaaatatagtctggaggtgacctcaatgtaattcaattagtgatggaacatttgggagtctactcattatgtatttcttctatctggaaaaacactcaagggatctttgtttagaggatggagacctaaatctgaccgaccttcattggtggataaatatgcagaaaaagagattcagaaggtcttggacatcgccgacgagcgtagcctcattgacaccatcttcttctgctacctcgggtgcaatgcaaggttcctccaagagaatccagagtatgttgcacagggtgtaactttagctcagttttcgttccagatacctatacctctgcggcaggactatgtcaaaaagaaaccgaagttgataaatgcaagtgatgaagcaagtacaattacctctaagtcttctgaaccagacgaagtgaaccctatagcctgggcagttcctacaaaacatgagggcgatgccagtgaagaagcttctctcgccgatgagacacttgcatcagaagtagtgctaacccggaagaggaaaataggaagctctttgtcagtagagccaaaccatctctctgatgaacttgaaccaaagttggaggatgcttagaacggggagacgtctaactgaaaagtaaaagtgggcagcgtcgtgatgccaacttacccccctgccatggttttattggtcctctgcttgtttctcgttttccttgggagttagcttctctgttttatgtggtcgcacacggccttatttgtagtattacaccacaaaagctggctgacccccactgagggagggtgattgatgcaagcattgtgtatgatccttggacaagggaatcacggatgtttggttttgtcaccatggctgctactaaggaggcagatcactgcatcaaatatctggactgttctgtgttgcaaggtcaggtcataattgtttagaagtactctacacagaacattttattgttttgtcttcaccaccgagaatccaagagcgcctcccatagcctccacatccacaaggtcctgcttgactgcgacgacgtccaggctgatgccctcatcgtggatcgactcgcctcgctctagaaggagtggcccctctggagttgaatatgcagttataaccaatttttaccccttttatcctagaagagttgccaagacacggtataagaccatgataatagactaagagaggatttgtctctaattattatatgttttatttatgcagtcccatgagaactttgagtatttgcagattgatttattaatatattaaagttaaagattgtatgtgttgagtatgtatccattcttgttggaagtgtcttgcaattccaatccaaggatgtataaaagactgcatgggctaagtatgtgttttttcatgtatttggagtatatatactttttgttgcttgagaacatgtatgtacatacatagaagcttgtcaattgtgtgaacttgagttgatccctgtctaacctgagtatatatatatattttgttgcttgagaacgagtatgtacaatagaggcttgacaattgtgtgaacttgagttgaacatgaattttgat

SEQ ID NO: 29049 - DNA, 3038 bp, Zea Mays
cccacgacgacccacgacgcctgcgtcggccctgcccgaactggcgtgcagagcagtgctccacgacgccgccaccacctgccccagcagcggcacgctccgacaacggcgaccatggcggtgcgggcgcggcggctggggagtctgttccctgctagatccagtagatggctgactcatcgaggccctccgtgaacatcatctgcgccggtcgtctgctcggctgcagtggattaggaggcttggtgtggaggcgctcagcagcgggtggaagttcccgtcaaggagtctgtcccgtcaaggagaccgtcgtgccctggacggagtcagagcaagagtcgatcaacattttcctcacgatgattgagcgacacaggcacaattcaccatgatcccatcccccactcaaacctgcaaaatcctgtagccgaacatctcgatggtctcacgtgccattcctttctacaggaataggcctataactgatttcaataagtttatgctgcatttcattcagtgtgtttggatgcatatagagaacacgaagtttaatgtgtttggtgcataatgagaattgaggaaatgggacattctagcatgctatgtgaattgtgaaaggctatagattaatgtgtacagcattttttatgttggaactgcctacatttatgttggtgccgctcccacgagcgcaccaggacgccggcttggaggtacttgcacacaagggtcgagctcggacgtcgtagcggtgcggagggcctcggccgtagcatgccccgccccgccgcgcatgcctgcgcggtcggtgtcccgcagcacccacaccgagtggcctgtcttcaaagtcgtcctcatcctctcctcctggctcaacgagaccatcaacgtctggatgttcatagacctgctcgggttcatgctgttcttcgacctcaccctggtgcacctcggccagtacttcaccaaggtgtctggtatgattgggcacctctcctgctccggcgaccgagctccaaccagggacgtctagcgctagcgcccaggacgcacgaccccctgctcctctatcctcagcgccgagcccctccgtcctgtttctggcagcgaaagcccagcccctgcggcaagctacctactcgatggaatgcccagccgcttgtcggatctacgcagcccctgcgcgacgtcacaaactccgaacggttatacgcgcctcacacaagcatgcgctgaatttctcgctttcccaaccctatcgttttttgggtgtgtatggttttcccaggcagtcaggcgggataacaagcagaggtttagtctgttggaggaagatggcgagctgttgatccgggcgaaccagggacacacactaaaaaaatatagtctggaggtgacctcaatgtaattcaattagtgatggaacatttgggagtctactcattatgtatttcttctatctggaaaaacactcaagggatctttgtttagaggatggagacctaaatctgaccgaccttcattggtggataaatatgcagaaaaagaggagaccttcacctaaaaaacaaagatatatgttgaaatggttctttttaaaagattgcaacgtgatccgggtgtcagagattcagaaggtcttggacatcgccgacgagcgtagcctcattgacaccatcttcttctgctacctcgggtgcaatgcaaggttcctccaagagaatccagagtatgttgcacagggtgtaactttagctcagttttcgttccagatacctatacctctgcggcaggactatgtcaaaaagaaaccgaagttgataaatgcaagtgatgaagcaagtacaattacctctaagtcttctgaaccagacgaagtgaaccctatagcctgggcagttcctacaaaacatgagggcgatgccagtgaagaagcttctctcgccgatgagacacttgcatcagaagtagtgctaacccggaagaggaaaataggaagctctttgtcagtagagccaaaccatctctctgatgaacttgaaccaaagttggaggatgcttagaacggggagacgtctaactgaaaagtaaaagtgggcagcgtcgtgatgccaacttacccccctgccatggttttattggtcctctgcttgtttctcgttttccttgggagttagcttctctgttttatgtggtcgcacacggccttatttgtagtattacaccacaaaagctggctgacccccactgagggagggtgattgatgcaagcattgtgtatgatccttggacaagggaatcacggatgtttggttttgtcaccatggctgctactaaggaggcagatcactgcatcaaatatctggactgttctgtgttgcaaggtcaggtcataattgtttagaagaacattttattgttttgtcttcaccaccgagaatccaagagcgcctcccatagcctccacatccacaaggtcctgcttgactgcgacgacgtccaggctgatgccctcatcgtggatcgactcgcctcgctctagaaggagtggcccctctggagttgaatatgcagttataaccaatttttaccccttttatcctagaagagttgccaagacacggtataagaccatgataatagactaagagaggatttgtctctaattattatatgttttatttatgcagtcccatgagaactttgagtatttgcagattgatttattaatatattaaagttaaagattgtatgtgttgagtatgtatccattcttgttggaagtgtcttgcaattccaatccaaggatgtataaaagactgcatgggctaagtatgtgttttttcatgtatttggagtatatatactttttgttgcttgagaacatgtatgtacatacatagaagcttgtcaattgtgtgaacttgagttgatccctgtctaacctgagtatatatatatattttgttgcttgagaacgagtatgtacaatagaggcttgacaattgtgtgaacttgagttgaacatgaattttgat

SEQ ID NO: 29050 - DNA, 3002 bp, Zea Mays
cccacgacgacccacgacgcctgcgtcggccctgcccgaactggcgtgcagagcagtgctccacgacgccgccaccacctgccccagcagcggcacgctccgacaacggcgaccatggcggtgcgggcgcggcggctggggagtctgttccctgctagatccagtagatggctgactcatcgaggccctccgtgaacatcatctgcgccggtcgtctgctcggctgcagtggattaggaggcttggtgtggaggcgctcagcagcgggtggaagttcccgtcaaggagtctgtcccgtcaaggagaccgtcgtgccctggacggagtcagagcaagagtcgatcaacattttcctcacgatgattgagcgacacaggcacaattcaccatgatcccatcccccactcaaacctgcaaaatcctgtagccgaacatctcgatggtctcacgtgccattcctttctacaggaataggcctataactgatttcaataagtttatgctgcatttcattcagtgtgtttggatgcatatagagaacacgaagtttaatgtgtttggtgcataatgagaattgaggaaatgggacattctagcatgctatgtgaattgtgaaaggctatagattaatgtgtacaggtgggaattcattatcggtttactaattatatagctgtttttccctattatctctctcaatttactgtgtataatgtactactaatctggaaattgatgtatgatagcattttttatgttggaactgcctacatttatgttggtgccgctcccacgagcgcaccaggacgccggcttggaggtacttgcacacaagggtcgagctcggacgtcgtagcggtgcggagggcctcggccgtagcatgccccgccccgccgcgcatgcctgcgcggtcggtgtcccgcagcacccacaccgagtggcctgtcttcaaagtcgtcctcatcctctcctcctggctcaacgagaccatcaacgtctggatgttcatagacctgctcgggttcatgctgttcttcgacctcaccctggtgcacctcggccagtacttcaccaaggtgtctggtatgattgggcacctctcctgccattgctcccttcgtccccagctccggcgaccgagctccaaccagggacgtctagcgctagcgcccaggacgcacgaccccctgctcctctatcctcagcgccgagcccctccgtcctgtttctggcagcgaaagcccagcccctgcggcaagctacctactcgatggaatgcccagccgcttgtcggatctacgcagcccctgcgcgacgtcacaaactccggcagtcaggcgggataacaagcagaggtttagtctgttggaggaagatggcgagctgttgatccgggcgaaccagggacacacactaaaaaaatatagtctggaggtgacctcaatgtaattcaattagtgatggaacatttgggagtctactcattatgtatttcttctatctggaaaaacactcaagggatctttgtttagaggatggagacctaaatctgaccgaccttcattggtggataaatatgcagaaaaagattgcaacgtgatccgggtgtcagagattcagaaggtcttggacatcgccgacgagcgtagcctcattgacaccatcttcttctgctacctcgggtgcaatgcaaggttcctccaagagaatccagagtatgttgcacagggtgtaactttagctcagttttcgttccagatacctatacctctgcggcaggactatgtcaaaaagaaaccgaagttgataaatgcaagtgatgaagcaagtacaattacctctaagtcttctgaaccagacgaagtgaaccctatagcctgggcagttcctacaaaacatgagggcgatgccagtgaagaagcttctctcgccgatgagacacttgcatcagaagtagtgctaacccggaagaggaaaataggaagctctttgtcagtagagccaaaccatctctctgatgaacttgaaccaaagttggaggatgcttagaacggggagacgtctaactgaaaagtaaaagtgggcagcgtcgtgatgccaacttacccccctgccatggttttattggtcctctgcttgtttctcgttttccttgggagttagcttctctgttttatgtggtcgcacacggccttatttgtagtattacaccacaaaagctggctgacccccactgagggagggtgattgatgcaagcattgtgtatgatccttggacaagggaatcacggatgtttggttttgtcaccatggctgctactaaggaggcagatcactgcatcaaatatctggactgttctgtgttgcaagaacattttattgttttgtcttcaccaccgagaatccaagagcgcctcccatagcctccacatccacaaggtcctgcttgactgcgacgacgtccaggctgatgccctcatcgtggatcgactcgcctcgctctagaaggagtggcccctctggagttgaatatgcagttataaccaatttttaccccttttatcctagaagagttgccaagacacggtataagaccatgataatagactaagagaggatttgtctctaattattatatgttttatttatgcagtcccatgagaactttgagtatttgcagattgatttattaatatattaaagttaaagattgtatgtgttgagtatgtatccattcttgttggaagtgtcttgcaattccaatccaaggatgtataaaagactgcatgggctaagtatgtgttttttcatgtatttggagtatatatactttttgttgcttgagaacatgtatgtacatacatagaagcttgtcaattgtgtgaacttgagttgatccctgtctaacctgagtatatatatatattttgttgcttgagaacgagtatgtacaatagaggcttgacaattgtgtgaacttgagttgaacatgaattttgat

SEQ ID NO: 29051 - DNA, 3070 bp, Zea Mays
cccacgacgacccacgacgcctgcgtcggccctgcccgaactggcgtgcagagcagtgctccacgacgccgccaccacctgccccagcagcggcacgctccgacaacggcgaccatggcggtgcgggcgcggcggctggggagtctgttccctgctagatccagtagatggctgactcatcgaggccctccgtgaacatcatctgcgccggtcgtctgctcggctgcagtggattaggaggcttggtgtggaggcgctcagcagcgggtggaagttcccgtcaaggagtctgtcccgtcaaggagaccgtcgtgccctggacggagtcagagcaagagtcgatcaacattttcctcacgatgattgagcgacacaggcacaattcaccatgatcccatcccccactcaaacctgcaaaatcctgtagccgaacatctcgatggtctcacgtgccattcctttctacaggaataggcctataactgatttcaataagtttatgctgcatttcattcagtgtgtttggatgcatatagagaacacgaagtttaatgtgtttggtgcataatgagaattgaggaaatgggacattctagcatgctatgtgaattgtgaaaggctatagattaatgtgtacaggtgggaattcattatcggtttactaattatatagctgtttttccctattatctctctcaatttactgtgtataatgtactactaatctggaaattgatgtatgatagcattttttatgttggaactgcctacatttatgttggtgccgctcccacgagcgcaccaggacgccggcttggaggtacttgcacacaagggtcgagctcggacgtcgtagcggtgcggagggcctcggccgtagcatgccccgccccgccgcgcatgcctgcgcggtcggtgtcccgcagcacccacaccgagtggcctgtcttcaaagtcgtcctcatcctctcctcctggctcaacgagaccatcaacgtctggatgttcatagacctgctcgggttcatgctgttcttcgacctcaccctggtgcacctcggccagtacttcaccaaggtgtctggtatgattgggcacctctcctgctccggcgaccgagctccaaccagggacgtctagcgctagcgcccaggacgcacgaccccctgctcctctatcctcagcgccgagcccctccgtcctgtttctggcagcgaaagcccagcccctgcggcaagctacctactcgatggaatgcccagccgcttgtcggatctacgcagcccctgcgcgacgtcacaaactccggcagtcaggcgggataacaagcagaggtttagtctgttggaggaagatggcgagctgttgatccgggcgaaccagggacacacactaaaaaaatatagtctggaggtgacctcaatgtaattcaattagtgatggaacatttgggagtctactcattatgtatttcttctatctggaaaaacactcaagggatctttgtttagaggatggagacctaaatctgaccgaccttcattggtggataaatatgcagaaaaagaggagaccttcacctaaaaaacaaagatatatgttgaaatggttctttttaaaagattgcaacgtgatccgggtgtcagagattcagaaggtcttggacatcgccgacgagcgtagcctcattgacaccatcttcttctgctacctcgggtgcaatgcaaggttcctccaagagaatccagagtatgttgcacagggtgtaactttagctcagttttcgttccagatacctatacctctgcggcaggactatgtcaaaaagaaaccgaagttgataaatgcaagtgatgaagcaagtacaattacctctaagtcttctgaaccagacgaagtgaaccctatagcctgggcagttcctacaaaacatgagggcgatgccagtgaagaagcttctctcgccgatgagacacttgcatcagaagtagtgctaacccggaagaggaaaataggaagctctttgtcagtagagccaaaccatctctctgatgaacttgaaccaaagttggaggatgcttagaacggggagacgtctaactgaaaagtaaaagtgggcagcgtcgtgatgccaacttacccccctgccatggttttattggtcctctgcttgtttctcgttttccttgggagttagcttctctgttttatgtggtcgcacacggccttatttgtagtattacaccacaaaagctggctgacccccactgagggagggtgattgatgcaagcattgtgtatgatccttggacaagggaatcacggatgtttggttttgtcaccatggctgctactaaggaggcagatcactgcatcaaatatctggactgttctgtgttgcaaggtcaggtcataattgtttagaagtactctacacagaacattttattgttttgtcttcaccaccgagaatccaagagcgcctcccatagcctccacatccacaaggtcctgcttgactgcgacgacgtccaggctgatgccctcatcgtggatcgactcgcctcgctctagaaggagtggcccctctggagttgaatatgcagttataaccaatttttaccccttttatcctagaagagttgccaagacacggtataagaccatgataatagactaagagaggatttgtctctaattattatatgttttatttatgcagtcccatgagaactttgagtatttgcagattgatttattaatatattaaagttaaagattgtatgtgttgagtatgtatccattcttgttggaagtgtcttgcaattccaatccaaggatgtataaaagactgcatgggctaagtatgtgttttttcatgtatttggagtatatatactttttgttgcttgagaacatgtatgtacatacatagaagcttgtcaattgtgtgaacttgagttgatccctgtctaacctgagtatatatatatattttgttgcttgagaacgagtatgtacaatagaggcttgacaattgtgtgaacttgagttgaacatgaattttgat

SEQ ID NO: 29052 - DNA, 3077 bp, Zea Mays
cccacgacgacccacgacgcctgcgtcggccctgcccgaactggcgtgcagagcagtgctccacgacgccgccaccacctgccccagcagcggcacgctccgacaacggcgaccatggcggtgcgggcgcggcggctggggagtctgttccctgctagatccagtagatggctgactcatcgaggccctccgtgaacatcatctgcgccggtcgtctgctcggctgcagtggattaggaggcttggtgtggaggcgctcagcagcgggtggaagttcccgtcaaggagtctgtcccgtcaaggagaccgtcgtgccctggacggagtcagagcaagagtcgatcaacattttcctcacgatgattgagcgacacaggcacaattcaccatgatcccatcccccactcaaacctgcaaaatcctgtagccgaacatctcgatggtctcacgtgccattcctttctacaggaataggcctataactgatttcaataagtttatgctgcatttcattcagtgtgtttggatgcatatagagaacacgaagtttaatgtgtttggtgcataatgagaattgaggaaatgggacattctagcatgctatgtgaattgtgaaaggctatagattaatgtgtacagcattttttatgttggaactgcctacatttatgttggtgccgctcccacgagcgcaccaggacgccggcttggaggtacttgcacacaagggtcgagctcggacgtcgtagcggtgcggagggcctcggccgtagcatgccccgccccgccgcgcatgcctgcgcggtcggtgtcccgcagcacccacaccgagtggcctgtcttcaaagtcgtcctcatcctctcctcctggctcaacgagaccatcaacgtctggatgttcatagacctgctcgggttcatgctgttcttcgacctcaccctggtgcacctcggccagtacttcaccaaggtgtctggtatgattgggcacctctcctgctccggcgaccgagctccaaccagggacgtctagcgctagcgcccaggacgcacgaccccctgctcctctatcctcagcgccgagcccctccgtcctgtttctggcagcgaaagcccagcccctgcggcaagctacctactcgatggaatgcccagccgcttgtcggatctacgcagcccctgcgcgacgtcacaaactccggcagtcaggcgggataacaagcagaggtttagtctgttggaggaagatggcgagctgttgatccgggcgaaccagggacacacactaaaaaaatatagtctggaggtgacctcaatgtaattcaattagtgatggaacatttgggagtctactcattatgtatttcttctatctggaaaaacactcaagggatctttgtttagaggatggagacctaaatctgaccgaccttcattggtggataaatatgcagaaaaagagattcagaaggtcttggacatcgccgacgagcgtagcctcattgacaccatcttcttctgctacctcgggtgcaatgcaagctaaggtggtcgacaatggtgttcgcggcggcgaactcgcagcgcagccaggtgatgaagccatcgcgctcgtcgacgagccaggcgacgggctcggccacggcggtgccgggggccggcgaggcgatgacggcggcggtggaggccatcgccgtgcgtccctcaccactgcgggccgcagcatagcccagccagcaatgccgaggttcctccaagagaatccagagtatgttgcacagggtgtaactttagctcagttttcgttccagatacctatacctctgcggcaggactatgtcaaaaagaaaccgaagttgataaatgcaagtgatgaagcaagtacaattacctctaagtcttctgaaccagacgaagtgaaccctatagcctgggcagttcctacaaaacatgagggcgatgccagtgaagaagcttctctcgccgatgagacacttgcatcagaagtagtgctaacccggaagaggaaaataggaagctctttgtcagtagagccaaaccatctctctgatgaacttgaaccaaagttggaggatgcttagaacggggagacgtctaactgaaaagtaaaagtgggcagcgtcgtgatgccaacttacccccctgccatggttttattggtcctctgcttgtttctcgttttccttgggagttagcttctctgttttatgtggtcgcacacggccttatttgtagtattacaccacaaaagctggctgacccccactgagggagggtgattgatgcaagcattgtgtatgatccttggacaagggaatcacggatgtttggttttgtcaccatggctgctactaaggaggcagatcactgcatcaaatatctggactgttctgtgttgcaaggtcaggtcataattgtttagaagaacattttattgttttgtcttcaccaccgagaatccaagagcgcctcccatagcctccacatccacaaggtcctgcttgactgcgacgacgtccaggctgatgccctcatcgtggatcgactcgcctcgctctagaaggagtggcccctctggagttgaatatgcagttataaccaatttttaccccttttatcctagaagagttgccaagacacggtataagaccatgataatagactaagagaggatttgtctctaattattatatgttttatttatgcagtcccatgagaactttgagtatttgcagattgatttattaatatattaaagttaaagattgtatgtgttgagtatgtatccattcttgttggaagtgtcttgcaattccaatccaaggatgtataaaagactgcatgggctaagtatgtgttttttcatgtatttggagtatatatactttttgttgcttgagaacatgtatgtacatacatagaagcttgtcaattgtgtgaacttgagttgatccctgtctaacctgagtatatatatatattttgttgcttgagaacgagtatgtacaatagaggcttgacaattgtgtgaacttgagttgaacatgaattttgat

SEQ ID NO: 29053 - DNA, 3780 bp, Zea Mays
cccacgacgacccacgacgcctgcgtcggccctgcccgaactggcgtgcagagcagtgctccacgacgccgccaccacctgccccagcagcggcacgctccgacaacggcgaccatggcggtgcgggcgcggcggctggggagtctgttccctgctagatccagtagatggctgactcatcgaggccctccgtgaacatcatctgcgccggtcgtctgctcggctgcagtggattaggaggcttggtgtggaggcgctcagcagcgggtggaagttcccgtcaaggagtctgtcccgtcaaggagaccgtcgtgccctggacggagtcagagcaagagtcgatcaacattttcctcacgatgattgagcgacacaggcacaattcaccatgatcccatcccccactcaaacctgcaaaatcctgtagccgaacatctcgatggtctcacgtgccattcctttctacaggaataggcctataactgatttcaataagtttatgctgcatttcattcagtgtgtttggatgcatatagagaacacgaagtttaatgtgtttggtgcataatgagaattgaggaaatgggacattctagcatgctatgtgaattgtgaaaggctatagattaatgtgtacagcattttttatgttggaactgcctacatttatgttggtgccgctcccacgagcgcaccaggacgccggcttggaggtacttgcacacaagggtcgagctcggacgtcgtagcggtgcggagggcctcggccgtagcatgccccgccccgccgcgcatgcctgcgcggtcggtgtcccgcagcacccacaccgagtggcctgtcttcaaagtcgtcctcatcctctcctcctggctcaacgagaccatcaacgtctggatgttcatagacctgctcgggttcatgctgttcttcgacctcaccctggtgcacctcggccagtacttcaccaaggtgtctggtatgattgggcacctctcctgctccggcgaccgagctccaaccagggacgtctagcgctagcgcccaggacgcacgaccccctgctcctctatcctcagcgccgagcccctccgtcctgtttctggcagcgaaagcccagcccctgcggcaagctacctactcgatggaatgcccagccgcttgtcggatctacgcagcccctgcgcgacgtcacaaactccggcagtcaggcgggataacaagcagaggtttagtctgttggaggaagatggcgagctgttgatccgggcgaaccagggacacacactaaaaaaatatagtctggaggtgacctcaatgtaattcaattagtgatggaacatttgggagtctactcattatgtatttcttctatctggaaaaacactcaagggatctttgtttagaggatggagacctaaatctgaccgaccttcattggtggataaatatgcagaaaaagagattcagaaggtcttggacatcgccgacgagcgtagcctcattgacaccatcttcttctgctacctcgggtgcaatgcaagctaaggtggtcgacaatggtgttcgcggcggcgaactcgcagcgcagccaggtgatgaagccatcgcgctcgtcgacgagccaggcgacgggctcggccacggcggtgccgggggccggcgaggcgatgacggcggcggtggaggccatcgccgtgcgtccctcaccactgcgggccgcagcatagcccagccagcaatgccgaggtccatcaccactgggaaccgtcgtccggaccctctcccatcccgcacccattcctgtcctctgtctctgcgatgcgcttagcgccctcaccacttccacctccccagcctggctagcagcggcggagggaagaagtaccccactctggctagcagcggcggtggcagctcagattagtacggcgctgccccttcttcccccacctgtctttggatctacaaccgcccacccgtcttcggagctgttgtattcctccccacttgcttatctattcctctcaaaatagtgatggatttcggtcctcggatttttaccaatcggacaaatccagtgaattatgttgagaaattgttatactgaatttagtggtaggttggtattacgacctgcaaaacttaggtttggttatatgtttctttactggcctgtaggtacgacgttcttacatactttaagtaccttgacacattgagagtattagaaggtgtctgatcaatttggatacttgctgatccaagccataggtatttgagcttgcaaagaggtgcgtttaccaggcagtgagaacaaatggtgttaatgttaacacaaatattaagggcacactgacaaagaagaggaaagtggcacataatgctacgaagaaaggaaaagaaatcggtagtggctcttggccccttcattttgcaggttcctccaagagaatccagagtatgttgcacagggtgtaactttagctcagttttcgttccagatacctatacctctgcggcaggactatgtcaaaaagaaaccgaagttgataaatgcaagtgatgaagcaagtacaattacctctaagtcttctgaaccagacgaagtgaaccctatagcctgggcagttcctacaaaacatgagggcgatgccagtgaagaagcttctctcgccgatgagacacttgcatcagaagtagtgctaacccggaagaggaaaataggaagctctttgtcagtagagccaaaccatctctctgatgaacttgaaccaaagttggaggatgcttagaacggggagacgtctaactgaaaagtaaaagtgggcagcgtcgtgatgccaacttacccccctgccatggttttattggtcctctgcttgtttctcgttttccttgggagttagcttctctgttttatgtggtcgcacacggccttatttgtagtattacaccacaaaagctggctgacccccactgagggagggtgattgatgcaagcattgtgtatgatccttggacaagggaatcacggatgtttggttttgtcaccatggctgctactaaggaggcagatcactgcatcaaatatctggactgttctgtgttgcaaggtcaggtcataattgtttagaagtactctacacagaacattttattgttttgtcttcaccaccgagaatccaagagcgcctcccatagcctccacatccacaaggtcctgcttgactgcgacgacgtccaggctgatgccctcatcgtggatcgactcgcctcgctctagaaggagtggcccctctggagttgaatatgcagttataaccaatttttaccccttttatcctagaagagttgccaagacacggtataagaccatgataatagactaagagaggatttgtctctaattattatatgttttatttatgcagtcccatgagaactttgagtatttgcagattgatttattaatatattaaagttaaagattgtatgtgttgagtatgtatccattcttgttggaagtgtcttgcaattccaatccaaggatgtataaaagactgcatgggctaagtatgtgttttttcatgtatttggagtatatatactttttgttgcttgagaacatgtatgtacatacatagaagcttgtcaattgtgtgaacttgagttgatccctgtctaacctgagtatatatatatattttgttgcttgagaacgagtatgtacaatagaggcttgacaattgtgtgaacttgagttgaacatgaattttgat

SEQ ID NO: 29054 - DNA, 3013 bp, Zea Mays
cccacgacgacccacgacgcctgcgtcggccctgcccgaactggcgtgcagagcagtgctccacgacgccgccaccacctgccccagcagcggcacgctccgacaacggcgaccatggcggtgcgggcgcggcggctggggagtctgttccctgctagatccagtagatggctgactcatcgaggccctccgtgaacatcatctgcgccggtcgtctgctcggctgcagtggattaggaggcttggtgtggaggcgctcagcagcgggtggaagttcccgtcaaggagtctgtcccgtcaaggagaccgtcgtgccctggacggagtcagagcaagagtcgatcaacattttcctcacgatgattgagcgacacaggcacaattcaccatgatcccatcccccactcaaacctgcaaaatcctgtagccgaacatctcgatggtctcacgtgccattcctttctacaggaataggcctataactgatttcaataagtttatgctgcatttcattcagtgtgtttggatgcatatagagaacacgaagtttaatgtgtttggtgcataatgagaattgaggaaatgggacattctagcatgctatgtgaattgtgaaaggctatagattaatgtgtacaggtgggaattcattatcggtttactaattatatagctgtttttccctattatctctctcaatttactgtgtataatgtactactaatctggaaattgatgtatgatagcattttttatgttggaactgcctacatttatgttggtgccgctcccacgagcgcaccaggacgccggcttggaggtacttgcacacaagggtcgagctcggacgtcgtagcggtgcggagggcctcggccgtagcatgccccgccccgccgcgcatgcctgcgcggtcggtgtcccgcagcacccacaccgagtggcctgtcttcaaagtcgtcctcatcctctcctcctggctcaacgagaccatcaacgtctggatgttcatagacctgctcgggttcatgctgttcttcgacctcaccctggtgcacctcggccagtacttcaccaaggtgtctggtatgattgggcacctctcctgccattgctcccttcgtccccagctccggcgaccgagctccaaccagggacgtctagcgctagcgcccaggacgcacgaccccctgctcctctatcctcagcgccgagcccctccgtcctgtttctggcagcgaaagcccagcccctgcggcaagctacctactcgatggaatgcccagccgcttgtcggatctacgcagcccctgcgcgacgtcacaaactccggcagtcaggcgggataacaagcagaggtttagtctgttggaggaagatggcgagctgttgatccgggcgaaccagggacacacactaaaaaaatatagtctggaggtgacctcaatgtaattcaattagtgatggaacatttgggagtctactcattatgtatttcttctatctggaaaaacactcaagggatctttgtttagaggatggagacctaaatctgaccgaccttcattggtggataaatatgcagaaaaagagattcagaaggtcttggacatcgccgacgagcgtagcctcattgacaccatcttcttctgctacctcgggtgcaatgcaaggttcctccaagagaatccagagtatgttgcacagggtgtaactttagctcagttttcgttccagatacctatacctctgcggcaggactatgtcaaaaagaaaccgaagttgataaatgcaagtgatgaagcaagtacaattacctctaagtcttctgaaccagacgaagtgaaccctatagcctgggcagttcctacaaaacatgagggcgatgccagtgaagaagcttctctcgccgatgagacacttgcatcagaagtagtgctaacccggaagaggaaaataggaagctctttgtcagtagagccaaaccatctctctgatgaacttgaaccaaagttggaggatgcttagaacggggagacgtctaactgaaaagtaaaagtgggcagcgtcgtgatgccaacttacccccctgccatggttttattggtcctctgcttgtttctcgttttccttgggagttagcttctctgttttatgtggtcgcacacggccttatttgtagtattacaccacaaaagctggctgacccccactgagggagggtgattgatgcaagcattgtgtatgatccttggacaagggaatcacggatgtttggttttgtcaccatggctgctactaaggaggcagatcactgcatcaaatatctggactgttctgtgttgcaaggtcaggtcataattgtttagaagtactctacacagaacattttattgttttgtcttcaccaccgagaatccaagagcgcctcccatagcctccacatccacaaggtcctgcttgactgcgacgacgtccaggctgatgccctcatcgtggatcgactcgcctcgctctagaaggagtggcccctctggagttgaatatgcagttataaccaatttttaccccttttatcctagaagagttgccaagacacggtataagaccatgataatagactaagagaggatttgtctctaattattatatgttttatttatgcagtcccatgagaactttgagtatttgcagattgatttattaatatattaaagttaaagattgtatgtgttgagtatgtatccattcttgttggaagtgtcttgcaattccaatccaaggatgtataaaagactgcatgggctaagtatgtgttttttcatgtatttggagtatatatactttttgttgcttgagaacatgtatgtacatacatagaagcttgtcaattgtgtgaacttgagttgatccctgtctaacctgagtatatatatatattttgttgcttgagaacgagtatgtacaatagaggcttgacaattgtgtgaacttgagttgaacatgaattttgat

SEQ ID NO: 29055 - DNA, 2899 bp, Zea Mays
cccacgacgacccacgacgcctgcgtcggccctgcccgaactggcgtgcagagcagtgctccacgacgccgccaccacctgccccagcagcggcacgctccgacaacggcgaccatggcggtgcgggcgcggcggctggggagtctgttccctgctagatccagtagatggctgactcatcgaggccctccgtgaacatcatctgcgccggtcgtctgctcggctgcagtggattaggaggcttggtgtggaggcgctcagcagcgggtggaagttcccgtcaaggagtctgtcccgtcaaggagaccgtcgtgccctggacggagtcagagcaagagtcgatcaacattttcctcacgatgattgagcgacacaggcacaattcaccatgatcccatcccccactcaaacctgcaaaatcctgtagccgaacatctcgatggtctcacgtgccattcctttctacaggaataggcctataactgatttcaataagtttatgctgcatttcattcagtgtgtttggatgcatatagagaacacgaagtttaatgtgtttggtgcataatgagaattgaggaaatgggacattctagcatgctatgtgaattgtgaaaggctatagattaatgtgtacagcattttttatgttggaactgcctacatttatgttggtgccgctcccacgagcgcaccaggacgccggcttggaggtacttgcacacaagggtcgagctcggacgtcgtagcggtgcggagggcctcggccgtagcatgccccgccccgccgcgcatgcctgcgcggtcggtgtcccgcagcacccacaccgagtggcctgtcttcaaagtcgtcctcatcctctcctcctggctcaacgagaccatcaacgtctggatgttcatagacctgctcgggttcatgctgttcttcgacctcaccctggtgcacctcggccagtacttcaccaaggtgtctggtatgattgggcacctctcctgccattgctcccttcgtccccagctccggcgaccgagctccaaccagggacgtctagcgctagcgcccaggacgcacgaccccctgctcctctatcctcagcgccgagcccctccgtcctgtttctggcagcgaaagcccagcccctgcggcaagctacctactcgatggaatgcccagccgcttgtcggatctacgcagcccctgcgcgacgtcacaaactccgaacggttatacgcgcctcacacaagcatgcgctgaatttctcgctttcccaaccctatcgttttttgggtgtgtatggttttcccaggcagtcaggcgggataacaagcagaggtttagtctgttggaggaagatggcgagctgttgatccgggcgaaccagggacacacactaaaaaaatatagtctggaggtgacctcaatgtaattcaattagtgatggaacatttgggagtctactcattatgtatttcttctatctggaaaaacactcaagggatctttgtttagaggatggagacctaaatctgaccgaccttcattggtggataaatatgcagaaaaaggttcctccaagagaatccagagtatgttgcacagggtgtaactttagctcagttttcgttccagatacctatacctctgcggcaggactatgtcaaaaagaaaccgaagttgataaatgcaagtgatgaagcaagtacaattacctctaagtcttctgaaccagacgaagtgaaccctatagcctgggcagttcctacaaaacatgagggcgatgccagtgaagaagcttctctcgccgatgagacacttgcatcagaagtagtgctaacccggaagaggaaaataggaagctctttgtcagtagagccaaaccatctctctgatgaacttgaaccaaagttggaggatgcttagaacggggagacgtctaactgaaaagtaaaagtgggcagcgtcgtgatgccaacttacccccctgccatggttttattggtcctctgcttgtttctcgttttccttgggagttagcttctctgttttatgtggtcgcacacggccttatttgtagtattacaccacaaaagctggctgacccccactgagggagggtgattgatgcaagcattgtgtatgatccttggacaagggaatcacggatgtttggttttgtcaccatggctgctactaaggaggcagatcactgcatcaaatatctggactgttctgtgttgcaaggtcaggtcataattgtttagaagaacattttattgttttgtcttcaccaccgagaatccaagagcgcctcccatagcctccacatccacaaggtcctgcttgactgcgacgacgtccaggctgatgccctcatcgtggatcgactcgcctcgctctagaaggagtggcccctctggagttgaatatgcagttataaccaatttttaccccttttatcctagaagagttgccaagacacggtataagaccatgataatagactaagagaggatttgtctctaattattatatgttttatttatgcagtcccatgagaactttgagtatttgcagattgatttattaatatattaaagttaaagattgtatgtgttgagtatgtatccattcttgttggaagtgtcttgcaattccaatccaaggatgtataaaagactgcatgggctaagtatgtgttttttcatgtatttggagtatatatactttttgttgcttgagaacatgtatgtacatacatagaagcttgtcaattgtgtgaacttgagttgatccctgtctaacctgagtatatatatatattttgttgcttgagaacgagtatgtacaatagaggcttgacaattgtgtgaacttgagttgaacatgaattttgat

SEQ ID NO: 29056 - DNA, 3027 bp, Zea Mays
cccacgacgacccacgacgcctgcgtcggccctgcccgaactggcgtgcagagcagtgctccacgacgccgccaccacctgccccagcagcggcacgctccgacaacggcgaccatggcggtgcgggcgcggcggctggggagtctgttccctgctagatccagtagatggctgactcatcgaggccctccgtgaacatcatctgcgccggtcgtctgctcggctgcagtggattaggaggcttggtgtggaggcgctcagcagcgggtggaagttcccgtcaaggagtctgtcccgtcaaggagaccgtcgtgccctggacggagtcagagcaagagtcgatcaacattttcctcacgatgattgagcgacacaggcacaattcaccatgatcccatcccccactcaaacctgcaaaatcctgtagccgaacatctcgatggtctcacgtgccattcctttctacaggaataggcctataactgatttcaataagtttatgctgcatttcattcagtgtgtttggatgcatatagagaacacgaagtttaatgtgtttggtgcataatgagaattgaggaaatgggacattctagcatgctatgtgaattgtgaaaggctatagattaatgtgtacagcattttttatgttggaactgcctacatttatgttggtgccgctcccacgagcgcaccaggacgccggcttggaggtacttgcacacaagggtcgagctcggacgtcgtagcggtgcggagggcctcggccgtagcatgccccgccccgccgcgcatgcctgcgcggtcggtgtcccgcagcacccacaccgagtggcctgtcttcaaagtcgtcctcatcctctcctcctggctcaacgagaccatcaacgtctggatgttcatagacctgctcgggttcatgctgttcttcgacctcaccctggtgcacctcggccagtacttcaccaaggtgtctggtatgattgggcacctctcctgctccggcgaccgagctccaaccagggacgtctagcgctagcgcccaggacgcacgaccccctgctcctctatcctcagcgccgagcccctccgtcctgtttctggcagcgaaagcccagcccctgcggcaagctacctactcgatggaatgcccagccgcttgtcggatctacgcagcccctgcgcgacgtcacaaactccgaacggttatacgcgcctcacacaagcatgcgctgaatttctcgctttcccaaccctatcgttttttgggtgtgtatggttttcccaggcagtcaggcgggataacaagcagaggtttagtctgttggaggaagatggcgagctgttgatccgggcgaaccagggacacacactaaaaaaatatagtctggaggtgacctcaatgtaattcaattagtgatggaacatttgggagtctactcattatgtatttcttctatctggaaaaacactcaagggatctttgtttagaggatggagacctaaatctgaccgaccttcattggtggataaatatgcagaaaaagaggagaccttcacctaaaaaacaaagatatatgttgaaatggttctttttaaaagattgcaacgtgatccgggtgtcagagattcagaaggtcttggacatcgccgacgagcgtagcctcattgacaccatcttcttctgctacctcgggtgcaatgcaaggttcctccaagagaatccagagtatgttgcacagggtgtaactttagctcagttttcgttccagatacctatacctctgcggcaggactatgtcaaaaagaaaccgaagttgataaatgcaagtgatgaagcaagtacaattacctctaagtcttctgaaccagacgaagtgaaccctatagcctgggcagttcctacaaaacatgagggcgatgccagtgaagaagcttctctcgccgatgagacacttgcatcagaagtagtgctaacccggaagaggaaaataggaagctctttgtcagtagagccaaaccatctctctgatgaacttgaaccaaagttggaggatgcttagaacggggagacgtctaactgaaaagtaaaagtgggcagcgtcgtgatgccaacttacccccctgccatggttttattggtcctctgcttgtttctcgttttccttgggagttagcttctctgttttatgtggtcgcacacggccttatttgtagtattacaccacaaaagctggctgacccccactgagggagggtgattgatgcaagcattgtgtatgatccttggacaagggaatcacggatgtttggttttgtcaccatggctgctactaaggaggcagatcactgcatcaaatatctggactgttctgtgttgcaagtactctacacagaacattttattgttttgtcttcaccaccgagaatccaagagcgcctcccatagcctccacatccacaaggtcctgcttgactgcgacgacgtccaggctgatgccctcatcgtggatcgactcgcctcgctctagaaggagtggcccctctggagttgaatatgcagttataaccaatttttaccccttttatcctagaagagttgccaagacacggtataagaccatgataatagactaagagaggatttgtctctaattattatatgttttatttatgcagtcccatgagaactttgagtatttgcagattgatttattaatatattaaagttaaagattgtatgtgttgagtatgtatccattcttgttggaagtgtcttgcaattccaatccaaggatgtataaaagactgcatgggctaagtatgtgttttttcatgtatttggagtatatatactttttgttgcttgagaacatgtatgtacatacatagaagcttgtcaattgtgtgaacttgagttgatccctgtctaacctgagtatatatatatattttgttgcttgagaacgagtatgtacaatagaggcttgacaattgtgtgaacttgagttgaacatgaattttgat

SEQ ID NO: 29057 - DNA, 3054 bp, Zea Mays
cccacgacgacccacgacgcctgcgtcggccctgcccgaactggcgtgcagagcagtgctccacgacgccgccaccacctgccccagcagcggcacgctccgacaacggcgaccatggcggtgcgggcgcggcggctggggagtctgttccctgctagatccagtagatggctgactcatcgaggccctccgtgaacatcatctgcgccggtcgtctgctcggctgcagtggattaggaggcttggtgtggaggcgctcagcagcgggtggaagttcccgtcaaggagtctgtcccgtcaaggagaccgtcgtgccctggacggagtcagagcaagagtcgatcaacattttcctcacgatgattgagcgacacaggcacaattcaccatgatcccatcccccactcaaacctgcaaaatcctgtagccgaacatctcgatggtctcacgtgccattcctttctacaggaataggcctataactgatttcaataagtttatgctgcatttcattcagtgtgtttggatgcatatagagaacacgaagtttaatgtgtttggtgcataatgagaattgaggaaatgggacattctagcatgctatgtgaattgtgaaaggctatagattaatgtgtacagcattttttatgttggaactgcctacatttatgttggtgccgctcccacgagcgcaccaggacgccggcttggaggtacttgcacacaagggtcgagctcggacgtcgtagcggtgcggagggcctcggccgtagcatgccccgccccgccgcgcatgcctgcgcggtcggtgtcccgcagcacccacaccgagtggcctgtcttcaaagtcgtcctcatcctctcctcctggctcaacgagaccatcaacgtctggatgttcatagacctgctcgggttcatgctgttcttcgacctcaccctggtgcacctcggccagtacttcaccaaggtgtctggtatgattgggcacctctcctgctccggcgaccgagctccaaccagggacgtctagcgctagcgcccaggacgcacgaccccctgctcctctatcctcagcgccgagcccctccgtcctgtttctggcagcgaaagcccagcccctgcggcaagctacctactcgatggaatgcccagccgcttgtcggatctacgcagcccctgcgcgacgtcacaaactccggcagtcaggcgggataacaagcagaggtttagtctgttggaggaagatggcgagctgttgatccgggcgaaccagggacacacactaaaaaaatatagtctggaggtgacctcaatgtaattcaattagtgatggaacatttgggagtctactcattatgtatttcttctatctggaaaaacactcaagggatctttgtttagaggatggagacctaaatctgaccgaccttcattggtggataaatatgcagaaaaagagattcagaaggtcttggacatcgccgacgagcgtagcctcattgacaccatcttcttctgctacctcgggtgcaatgcaagctaaggtggtcgacaatggtgttcgcggcggcgaactcgcagcgcagccaggtgatgaagccatcgcgctcgtcgacgagccaggcgacgggctcggccacggcggtgccgggggccggcgaggcgatgacggcggcggtggaggccatcgccgtgcgtccctcaccactgcgggccgcagcatagcccagccagcaatgccgaggttcctccaagagaatccagagtatgttgcacagggtgtaactttagctcagttttcgttccagatacctatacctctgcggcaggactatgtcaaaaagaaaccgaagttgataaatgcaagtgatgaagcaagtacaattacctctaagtcttctgaaccagacgaagtgaaccctatagcctgggcagttcctacaaaacatgagggcgatgccagtgaagaagcttctctcgccgatgagacacttgcatcagaagtagtgctaacccggaagaggaaaataggaagctctttgtcagtagagccaaaccatctctctgatgaacttgaaccaaagttggaggatgcttagaacggggagacgtctaactgaaaagtaaaagtgggcagcgtcgtgatgccaacttacccccctgccatggttttattggtcctctgcttgtttctcgttttccttgggagttagcttctctgttttatgtggtcgcacacggccttatttgtagtattacaccacaaaagctggctgacccccactgagggagggtgattgatgcaagcattgtgtatgatccttggacaagggaatcacggatgtttggttttgtcaccatggctgctactaaggaggcagatcactgcatcaaatatctggactgttctgtgttgcaagaacattttattgttttgtcttcaccaccgagaatccaagagcgcctcccatagcctccacatccacaaggtcctgcttgactgcgacgacgtccaggctgatgccctcatcgtggatcgactcgcctcgctctagaaggagtggcccctctggagttgaatatgcagttataaccaatttttaccccttttatcctagaagagttgccaagacacggtataagaccatgataatagactaagagaggatttgtctctaattattatatgttttatttatgcagtcccatgagaactttgagtatttgcagattgatttattaatatattaaagttaaagattgtatgtgttgagtatgtatccattcttgttggaagtgtcttgcaattccaatccaaggatgtataaaagactgcatgggctaagtatgtgttttttcatgtatttggagtatatatactttttgttgcttgagaacatgtatgtacatacatagaagcttgtcaattgtgtgaacttgagttgatccctgtctaacctgagtatatatatatattttgttgcttgagaacgagtatgtacaatagaggcttgacaattgtgtgaacttgagttgaacatgaattttgat

SEQ ID NO: 29058 - DNA, 3168 bp, Zea Mays
cccacgacgacccacgacgcctgcgtcggccctgcccgaactggcgtgcagagcagtgctccacgacgccgccaccacctgccccagcagcggcacgctccgacaacggcgaccatggcggtgcgggcgcggcggctggggagtctgttccctgctagatccagtagatggctgactcatcgaggccctccgtgaacatcatctgcgccggtcgtctgctcggctgcagtggattaggaggcttggtgtggaggcgctcagcagcgggtggaagttcccgtcaaggagtctgtcccgtcaaggagaccgtcgtgccctggacggagtcagagcaagagtcgatcaacattttcctcacgatgattgagcgacacaggcacaattcaccatgatcccatcccccactcaaacctgcaaaatcctgtagccgaacatctcgatggtctcacgtgccattcctttctacaggaataggcctataactgatttcaataagtttatgctgcatttcattcagtgtgtttggatgcatatagagaacacgaagtttaatgtgtttggtgcataatgagaattgaggaaatgggacattctagcatgctatgtgaattgtgaaaggctatagattaatgtgtacagcattttttatgttggaactgcctacatttatgttggtgccgctcccacgagcgcaccaggacgccggcttggaggtacttgcacacaagggtcgagctcggacgtcgtagcggtgcggagggcctcggccgtagcatgccccgccccgccgcgcatgcctgcgcggtcggtgtcccgcagcacccacaccgagtggcctgtcttcaaagtcgtcctcatcctctcctcctggctcaacgagaccatcaacgtctggatgttcatagacctgctcgggttcatgctgttcttcgacctcaccctggtgcacctcggccagtacttcaccaaggtgtctggtatgattgggcacctctcctgctccggcgaccgagctccaaccagggacgtctagcgctagcgcccaggacgcacgaccccctgctcctctatcctcagcgccgagcccctccgtcctgtttctggcagcgaaagcccagcccctgcggcaagctacctactcgatggaatgcccagccgcttgtcggatctacgcagcccctgcgcgacgtcacaaactccggcagtcaggcgggataacaagcagaggtttagtctgttggaggaagatggcgagctgttgatccgggcgaaccagggacacacactaaaaaaatatagtctggaggtgacctcaatgtaattcaattagtgatggaacatttgggagtctactcattatgtatttcttctatctggaaaaacactcaagggatctttgtttagaggatggagacctaaatctgaccgaccttcattggtggataaatatgcagaaaaagaggagaccttcacctaaaaaacaaagatatatgttgaaatggttctttttaaaagattgcaacgtgatccgggtgtcagagattcagaaggtcttggacatcgccgacgagcgtagcctcattgacaccatcttcttctgctacctcgggtgcaatgcaagctaaggtggtcgacaatggtgttcgcggcggcgaactcgcagcgcagccaggtgatgaagccatcgcgctcgtcgacgagccaggcgacgggctcggccacggcggtgccgggggccggcgaggcgatgacggcggcggtggaggccatcgccgtgcgtccctcaccactgcgggccgcagcatagcccagccagcaatgccgaggttcctccaagagaatccagagtatgttgcacagggtgtaactttagctcagttttcgttccagatacctatacctctgcggcaggactatgtcaaaaagaaaccgaagttgataaatgcaagtgatgaagcaagtacaattacctctaagtcttctgaaccagacgaagtgaaccctatagcctgggcagttcctacaaaacatgagggcgatgccagtgaagaagcttctctcgccgatgagacacttgcatcagaagtagtgctaacccggaagaggaaaataggaagctctttgtcagtagagccaaaccatctctctgatgaacttgaaccaaagttggaggatgcttagaacggggagacgtctaactgaaaagtaaaagtgggcagcgtcgtgatgccaacttacccccctgccatggttttattggtcctctgcttgtttctcgttttccttgggagttagcttctctgttttatgtggtcgcacacggccttatttgtagtattacaccacaaaagctggctgacccccactgagggagggtgattgatgcaagcattgtgtatgatccttggacaagggaatcacggatgtttggttttgtcaccatggctgctactaaggaggcagatcactgcatcaaatatctggactgttctgtgttgcaaggtcaggtcataattgtttagaagtactctacacagaacattttattgttttgtcttcaccaccgagaatccaagagcgcctcccatagcctccacatccacaaggtcctgcttgactgcgacgacgtccaggctgatgccctcatcgtggatcgactcgcctcgctctagaaggagtggcccctctggagttgaatatgcagttataaccaatttttaccccttttatcctagaagagttgccaagacacggtataagaccatgataatagactaagagaggatttgtctctaattattatatgttttatttatgcagtcccatgagaactttgagtatttgcagattgatttattaatatattaaagttaaagattgtatgtgttgagtatgtatccattcttgttggaagtgtcttgcaattccaatccaaggatgtataaaagactgcatgggctaagtatgtgttttttcatgtatttggagtatatatactttttgttgcttgagaacatgtatgtacatacatagaagcttgtcaattgtgtgaacttgagttgatccctgtctaacctgagtatatatatatattttgttgcttgagaacgagtatgtacaatagaggcttgacaattgtgtgaacttgagttgaacatgaattttgat

SEQ ID NO: 29059 - DNA, 3133 bp, Zea Mays
cccacgacgacccacgacgcctgcgtcggccctgcccgaactggcgtgcagagcagtgctccacgacgccgccaccacctgccccagcagcggcacgctccgacaacggcgaccatggcggtgcgggcgcggcggctggggagtctgttccctgctagatccagtagatggctgactcatcgaggccctccgtgaacatcatctgcgccggtcgtctgctcggctgcagtggattaggaggcttggtgtggaggcgctcagcagcgggtggaagttcccgtcaaggagtctgtcccgtcaaggagaccgtcgtgccctggacggagtcagagcaagagtcgatcaacattttcctcacgatgattgagcgacacaggcacaattcaccatgatcccatcccccactcaaacctgcaaaatcctgtagccgaacatctcgatggtctcacgtgccattcctttctacaggaataggcctataactgatttcaataagtttatgctgcatttcattcagtgtgtttggatgcatatagagaacacgaagtttaatgtgtttggtgcataatgagaattgaggaaatgggacattctagcatgctatgtgaattgtgaaaggctatagattaatgtgtacagcattttttatgttggaactgcctacatttatgttggtgccgctcccacgagcgcaccaggacgccggcttggaggtacttgcacacaagggtcgagctcggacgtcgtagcggtgcggagggcctcggccgtagcatgccccgccccgccgcgcatgcctgcgcggtcggtgtcccgcagcacccacaccgagtggcctgtcttcaaagtcgtcctcatcctctcctcctggctcaacgagaccatcaacgtctggatgttcatagacctgctcgggttcatgctgttcttcgacctcaccctggtgcacctcggccagtacttcaccaaggtgtctggtatgattgggcacctctcctgctccggcgaccgagctccaaccagggacgtctagcgctagcgcccaggacgcacgaccccctgctcctctatcctcagcgccgagcccctccgtcctgtttctggcagcgaaagcccagcccctgcggcaagctacctactcgatggaatgcccagccgcttgtcggatctacgcagcccctgcgcgacgtcacaaactccggcagtcaggcgggataacaagcagaggtttagtctgttggaggaagatggcgagctgttgatccgggcgaaccagggacacacactaaaaaaatatagtctggaggtgacctcaatgtaattcaattagtgatggaacatttgggagtctactcattatgtatttcttctatctggaaaaacactcaagggatctttgtttagaggatggagacctaaatctgaccgaccttcattggtggataaatatgcagaaaaagaggagaccttcacctaaaaaacaaagatatatgttgaaatggttctttttaaaagattgcaacgtgatccgggtgtcagagattcagaaggtcttggacatcgccgacgagcgtagcctcattgacaccatcttcttctgctacctcgggtgcaatgcaagctaaggtggtcgacaatggtgttcgcggcggcgaactcgcagcgcagccaggtgatgaagccatcgcgctcgtcgacgagccaggcgacgggctcggccacggcggtgccgggggccggcgaggcgatgacggcggcggtggaggccatcgccgtgcgtccctcaccactgcgggccgcagcatagcccagccagcaatgccgaggttcctccaagagaatccagagtatgttgcacagggtgtaactttagctcagttttcgttccagatacctatacctctgcggcaggactatgtcaaaaagaaaccgaagttgataaatgcaagtgatgaagcaagtacaattacctctaagtcttctgaaccagacgaagtgaaccctatagcctgggcagttcctacaaaacatgagggcgatgccagtgaagaagcttctctcgccgatgagacacttgcatcagaagtagtgctaacccggaagaggaaaataggaagctctttgtcagtagagccaaaccatctctctgatgaacttgaaccaaagttggaggatgcttagaacggggagacgtctaactgaaaagtaaaagtgggcagcgtcgtgatgccaacttacccccctgccatggttttattggtcctctgcttgtttctcgttttccttgggagttagcttctctgttttatgtggtcgcacacggccttatttgtagtattacaccacaaaagctggctgacccccactgagggagggtgattgatgcaagcattgtgtatgatccttggacaagggaatcacggatgtttggttttgtcaccatggctgctactaaggaggcagatcactgcatcaaatatctggactgttctgtgttgcaagaacattttattgttttgtcttcaccaccgagaatccaagagcgcctcccatagcctccacatccacaaggtcctgcttgactgcgacgacgtccaggctgatgccctcatcgtggatcgactcgcctcgctctagaaggagtggcccctctggagttgaatatgcagttataaccaatttttaccccttttatcctagaagagttgccaagacacggtataagaccatgataatagactaagagaggatttgtctctaattattatatgttttatttatgcagtcccatgagaactttgagtatttgcagattgatttattaatatattaaagttaaagattgtatgtgttgagtatgtatccattcttgttggaagtgtcttgcaattccaatccaaggatgtataaaagactgcatgggctaagtatgtgttttttcatgtatttggagtatatatactttttgttgcttgagaacatgtatgtacatacatagaagcttgtcaattgtgtgaacttgagttgatccctgtctaacctgagtatatatatatattttgttgcttgagaacgagtatgtacaatagaggcttgacaattgtgtgaacttgagttgaacatgaattttgat

SEQ ID NO: 29060 - DNA, 2802 bp, Zea Mays
cccacgacgacccacgacgcctgcgtcggccctgcccgaactggcgtgcagagcagtgctccacgacgccgccaccacctgccccagcagcggcacgctccgacaacggcgaccatggcggtgcgggcgcggcggctggggagtctgttccctgctagatccagtagatggctgactcatcgaggccctccgtgaacatcatctgcgccggtcgtctgctcggctgcagtggattaggaggcttggtgtggaggcgctcagcagcgggtggaagttcccgtcaaggagtctgtcccgtcaaggagaccgtcgtgccctggacggagtcagagcaagagtcgatcaacattttcctcacgatgattgagcgacacaggcacaattcaccatgatcccatcccccactcaaacctgcaaaatcctgtagccgaacatctcgatggtctcacgtgccattcctttctacaggaataggcctataactgatttcaataagtttatgctgcatttcattcagtgtgtttggatgcatatagagaacacgaagtttaatgtgtttggtgcataatgagaattgaggaaatgggacattctagcatgctatgtgaattgtgaaaggctatagattaatgtgtacagcattttttatgttggaactgcctacatttatgttggtgccgctcccacgagcgcaccaggacgccggcttggaggtacttgcacacaagggtcgagctcggacgtcgtagcggtgcggagggcctcggccgtagcatgccccgccccgccgcgcatgcctgcgcggtcggtgtcccgcagcacccacaccgagtggcctgtcttcaaagtcgtcctcatcctctcctcctggctcaacgagaccatcaacgtctggatgttcatagacctgctcgggttcatgctgttcttcgacctcaccctggtgcacctcggccagtacttcaccaaggtgtctggtatgattgggcacctctcctgctccggcgaccgagctccaaccagggacgtctagcgctagcgcccaggacgcacgaccccctgctcctctatcctcagcgccgagcccctccgtcctgtttctggcagcgaaagcccagcccctgcggcaagctacctactcgatggaatgcccagccgcttgtcggatctacgcagcccctgcgcgacgtcacaaactccggcagtcaggcgggataacaagcagaggtttagtctgttggaggaagatggcgagctgttgatccgggcgaaccagggacacacactaaaaaaatatagtctggaggtgacctcaatgtaattcaattagtgatggaacatttgggagtctactcattatgtatttcttctatctggaaaaacactcaagggatctttgtttagaggatggagacctaaatctgaccgaccttcattggtggataaatatgcagaaaaaggttcctccaagagaatccagagtatgttgcacagggtgtaactttagctcagttttcgttccagatacctatacctctgcggcaggactatgtcaaaaagaaaccgaagttgataaatgcaagtgatgaagcaagtacaattacctctaagtcttctgaaccagacgaagtgaaccctatagcctgggcagttcctacaaaacatgagggcgatgccagtgaagaagcttctctcgccgatgagacacttgcatcagaagtagtgctaacccggaagaggaaaataggaagctctttgtcagtagagccaaaccatctctctgatgaacttgaaccaaagttggaggatgcttagaacggggagacgtctaactgaaaagtaaaagtgggcagcgtcgtgatgccaacttacccccctgccatggttttattggtcctctgcttgtttctcgttttccttgggagttagcttctctgttttatgtggtcgcacacggccttatttgtagtattacaccacaaaagctggctgacccccactgagggagggtgattgatgcaagcattgtgtatgatccttggacaagggaatcacggatgtttggttttgtcaccatggctgctactaaggaggcagatcactgcatcaaatatctggactgttctgtgttgcaaggtcaggtcataattgtttagaagtactctacacagaacattttattgttttgtcttcaccaccgagaatccaagagcgcctcccatagcctccacatccacaaggtcctgcttgactgcgacgacgtccaggctgatgccctcatcgtggatcgactcgcctcgctctagaaggagtggcccctctggagttgaatatgcagttataaccaatttttaccccttttatcctagaagagttgccaagacacggtataagaccatgataatagactaagagaggatttgtctctaattattatatgttttatttatgcagtcccatgagaactttgagtatttgcagattgatttattaatatattaaagttaaagattgtatgtgttgagtatgtatccattcttgttggaagtgtcttgcaattccaatccaaggatgtataaaagactgcatgggctaagtatgtgttttttcatgtatttggagtatatatactttttgttgcttgagaacatgtatgtacatacatagaagcttgtcaattgtgtgaacttgagttgatccctgtctaacctgagtatatatatatattttgttgcttgagaacgagtatgtacaatagaggcttgacaattgtgtgaacttgagttgaacatgaattttgat

SEQ ID NO: 29061 - DNA, 3167 bp, Zea Mays
cccacgacgacccacgacgcctgcgtcggccctgcccgaactggcgtgcagagcagtgctccacgacgccgccaccacctgccccagcagcggcacgctccgacaacggcgaccatggcggtgcgggcgcggcggctggggagtctgttccctgctagatccagtagatggctgactcatcgaggccctccgtgaacatcatctgcgccggtcgtctgctcggctgcagtggattaggaggcttggtgtggaggcgctcagcagcgggtggaagttcccgtcaaggagtctgtcccgtcaaggagaccgtcgtgccctggacggagtcagagcaagagtcgatcaacattttcctcacgatgattgagcgacacaggcacaattcaccatgatcccatcccccactcaaacctgcaaaatcctgtagccgaacatctcgatggtctcacgtgccattcctttctacaggaataggcctataactgatttcaataagtttatgctgcatttcattcagtgtgtttggatgcatatagagaacacgaagtttaatgtgtttggtgcataatgagaattgaggaaatgggacattctagcatgctatgtgaattgtgaaaggctatagattaatgtgtacaggtgggaattcattatcggtttactaattatatagctgtttttccctattatctctctcaatttactgtgtataatgtactactaatctggaaattgatgtatgatagcattttttatgttggaactgcctacatttatgttggtgccgctcccacgagcgcaccaggacgccggcttggaggtacttgcacacaagggtcgagctcggacgtcgtagcggtgcggagggcctcggccgtagcatgccccgccccgccgcgcatgcctgcgcggtcggtgtcccgcagcacccacaccgagtggcctgtcttcaaagtcgtcctcatcctctcctcctggctcaacgagaccatcaacgtctggatgttcatagacctgctcgggttcatgctgttcttcgacctcaccctggtgcacctcggccagtacttcaccaaggtgtctggtatgattgggcacctctcctgccattgctcccttcgtccccagctccggcgaccgagctccaaccagggacgtctagcgctagcgcccaggacgcacgaccccctgctcctctatcctcagcgccgagcccctccgtcctgtttctggcagcgaaagcccagcccctgcggcaagctacctactcgatggaatgcccagccgcttgtcggatctacgcagcccctgcgcgacgtcacaaactccgaacggttatacgcgcctcacacaagcatgcgctgaatttctcgctttcccaaccctatcgttttttgggtgtgtatggttttcccaggcagtcaggcgggataacaagcagaggtttagtctgttggaggaagatggcgagctgttgatccgggcgaaccagggacacacactaaaaaaatatagtctggaggtgacctcaatgtaattcaattagtgatggaacatttgggagtctactcattatgtatttcttctatctggaaaaacactcaagggatctttgtttagaggatggagacctaaatctgaccgaccttcattggtggataaatatgcagaaaaagaggagaccttcacctaaaaaacaaagatatatgttgaaatggttctttttaaaagattgcaacgtgatccgggtgtcagagattcagaaggtcttggacatcgccgacgagcgtagcctcattgacaccatcttcttctgctacctcgggtgcaatgcaaggttcctccaagagaatccagagtatgttgcacagggtgtaactttagctcagttttcgttccagatacctatacctctgcggcaggactatgtcaaaaagaaaccgaagttgataaatgcaagtgatgaagcaagtacaattacctctaagtcttctgaaccagacgaagtgaaccctatagcctgggcagttcctacaaaacatgagggcgatgccagtgaagaagcttctctcgccgatgagacacttgcatcagaagtagtgctaacccggaagaggaaaataggaagctctttgtcagtagagccaaaccatctctctgatgaacttgaaccaaagttggaggatgcttagaacggggagacgtctaactgaaaagtaaaagtgggcagcgtcgtgatgccaacttacccccctgccatggttttattggtcctctgcttgtttctcgttttccttgggagttagcttctctgttttatgtggtcgcacacggccttatttgtagtattacaccacaaaagctggctgacccccactgagggagggtgattgatgcaagcattgtgtatgatccttggacaagggaatcacggatgtttggttttgtcaccatggctgctactaaggaggcagatcactgcatcaaatatctggactgttctgtgttgcaaggtcaggtcataattgtttagaagaacattttattgttttgtcttcaccaccgagaatccaagagcgcctcccatagcctccacatccacaaggtcctgcttgactgcgacgacgtccaggctgatgccctcatcgtggatcgactcgcctcgctctagaaggagtggcccctctggagttgaatatgcagttataaccaatttttaccccttttatcctagaagagttgccaagacacggtataagaccatgataatagactaagagaggatttgtctctaattattatatgttttatttatgcagtcccatgagaactttgagtatttgcagattgatttattaatatattaaagttaaagattgtatgtgttgagtatgtatccattcttgttggaagtgtcttgcaattccaatccaaggatgtataaaagactgcatgggctaagtatgtgttttttcatgtatttggagtatatatactttttgttgcttgagaacatgtatgtacatacatagaagcttgtcaattgtgtgaacttgagttgatccctgtctaacctgagtatatatatatattttgttgcttgagaacgagtatgtacaatagaggcttgacaattgtgtgaacttgagttgaacatgaattttgat

SEQ ID NO: 29062 - DNA, 3451 bp, Zea Mays
gttcctcgctctccctagccatcacagctgtgcaccacgcctttgtctccatcgtcgtagtcgccgtgtggaggcttggtgtggaggcgctcagcagcgggtggaagttcccgtcaaggagtctgtcccgtcaaggagaccgtcgtgccctggacggagtcagagcaagagtcgatcaacattttcctcacgatgattgagcgacacaggcacaattcaccatgatcccatcccccactcaaacctgcaaaatcctgtagccgaacatctcgatggtctcacgtgccattcctttctacaggaataggcctataactgatttcaataagtttatgctgcatttcattcagtgtgtttggatgcatatagagaacacgaagtttaatgtgtttggtgcataatgagaattgaggaaatgggacattctagcatgctatgtgaattgtgaaaggctatagattaatgtgtacaggtgggaattcattatcggtttactaattatatagctgtttttccctattatctctctcaatttactgtgtataatgtactactaatctggaaattgatgtatgatagcattttttatgttggaactgcctacatttatgttggtgccgctcccacgagcgcaccaggacgccggcttggaggtacttgcacacaagggtcgagctcggacgtcgtagcggtgcggagggcctcggccgtagcatgccccgccccgccgcgcatgcctgcgcggtcggtgtcccgcagcacccacaccgagtggcctgtcttcaaagtcgtcctcatcctctcctcctggctcaacgagaccatcaacgtctggatgttcatagacctgctcgggttcatgctgttcttcgacctcaccctggtgcacctcggccagtacttcaccaaggtgtctggtatgattgggcacctctcctgccattgctcccttcgtccccagctccggcgaccgagctccaaccagggacgtctagcgctagcgcccaggacgcacgaccccctgctcctctatcctcagcgccgagcccctccgtcctgtttctggcagcgaaagcccagcccctgcggcaagctacctactcgatggaatgcccagccgcttgtcggatctacgcagcccctgcgcgacgtcacaaactccgaacggttatacgcgcctcacacaagcatgcgctgaatttctcgctttcccaaccctatcgttttttgggtgtgtatggttttcccaggcagtcaggcgggataacaagcagaggtttagtctgttggaggaagatggcgagctgttgatccgggcgaaccagggacacacactaaaaaaatatagtctggaggtgacctcaatgtaattcaattagtgatggaacatttgggagtctactcattatgtatttcttctatctggaaaaacactcaagggatctttgtttagaggatggagacctaaatctgaccgaccttcattggtggataaatatgcagaaaaagattgcaacgtgatccgggtgtcagagattcagaaggtcttggacatcgccgacgagcgtagcctcattgacaccatcttcttctgctacctcgggtgcaatgcaagctaaggtggtcgacaatggtgttcgcggcggcgaactcgcagcgcagccaggtgatgaagccatcgcgctcgtcgacgagccaggcgacgggctcggccacggcggtgccgggggccggcgaggcgatgacggcggcggtggaggccatcgccgtgcgtccctcaccactgcgggccgcagcatagcccagccagcaatgccgaggtccatcaccactgggaaccgtcgtccggaccctctcccatcccgcacccattcctgtcctctgtctctgcgatgcgcttagcgccctcaccacttccacctccccagcctggctagcagcggcggagggaagaagtaccccactctggctagcagcggcggtggcagctcagattagtacggcgctgccccttcttcccccacctgtctttggatctacaaccgcccacccgtcttcggagctgttgtattcctccccacttgcttatctattcctctcaaaatagtgatggatttcggtcctcggatttttaccaatcggacaaatccagtgaattatgttgagaaattgttatactgaatttagtggtaggttggtattacgacctgcaaaacttaggtttggttatatgtttctttactggcctgtaggtacgacgttcttacatactttaagtaccttgacacattgagagtattagaaggtgtctgatcaatttggatacttgctgatccaagccataggtatttgagcttgcaaagaggtgcgtttaccaggcagtgagaacaaatggtgttaatgttaacacaaatattaagggcacactgacaaagaagaggaaagtggcacataatgctacgaagaaaggaaaagaaatcggtagtggctcttggccccttcattttgcaggttcctccaagagaatccagagtatgttgcacagggtgtaactttagctcagttttcgttccagatacctatacctctgcggcaggactatgtcaaaaagaaaccgaagttgataaatgcaagtgatgaagcaagtacaattacctctaagtcttctgaaccagacgaaggtgattgatgcaagcattgtgtatgatccttggacaagggaatcacggatgtttggttttgtcaccatggctgctactaaggaggcagatcactgcatcaaatatctggactgttctgtgttgcaagtactctacacagaacattttattgttttgtcttcaccaccgagaatccaagagcgcctcccatagcctccacatccacaaggtcctgcttgactgcgacgacgtccaggctgatgccctcatcgtggatcgactcgcctcgctctagaaggagtggcccctctggagttgaatatgcagttataaccaatttttaccccttttatcctagaagagttgccaagacacggtataagaccatgataatagactaagagaggatttgtctctaattattatatgttttatttatgcagtcccatgagaactttgagtatttgcagattgatttattaatatattaaagttaaagattgtatgtgttgagtatgtatccattcttgttggaagtgtcttgcaattccaatccaaggatgtataaaagactgcatgggctaagtatgtgttttttcatgtatttggagtatatatactttttgttgcttgagaacatgtatgtacatacatagaagcttgtcaattgtgtgaacttgagttgatccctgtctaacctgagtatatatatatattttgttgcttgagaacgagtatgtacaatagaggcttgacaattgtgtgaacttgagttgaacatgaattttgat

SEQ ID NO: 29063 - DNA, 3063 bp, Zea Mays
cctcgctctccctagccatcacagctgtgcaccacgcctttgtctccatcgtcgtagtcgccgtgtggaggcttggtgtggaggcgctcagcagcgggtggaagttcccgtcaaggagtctgtcccgtcaaggagaccgtcgtgccctggacggagtcagagcaagagtcgatcaacattttcctcacgatgattgagcgacacaggcacaattcaccatgatcccatcccccactcaaacctgcaaaatcctgtagccgaacatctcgatggtctcacgtgccattcctttctacaggaataggcctataactgatttcaataagtttatgctgcatttcattcagtgtgtttggatgcatatagagaacacgaagtttaatgtgtttggtgcataatgagaattgaggaaatgggacattctagcatgctatgtgaattgtgaaaggctatagattaatgtgtacaggacgccggcttggaggtacttgcacacaagggtcgagctcggacgtcgtagcggtgcggagggcctcggccgtagcatgccccgccccgccgcgcatgcctgcgcggtcggtgtcccgcagcacccacaccgagtggcctgtcttcaaagtcgtcctcatcctctcctcctggctcaacgagaccatcaacgtctggatgttcatagacctgctcgggttcatgctgttcttcgacctcaccctggtgcacctcggccagtacttcaccaaggtgtctggtatgattgggcacctctcctgctccggcgaccgagctccaaccagggacgtctagcgctagcgcccaggacgcacgaccccctgctcctctatcctcagcgccgagcccctccgtcctgtttctggcagcgaaagcccagcccctgcggcaagctacctactcgatggaatgcccagccgcttgtcggatctacgcagcccctgcgcgacgtcacaaactccggtgaaacctcgctgcccttgctgctctcgagccccttatgtttgataaaatgttaaaactactgaatgattgttctactgcatgatccctagaacggttatacgcgcctcacacaagcatgcgctgaatttctcgctttcccaaccctatcgttttttgggtgtgtatggttttcccaggcagtcaggcgggataacaagcagaggtttagtctgttggaggaagatggcgagctgttgatccgggcgaaccagggacacacactaaaaaaatatagtctggaggtgacctcaatgtaattcaattagtgatggaacatttgggagtctactcattatgtatttcttctatctggaaaaacactcaagggatctttgtttagaggatggagacctaaatctgaccgaccttcattggtggataaatatgcagaaaaagattgcaacgtgatccgggtgtcagagattcagaaggtcttggacatcgccgacgagcgtagcctcattgacaccatcttcttctgctacctcgggtgcaatgcaagctaaggtggtcgacaatggtgttcgcggcggcgaactcgcagcgcagccaggtgatgaagccatcgcgctcgtcgacgagccaggcgacgggctcggccacggcggtgccgggggccggcgaggcgatgacggcggcggtggaggccatcgccgtgcgtccctcaccactgcgggccgcagcatagcccagccagcaatgccgaggttcctccaagagaatccagagtatgttgcacagggtgtaactttagctcagttttcgttccagatacctatacctctgcggcaggactatgtcaaaaagaaaccgaagttgataaatgcaagtgatgaagcaagtacaattacctctaagtcttctgaaccagacgaagtgaaccctatagcctgggcagttcctacaaaacatgagggcgatgccagtgaagaagcttctctcgccgatgagacacttgcatcagaagtagtgctaacccggaagaggaaaataggaagctctttgtcagtagagccaaaccatctctctgatgaacttgaaccaaagttggaggatgcttagaacggggagacgtctaactgaaaagtaaaagtgggcagcgtcgtgatgccaacttacccccctgccatggttttattggtcctctgcttgtttctcgttttccttgggagttagcttctctgttttatgtggtcgcacacggccttatttgtagtattacaccacaaaagctggctgacccccactgagggagggtgattgatgcaagcattgtgtatgatccttggacaagggaatcacggatgtttggttttgtcaccatggctgctactaaggaggcagatcactgcatcaaatatctggactgttctgtgttgcaaggtcaggtcataattgtttagaagtactctacacagaacattttattgttttgtcttcaccaccgagaatccaagagcgcctcccatagcctccacatccacaaggtcctgcttgactgcgacgacgtccaggctgatgccctcatcgtggatcgactcgcctcgctctagaaggagtggcccctctggagttgaatatgcagttataaccaatttttaccccttttatcctagaagagttgccaagacacggtataagaccatgataatagactaagagaggatttgtctctaattattatatgttttatttatgcagtcccatgagaactttgagtatttgcagattgatttattaatatattaaagttaaagattgtatgtgttgagtatgtatccattcttgttggaagtgtcttgcaattccaatccaaggatgtataaaagactgcatgggctaagtatgtgttttttcatgtatttggagtatatatactttttgttgcttgagaacatgtatgtacatacatagaagcttgtcaattgtgtgaacttgagttgatccctgtctaacctgagtatatatatatattttgttgcttgagaacgagtatgtacaatagaggcttgacaattgtgtgaacttgagttgaacatgaattttgat

SEQ ID NO: 29064 - DNA, 3550 bp, Zea Mays
ctcgctctccctagccatcacagctgtgcaccacgcctttgtctccatcgtcgtagtcgccgtgtggaggcttggtgtggaggcgctcagcagcgggtggaagttcccgtcaaggagtctgtcccgtcaaggagaccgtcgtgccctggacggagtcagagcaagagtcgatcaacattttcctcacgatgattgagcgacacaggcacaattcaccatgatcccatcccccactcaaacctgcaaaatcctgtagccgaacatctcgatggtctcacgtgccattcctttctacaggaataggcctataactgatttcaataagtttatgctgcatttcattcagtgtgtttggatgcatatagagaacacgaagtttaatgtgtttggtgcataatgagaattgaggaaatgggacattctagcatgctatgtgaattgtgaaaggctatagattaatgtgtacaggacgccggcttggaggtacttgcacacaagggtcgagctcggacgtcgtagcggtgcggagggcctcggccgtagcatgccccgccccgccgcgcatgcctgcgcggtcggtgtcccgcagcacccacaccgagtggcctgtcttcaaagtcgtcctcatcctctcctcctggctcaacgagaccatcaacgtctggatgttcatagacctgctcgggttcatgctgttcttcgacctcaccctggtgcacctcggccagtacttcaccaaggtgtctggtatgattgggcacctctcctgctccggcgaccgagctccaaccagggacgtctagcgctagcgcccaggacgcacgaccccctgctcctctatcctcagcgccgagcccctccgtcctgtttctggcagcgaaagcccagcccctgcggcaagctacctactcgatggaatgcccagccgcttgtcggatctacgcagcccctgcgcgacgtcacaaactccggcagtcaggcgggataacaagcagaggtttagtctgttggaggaagatggcgagctgttgatccgggcgaaccagggacacacactaaaaaaatatagtctggaggtgacctcaatgtaattcaattagtgatggaacatttgggagtctactcattatgtatttcttctatctggaaaaacactcaagggatctttgtttagaggatggagacctaaatctgaccgaccttcattggtggataaatatgcagaaaaagagattcagaaggtcttggacatcgccgacgagcgtagcctcattgacaccatcttcttctgctacctcgggtgcaatgcaagctaaggtggtcgacaatggtgttcgcggcggcgaactcgcagcgcagccaggtgatgaagccatcgcgctcgtcgacgagccaggcgacgggctcggccacggcggtgccgggggccggcgaggcgatgacggcggcggtggaggccatcgccgtgcgtccctcaccactgcgggccgcagcatagcccagccagcaatgccgaggtccatcaccactgggaaccgtcgtccggaccctctcccatcccgcacccattcctgtcctctgtctctgcgatgcgcttagcgccctcaccacttccacctccccagcctggctagcagcggcggagggaagaagtaccccactctggctagcagcggcggtggcagctcagattagtacggcgctgccccttcttcccccacctgtctttggatctacaaccgcccacccgtcttcggagctgttgtattcctccccacttgcttatctattcctctcaaaatagtgatggatttcggtcctcggatttttaccaatcggacaaatccagtgaattatgttgagaaattgttatactgaatttagtggtaggttggtattacgacctgcaaaacttaggtttggttatatgtttctttactggcctgtaggtacgacgttcttacatactttaagtaccttgacacattgagagtattagaaggtgtctgatcaatttggatacttgctgatccaagccataggtatttgagcttgcaaagaggtgcgtttaccaggcagtgagaacaaatggtgttaatgttaacacaaatattaagggcacactgacaaagaagaggaaagtggcacataatgctacgaagaaaggaaaagaaatcggtagtggctcttggccccttcattttgcaggttcctccaagagaatccagagtatgttgcacagggtgtaactttagctcagttttcgttccagatacctatacctctgcggcaggactatgtcaaaaagaaaccgaagttgataaatgcaagtgatgaagcaagtacaattacctctaagtcttctgaaccagacgaagtgaaccctatagcctgggcagttcctacaaaacatgagggcgatgccagtgaagaagcttctctcgccgatgagacacttgcatcagaagtagtgctaacccggaagaggaaaataggaagctctttgtcagtagagccaaaccatctctctgatgaacttgaaccaaagttggaggatgcttagaacggggagacgtctaactgaaaagtaaaagtgggcagcgtcgtgatgccaacttacccccctgccatggttttattggtcctctgcttgtttctcgttttccttgggagttagcttctctgttttatgtggtcgcacacggccttatttgtagtattacaccacaaaagctggctgacccccactgagggagggtgattgatgcaagcattgtgtatgatccttggacaagggaatcacggatgtttggttttgtcaccatggctgctactaaggaggcagatcactgcatcaaatatctggactgttctgtgttgcaaggtcaggtcataattgtttagaagtactctacacagaacattttattgttttgtcttcaccaccgagaatccaagagcgcctcccatagcctccacatccacaaggtcctgcttgactgcgacgacgtccaggctgatgccctcatcgtggatcgactcgcctcgctctagaaggagtggcccctctggagttgaatatgcagttataaccaatttttaccccttttatcctagaagagttgccaagacacggtataagaccatgataatagactaagagaggatttgtctctaattattatatgttttatttatgcagtcccatgagaactttgagtatttgcagattgatttattaatatattaaagttaaagattgtatgtgttgagtatgtatccattcttgttggaagtgtcttgcaattccaatccaaggatgtataaaagactgcatgggctaagtatgtgttttttcatgtatttggagtatatatactttttgttgcttgagaacatgtatgtacatacatagaagcttgtcaattgtgtgaacttgagttgatccctgtctaacctgagtatatatatatattttgttgcttgagaacgagtatgtacaatagaggcttgacaattgtgtgaacttgagttgaacatgaattttgat

SEQ ID NO: 29065 - DNA, 4116 bp, Zea Mays
cgctctccctagccatcacagctgtgcaccacgcctttgtctccatcgtcgtagtcgccgtgtggaggcttggtgtggaggcgctcagcagcgggtggaagttcccgtcaaggagtctgtcccgtcaaggagaccgtcgtgccctggacggagtcagagcaagagtcgatcaacattttcctcacgatgattgagcgacacaggcacaattcaccatgatcccatcccccactcaaacctgcaaaatcctgtagccgaacatctcgatggtctcacgtgccattcctttctacaggaataggcctataactgatttcaataagtttatgctgcatttcattcagtgtgtttggatgcatatagagaacacgaagtttaatgtgtttggtgcataatgagaattgaggaaatgggacattctagcatgctatgtgaattgtgaaaggctatagattaatgtgtacagcattttttatgttggaactgcctacatttatgttggtgccgctcccacgagcgcaccaggacgccggcttggaggtacttgcacacaagggtcgagctcggacgtcgtagcggtgcggagggcctcggccgtagcatgccccgccccgccgcgcatgcctgcgcggtcggtgtcccgcagcacccacaccgagtggcctgtcttcaaagtcgtcctcatcctctcctcctggctcaacgagaccatcaacgtctggatgttcatagacctgctcgggttcatgctgttcttcgacctcaccctggtgcacctcggccagtacttcaccaaggtgtctggtatgattgggcacctctcctgctccggcgaccgagctccaaccagggacgtctagcgctagcgcccaggacgcacgaccccctgctcctctatcctcagcgccgagcccctccgtcctgtttctggcagcgaaagcccagcccctgcggcaagctacctactcgatggaatgcccagccgcttgtcggatctacgcagcccctgcgcgacgtcacaaactccgaacggttatacgcgcctcacacaagcatgcgctgaatttctcgctttcccaaccctatcgttttttgggtgtgtatggttttcccaggcagtcaggcgggataacaagcagaggtttagtctgttggaggaagatggcgagctgttgatccgggcgaaccagggacacacactaaaaaaatatagtctggaggtgacctcaatgtaattcaattagtgatggaacatttgggagtctactcattatgtatttcttctatctggaaaaacactcaagggatctttgtttagaggatggagacctaaatctgaccgaccttcattggtggataaatatgcagaaaaagattgcaacgtgatccgggtgtcagagattcagaaggtcttggacatcgccgacgagcgtagcctcattgacaccatcttcttctgctacctcgggtgcaatgcaagctaaggtggtcgacaatggtgttcgcggcggcgaactcgcagcgcagccaggtgatgaagccatcgcgctcgtcgacgagccaggcgacgggctcggccacggcggtgccgggggccggcgaggcgatgacggcggcggtggaggccatcgccgtgcgtccctcaccactgcgggccgcagcatagcccagccagcaatgccgaggtccatcaccactgggaaccgtcgtccggaccctctcccatcccgcacccattcctgtcctctgtctctgcgatgcgcttagcgccctcaccacttccacctccccagcctggctagcagcggcggagggaagaagtaccccactctggctagcagcggcggtggcagctcagattagtacggcgctgccccttcttcccccacctgtctttggatctacaaccgcccacccgtcttcggagctgttgtattcctccccacttgcttatctattcctctcaaaatagtgatggatttcggtcctcggatttttaccaatcggacaaatccagtgaattatgttgagaaattgttatactgaatttagtggtaggttggtattacgacctgcaaaacttaggtttggttatatgtttctttactggcctgtaggtacgacgttcttacatactttaagtaccttgacacattgagagtattagaaggtgtctgatcaatttggatacttgctgatccaagccataggtatttgagcttgcaaagaggtgcgtttaccaggcagtgagaacaaatggtgttaatgttaacacaaatattaagggcacactgacaaagaagaggaaagtggcacataatgctacgaagaaaggaaaagaaatcggtagtggctcttggccccttcattttgcaggtggtatatgtttttcgaaagaattttagtgtaacagacaccttctgatactatgcagatggtatatgtttttttaaagaatttttgaaagaattcctgttgggtacatagtggtgtagaagcagggccagtctcataactatctgctcgttccagtaattaagttaaagtaaatgccagtaaacaagttaagaaaaattccatcatggaggatagaattgtccaagagttactttcttgtatgttgtaaggcctttaatgacatattacgaataaatagtatgcagatgttaactgtaccagttatgcactgcctttattccttatatttctgaattgtatacatatgcttcaacctgtctgtcttaaagcctccatgtcttacttttggcaggttcctccaagagaatccagagtatgttgcacagggtgtaactttagctcagttttcgttccagatacctatacctctgcggcaggactatgtcaaaaagaaaccgaagttgataaatgcaagtgatgaagcaagtacaattacctctaagtcttctgaaccagacgaagtgaaccctatagcctgggcagttcctacaaaacatgagggcgatgccagtgaagaagcttctctcgccgatgagacacttgcatcagaagtagtgctaacccggaagaggaaaataggaagctctttgtcagtagagccaaaccatctctctgatgaacttgaaccaaagttggaggatgcttagaacggggagacgtctaactgaaaagtaaaagtgggcagcgtcgtgatgccaacttacccccctgccatggttttattggtcctctgcttgtttctcgttttccttgggagttagcttctctgttttatgtggtcgcacacggccttatttgtagtattacaccacaaaagctggctgacccccactgagggagggtaggtgattgatgcaagcattgtgtatgatccttggacaagggaatcacggatgtttggttttgtcaccatggctgctactaaggaggcagatcactgcatcaaatatctggactgttctgtgttgcaaggtcaggtcataattgtttagaagtactctacacagaacattttattgttttgtcttcaccaccgagaatccaagagcgcctcccatagcctccacatccacaaggtcctgcttgactgcgacgacgtccaggctgatgccctcatcgtggatcgactcgcctcgctctagaaggagtggcccctctggagttgaatatgcagttataaccaatttttaccccttttatcctagaagagttgccaagacacggtataagaccatgataatagactaagagaggatttgtctctaattattatatgttttatttatgcagtcccatgagaactttgagtatttgcagattgatttattaatatattaaagttaaagattgtatgtgttgagtatgtatccattcttgttggaagtgtcttgcaattccaatccaaggatgtataaaagactgcatgggctaagtatgtgttttttcatgtatttggagtatatatactttttgttgcttgagaacatgtatgtacatacatagaagcttgtcaattgtgtgaacttgagttgatccctgtctaacctgagtatatatatatattttgttgcttgagaacgagtatgtacaatagaggcttgacaattgtgtgaacttgagttgaacatgaattttgat

SEQ ID NO: 29066 - DNA, 3916 bp, Zea Mays
tgcaccacgcctttgtctccatcgtcgtagtcgccgtgtggaggcttggtgtggaggcgctcagcagcgggtggaagttcccgtcaaggagtctgtcccgtcaaggagaccgtcgtgccctggacggagtcagagcaagagtcgatcaacattttcctcacgatgattgagcgacacaggcacaattcaccatgatcccatcccccactcaaacctgcaaaatcctgtagccgaacatctcgatggtctcacgtgccattcctttctacaggaataggcctataactgatttcaataagtttatgctgcatttcattcagtgtgtttggatgcatatagagaacacgaagtttaatgtgtttggtgcataatgagaattgaggaaatgggacattctagcatgctatgtgaattgtgaaaggctatagattaatgtgtacaggacgccggcttggaggtacttgcacacaagggtcgagctcggacgtcgtagcggtgcggagggcctcggccgtagcatgccccgccccgccgcgcatgcctgcgcggtcggtgtcccgcagcacccacaccgagtggcctgtcttcaaagtcgtcctcatcctctcctcctggctcaacgagaccatcaacgtctggatgttcatagacctgctcgggttcatgctgttcttcgacctcaccctggtgcacctcggccagtacttcaccaaggtgtctggtatgattgggcacctctcctgctccggcgaccgagctccaaccagggacgtctagcgctagcgcccaggacgcacgaccccctgctcctctatcctcagcgccgagcccctccgtcctgtttctggcagcgaaagcccagcccctgcggcaagctacctactcgatggaatgcccagccgcttgtcggatctacgcagcccctgcgcgacgtcacaaactccggtgaaacctcgctgcccttgctgctctcgagccccttatgtttgataaaatgttaaaactactgaatgattgttctactgcatgatccctagaacggttatacgcgcctcacacaagcatgcgctgaatttctcgctttcccaaccctatcgttttttgggtgtgtatggttttcccaggcagtcaggcgggataacaagcagaggtttagtctgttggaggaagatggcgagctgttgatccgggcgaaccagggacacacactaaaaaaatatagtctggaggtgacctcaatgtaattcaattagtgatggaacatttgggagtctactcattatgtatttcttctatctggaaaaacactcaagggatctttgtttagaggatggagacctaaatctgaccgaccttcattggtggataaatatgcagaaaaagattgcaacgtgatccgggtgtcagagattcagaaggtcttggacatcgccgacgagcgtagcctcattgacaccatcttcttctgctacctcgggtgcaatgcaagctaaggtggtcgacaatggtgttcgcggcggcgaactcgcagcgcagccaggtgatgaagccatcgcgctcgtcgacgagccaggcgacgggctcggccacggcggtgccgggggccggcgaggcgatgacggcggcggtggaggccatcgccgtgcgtccctcaccactgcgggccgcagcatagcccagccagcaatgccgaggtccatcaccactgggaaccgtcgtccggaccctctcccatcccgcacccattcctgtcctctgtctctgcgatgcgcttagcgccctcaccacttccacctccccagcctggctagcagcggcggagggaagaagtaccccactctggctagcagcggcggtggcagctcagattagtacggcgctgccccttcttcccccacctgtctttggatctacaaccgcccacccgtcttcggagctgttgtattcctccccacttgcttatctattcctctcaaaatagtgatggatttcggtcctcggatttttaccaatcggacaaatccagtgaattatgttgagaaattgttatactgaatttagtggtaggttggtattacgacctgcaaaacttaggtttggttatatgtttctttactggcctgtaggtacgacgttcttacatactttaagtaccttgacacattgagagtattagaaggtgtctgatcaatttggatacttgctgatccaagccataggtatttgagcttgcaaagaggtgcgtttaccaggcagtgagaacaaatggtgttaatgttaacacaaatattaagggcacactgacaaagaagaggaaagtggcacataatgctacgaagaaaggaaaagaaatcggtagtggctcttggccccttcattttgcaggtggtatatgtttttcgaaagaattttagtgtaacagacaccttctgatactatgcagatggtatatgtttttttaaagaatttttgaaagaattcctgttgggtacatagtggtgtagaagcagggccagtctcataactatctgctcgttccagtaattaagttaaagtaaatgccagtaaacaagttaagaaaaattccatcatggaggatagaattgtccaagagttactttcttgtatgttgtaaggcctttaatgacatattacgaataaatagtatgcagatgttaactgtaccagttatgcactgcctttattccttatatttctgaattgtatacatatgcttcaacctgtctgtcttaaagcctccatgtcttacttttggcaggttcctccaagagaatccagagtatgttgcacagggtgtaactttagctcagttttcgttccagatacctatacctctgcggcaggactatgtcaaaaagaaaccgaagttgataaatgcaagtgatgaagcaagtacaattacctctaagtcttctgaaccagacgaagtgaaccctatagcctgggcagttcctacaaaacatgagggcgatgccagtgaagaagcttctctcgccgatgagacacttgcatcagaagtagtgctaacccggaagaggaaaataggaagctctttgtcagtagagccaaaccatctctctgatgaacttgaaccaaagttggaggatgcttagaacggggagacgtctaactgaaaagtgattgatgcaagcattgtgtatgatccttggacaagggaatcacggatgtttggttttgtcaccatggctgctactaaggaggcagatcactgcatcaaatatctggactgttctgtgttgcaagaacattttattgttttgtcttcaccaccgagaatccaagagcgcctcccatagcctccacatccacaaggtcctgcttgactgcgacgacgtccaggctgatgccctcatcgtggatcgactcgcctcgctctagaaggagtggcccctctggagttgaatatgcagttataaccaatttttaccccttttatcctagaagagttgccaagacacggtataagaccatgataatagactaagagaggatttgtctctaattattatatgttttatttatgcagtcccatgagaactttgagtatttgcagattgatttattaatatattaaagttaaagattgtatgtgttgagtatgtatccattcttgttggaagtgtcttgcaattccaatccaaggatgtataaaagactgcatgggctaagtatgtgttttttcatgtatttggagtatatatactttttgttgcttgagaacatgtatgtacatacatagaagcttgtcaattgtgtgaacttgagttgatccctgtctaacctgagtatatatatatattttgttgcttgagaacgagtatgtacaatagaggcttgacaattgtgtgaacttgagttgaacatgaattttgat

SEQ ID NO: 29067 - DNA, 3824 bp, Zea Mays
cacgcctttgtctccatcgtcgtagtcgccgtgtggaggcttggtgtggaggcgctcagcagcgggtggaagttcccgtcaaggagtctgtcccgtcaaggagaccgtcgtgccctggacggagtcagagcaagagtcgatcaacattttcctcacgatgattgagcgacacaggcacaattcaccatgatcccatcccccactcaaacctgcaaaatcctgtagccgaacatctcgatggtctcacgtgccattcctttctacaggaataggacgccggcttggaggtacttgcacacaagggtcgagctcggacgtcgtagcggtgcggagggcctcggccgtagcatgccccgccccgccgcgcatgcctgcgcggtcggtgtcccgcagcacccacaccgagtggcctgtcttcaaagtcgtcctcatcctctcctcctggctcaacgagaccatcaacgtctggatgttcatagacctgctcgggttcatgctgttcttcgacctcaccctggtgcacctcggccagtacttcaccaaggtgtctggtatgattgggcacctctcctgctccggcgaccgagctccaaccagggacgtctagcgctagcgcccaggacgcacgaccccctgctcctctatcctcagcgccgagcccctccgtcctgtttctggcagcgaaagcccagcccctgcggcaagctacctactcgatggaatgcccagccgcttgtcggatctacgcagcccctgcgcgacgtcacaaactccgaacggttatacgcgcctcacacaagcatgcgctgaatttctcgctttcccaaccctatcgttttttgggtgtgtatggttttcccaggcagtcaggcgggataacaagcagaggtttagtctgttggaggaagatggcgagctgttgatccgggcgaaccagggacacacactaaaaaaatatagtctggaggtgacctcaatgtaattcaattagtgatggaacatttgggagtctactcattatgtatttcttctatctggaaaaacactcaagggatctttgtttagaggatggagacctaaatctgaccgaccttcattggtggataaatatgcagaaaaagattgcaacgtgatccgggtgtcagagattcagaaggtcttggacatcgccgacgagcgtagcctcattgacaccatcttcttctgctacctcgggtgcaatgcaagctaaggtggtcgacaatggtgttcgcggcggcgaactcgcagcgcagccaggtgatgaagccatcgcgctcgtcgacgagccaggcgacgggctcggccacggcggtgccgggggccggcgaggcgatgacggcggcggtggaggccatcgccgtgcgtccctcaccactgcgggccgcagcatagcccagccagcaatgccgaggtccatcaccactgggaaccgtcgtccggaccctctcccatcccgcacccattcctgtcctctgtctctgcgatgcgcttagcgccctcaccacttccacctccccagcctggctagcagcggcggagggaagaagtaccccactctggctagcagcggcggtggcagctcagattagtacggcgctgccccttcttcccccacctgtctttggatctacaaccgcccacccgtcttcggagctgttgtattcctccccacttgcttatctattcctctcaaaatagtgatggatttcggtcctcggatttttaccaatcggacaaatccagtgaattatgttgagaaattgttatactgaatttagtggtaggttggtattacgacctgcaaaacttaggtttggttatatgtttctttactggcctgtaggtacgacgttcttacatactttaagtaccttgacacattgagagtattagaaggtgtctgatcaatttggatacttgctgatccaagccataggtatttgagcttgcaaagaggtgcgtttaccaggcagtgagaacaaatggtgttaatgttaacacaaatattaagggcacactgacaaagaagaggaaagtggcacataatgctacgaagaaaggaaaagaaatcggtagtggctcttggccccttcattttgcaggtggtatatgtttttcgaaagaattttagtgtaacagacaccttctgatactatgcagatggtatatgtttttttaaagaatttttgaaagaattcctgttgggtacatagtggtgtagaagcagggccagtctcataactatctgctcgttccagtaattaagttaaagtaaatgccagtaaacaagttaagaaaaattccatcatggaggatagaattgtccaagagttactttcttgtatgttgtaaggcctttaatgacatattacgaataaatagtatgcagatgttaactgtaccagttatgcactgcctttattccttatatttctgaattgtatacatatgcttcaacctgtctgtcttaaagcctccatgtcttacttttggcaggttcctccaagagaatccagagtatgttgcacagggtgtaactttagctcagttttcgttccagatacctatacctctgcggcaggactatgtcaaaaagaaaccgaagttgataaatgcaagtgatgaagcaagtacaattacctctaagtcttctgaaccagacgaagtgaaccctatagcctgggcagttcctacaaaacatgagggcgatgccagtgaagaagcttctctcgccgatgagacacttgcatcagaagtagtgctaacccggaagaggaaaataggaagctctttgtcagtagagccaaaccatctctctgatgaacttgaaccaaagttggaggatgcttagaacggggagacgtctaactgaaaagtaaaagtgggcagcgtcgtgatgccaacttacccccctgccatggttttattggtcctctgcttgtttctcgttttccttgggagttagcttctctgttttatgtggtcgcacacggccttatttgtagtattacaccacaaaagctggctgacccccactgagggagggtgattgatgcaagcattgtgtatgatccttggacaagggaatcacggatgtttggttttgtcaccatggctgctactaaggaggcagatcactgcatcaaatatctggactgttctgtgttgcaagaacattttattgttttgtcttcaccaccgagaatccaagagcgcctcccatagcctccacatccacaaggtcctgcttgactgcgacgacgtccaggctgatgccctcatcgtggatcgactcgcctcgctctagaaggagtggcccctctggagttgaatatgcagttataaccaatttttaccccttttatcctagaagagttgccaagacacggtataagaccatgataatagactaagagaggatttgtctctaattattatatgttttatttatgcagtcccatgagaactttgagtatttgcagattgatttattaatatattaaagttaaagattgtatgtgttgagtatgtatccattcttgttggaagtgtcttgcaattccaatccaaggatgtataaaagactgcatgggctaagtatgtgttttttcatgtatttggagtatatatactttttgttgcttgagaacatgtatgtacatacatagaagcttgtcaattgtgtgaacttgagttgatccctgtctaacctgagtatatatatatattttgttgcttgagaacgagtatgtacaatagaggcttgacaattgtgtgaacttgagttgaacatgaattttgat

SEQ ID NO: 29068 - DNA, 2558 bp, Zea Mays
gtgaggtccagatccaaatccaaatccaatgttcgttgtttgcatgagtaaggcatataggggcactgaatcgaagtgtcaagatgcagtcaggcgggataacaagcagaggtttagtctgttggaggaagatggcgagctgttgatccgggcgaaccagggacacacactaaaaaaatatagtctggaggtgacctcaatgtaattcaattagtgatggaacatttgggagtctactcattatgtatttcttctatctggaaaaacactcaagggatctttgtttagaggatggagacctaaatctgaccgaccttcattggtggataaatatgcagaaaaaggtatttctgttttttgagaaacaaatgtttgaaaataaattaagattcacaatagtaatatatccgcactttttgtgttatgtgaggtggagtcaagtggaaagatgatcttaaatatacatgttgtcatcttgtatggtgattatgtagtaaaattgatggcaagaaaactactggttactatgactaacacaaaataaaacgttctttttaaaaaaaacttgggtataccgtatactgttattttgatactatggcacttctgtcatgttatatgttttctaaagaatgcttccctgaagcagaacagtcatgttcattatatttcagttatgcatcagtatttgcacttgctaggttgatccttgatttctatggaattcaagtgttggacggatatgtacttatggactagctcagttttggagattagttgttttagttgtttttgtgtcatgtcttctataaagcaaataagttaccatggatcaattttgtgtcagaaggtgactatatcatctctgacaattggaatttcagttgtgagaagctttggtgatagatttttgatatatttctggtttgccactttgtttgcttgtttttttgcatgttttgaacttgttttattattgttaggtgaagcttcaattgatgatatattcttgtcagtatgctctttttgtgcaccttgtttttaatctctggcagaggagaccttcacctaaaaaacaaagatatatgttgaaatggttctttttaaaagattgcaacgtgatccgggtgtcagagattcagaaggtcttggacatcgccgacgagcgtagcctcattgacaccatcttcttctgctacctcgggtgcaatgcaaggttcctccaagagaatccagagtatgttgcacagggtgtaactttagctcagttttcgttccagatacctatacctctgcggcaggactatgtcaaaaagaaaccgaagttgataaatgcaagtgatgaagcaagtacaattacctctaagtcttctgaaccagacgaagtgaaccctatagcctgggcagttcctacaaaacatgagggcgatgccagtgaagaagcttctctcgccgatgagacacttgcatcagaagtagtgctaacccggaagaggaaaataggaagctctttgtcagtagagccaaaccatctctctgatgaacttgaaccaaagttggaggatgcttagaacggggagacgtctaactgaaaagtaaaagtgggcagcgtcgtgatgccaacttacccccctgccatggttttattggtcctctgcttgtttctcgttttccttgggagttagcttctctgttttatgtggtcgcacacggccttatttgtagtattacaccacaaaagctggctgacccccactgagggagggtgattgatgcaagcattgtgtatgatccttggacaagggaatcacggatgtttggttttgtcaccatggctgctactaaggaggcagatcactgcatcaaatatctggactgttctgtgttgcaaggtcaggtcataattgtttagaagtactctacacagaacattttattgttttgtcttcaccaccgagaatccaagagcgcctcccatagcctccacatccacaaggtcctgcttgactgcgacgacgtccaggctgatgccctcatcgtggatcgactcgcctcgctctagaaggagtggcccctctggagttgaatatgcagttataaccaatttttaccccttttatcctagaagagttgccaagacacggtataagaccatgataatagactaagagaggatttgtctctaattattatatgttttatttatgcagtcccatgagaactttgagtatttgcagattgatttattaatatattaaagttaaagattgtatgtgttgagtatgtatccattcttgttggaagtgtcttgcaattccaatccaaggatgtataaaagactgcatgggctaagtatgtgttttttcatgtatttggagtatatatactttttgttgcttgagaacatgtatgtacatacatagaagcttgtcaattgtgtgaacttgagttgatccctgtctaacctgagtatatatatatattttgttgcttgagaacgagtatgtacaatagaggcttgacaattgtgtgaacttgagttgaacatgaattttgat

SEQ ID NO: 29069 - DNA, 2550 bp, Zea Mays
gttgaagaaggcctggtagggttttttaacagcccattgcatagcctatcgagcgacggcctacgctcaaaaaacacaaatcgctttccgcgccgccgccgcgccgccgaccggcgctcctcacctctcccgccgcacccatcgtccccccgttcccggctaaaccctgcttgagccctagacaccgcccgcctccgggaggtagagagcatgcacgccaggttcctcagcgcgccgtcccctgcctccgccgccccctccccgtacgttcgcttggccttcacgggcgccctcccgcgccgcgcgtgttggaagccgcgaggccccgcgtccgcgtccgcgccgccgcctcggcctctccactcgctgtgcgcccgggcctccatgcagcccgcctctcccgcgcacgacgggcatggtggtccgccggtgcacggcgtctccaacaccgtcatcggggtcctggggggcggtcagctcgggaagatgctctgccatgcagcgagtcagatggggattagaattgtcatcctcgaccctcttcccggctgccccgcgagctcggtttgcgatgagcacgtcatcgggagcttcaacgatggggacacggtccgggagttcgccaagaggtgtggggtcctaacagtggagattgagcatgttgatgccgccacactggagaagctggaaaaacagggcgttgactgcgagcctaaagcctccacaatcacgattattcaggacaagtacaggcagaaaaagcatttctcaagatacgagatcccattgcctgacttcatggaagtagatactttacgcagtatagaggaggctggggaaaagtttggctatcccctaatggtcaaaagcaagagattagcatatgatggtcgaggaaatgctgtagccaagaacaaagaggagctatcttctgttgttgcttcactgggtgggtttgagcggggcttgtatgttgagagatggactcctttcgtaaaggagctttctgtaattgtggcaaggagcagagacaactctactgtctgctatcctgttgtggaaacagttcacaaggaaaatatatgccatgttgttgaagctcctgctgatgtatctaacaaaataaagaagttagctactagcgtggctgaaaaagctatcaaatcattagaaggagctggtgtctttgctgtagagttgtttttaacagaagatgatcagattttattgaatgaggtagcccctaggcctcacaatagtgggcatcacacaatagagtcatgctacacctcacaatatgagcagcatatacgcgctattcttggccttcctcttggtgatccctcaatgaaagcacctgcagcaataatgtacaacatcctgggcgaggatgagggtgaagcagggttctttctggctcatcagcttatcagtagggcactaaccattccaggcacatcggtccattggtacgcaaagccagagatgcggaagcaaaggaagatgggtcatattacaattgtggggccttctaagataagtgtaaaatcacgcttggacaacttgctgcaaagaaactcgtctgatcccaaggaagttagccctcgtgttgctattataatggggtcccaatctgatcttcctgtgatgaaagatgctgagagggttttgaaagagttcgacataccttgtgagagcggatgtatgattatgcgaagtctgctaaagacaggggtttcgaggtcataattgcaggtgcaggcggagcagctcatttaccagggatggtggcttcattgactcctcttcctgtaatcggagttcccattaagacttcaacactatcaggatttgattccctcctatctattgtgcaaatgccaaaaggtattcctgttgcgactgttgctatcgggattgcagaaaatgcaggtttgctggcagctaggattctggctgcaagagatcctgagctccaggacagggtaactaagtaccaggatgatctgagggacatggttttggagacggcagaaaggctggaggaccaaggcccggaggaatttctgaagggaatggattgaccccttttgaagccctggctctggggcctgggaggaatacgagtgtattatgggtcggcgataactcactgtccactcgattatggtttaagatggggagtcatcaagaagatactttaataggctcggctgcattcgattttccttacaattcttttttgataattgtgctatcttaacccatctcaacatgcccttttcccttctaatatagggtatgaattttgggtttagagggggaaaaaagaatgggagtaaacgttgtacgtacgaaaaataaaacggttcgagtaacgtaaaaaacatgcctggatttttcagccgcacaagttgctttgagtcaagtaattgtacatattccctccgttctaaataaggccttgtttggttattaccattgttcatggattggatttggttattatcattgcacatggattgaatgagattataaaaaattaagaag

SEQ ID NO: 29070 - DNA, 2504 bp, Zea Mays
tgcatagcctatcgagcgacggcctacgctcaaaaaacacaaatcgctttccgcgccgccgccgcgccgccgaccggcgctcctcacctctcccgccgcacccatcgtccccccgttcccggctaaaccctgcttgagccctagacaccgcccgcctccgggaggtagagagcatgcacgccaggttcctcagcgcgccgtcccctgcctccgccgccccctccccgtacgttcgcttggccttcacgggcgccctcccgcgccgcgcgtgttggaagccgcgaggccccgcgtccgcgtccgcgccgccgcctcggcctctccactcgctgtgcgcccgggcctccatgcagcccgcctctcccgcgcacgacgggcatggtggtccgccggtgcacggcgtctccaacaccgtcatcggggtcctggggggcggtcagctcgggaagatgctctgccatgcagcgagtcagatggggattagaattgtcatcctcgaccctcttcccggctgccccgcgagctcggtttgcgatgagcacgtcatcgggagcttcaacgatggggacacggtccgggagttcgccaagaggtgtggggtcctaacagtggagattgagcatgttgatgccgccacactggagaagctggaaaaacagggcgttgactgcgagcctaaagcctccacaatcacgattattcaggacaagtacaggcagaaaaagcatttctcaagatacgagatcccattgcctgacttcatggaaaggaggctggggaaaagtttggctatcccctaatggtcaaaagcaagagattagcatatgatggtcgaggaaatgctgtagccaagaacaaagaggagctatcttctgttgttgcttcactgggtgggtttgagcggggcttgtatgttgagagatggactcctttcgtaaaggagctttctgtaattgtggcaaggagcagagacaactctactgtctgctatcctgttgtggaaacagttcacaaggaaaatatatgccatgttgttgaagctcctgctgatgtatctaacaaaataaagaagttagctactagcgtggctgaaaaagctatcaaatcattagaaggagctggtgtctttgctgtagagttgtttttaacagaagatgatcagattttattgaatgaggtagcccctaggcctcacaatagtgggcatcacacaatagagtcatgctacacctcacaatatgagcagcatatacgcgctattcttggccttcctcttggtgatccctcaatgaaagcacctgcagcaataatgtacaacatcctgggcgaggatgagggtgaagcagggttctttctggctcatcagcttatcagtagggcactaaccattccaggcacatcggtccattgagatgcggaagcaaaggaagatgggtcatattacaattgtggggccttctaagataagtgtaaaatcacgcttggacaacttgctgcaaagaaactcgtctgatcccaaggaagccctcgtgttgctattataatggggtcccaatctgatcttcctgtgatgaaagatgctgagagggttttgaaagagttcgacataccttgtgagttaactattgtttctgcacatcgtacaccagagcggatgtatgattatgcgaagtctgctaaagacaggggtttcgaggtcataattgcaggtgcaggcggagcagctcatttaccagggatggtggcttcattgactcctcttcctgtaatcggagttcccattaagacttcaacactatcaggatttgattccctcctatctattgtgcaaatgccaaaaggtattcctgttgcgactgttgctatcgggattgcagaaaatgcaggtttgctggcagctaggattctggctgcaagagatcctgagctccaggacagggtaactaagtaccaggatgatctgagggacatggttttggagacggcagaaaggctggaggaccaaggcccggaggaatttctgaagggaatggattgaccccttttgaagccctggctctggggcctgggaggaatacgagtgtattatgggtcggcgataactcactgtccactcgattatggtttaagatggggagtcatcaagaagatactttaataggctcggctgcattcgattttccttacaattcttttttgataattgtgctatcttaacccatctcaacatgcccttttcccttctaatatagggtatgaattttgggtttagagggggaaaaaagaatgggagtaaacgttgtacgtacgaaaaataaaacggttcgagtaacgtaaaaaacatgcctggatttttcagccgcacaagttgctttgagtcaagtaattgtacatattccctccgttctaaataaggccttgtttggttattaccattgttcatggattggatttggttattatcattgcacatggattgaatgagattataaaaaattaagaag

SEQ ID NO: 29071 - DNA, 2540 bp, Zea Mays
tgcatagcctatcgagcgacggcctacgctcaaaaaacacaaatcgctttccgcgccgccgccgcgccgccgaccggcgctcctcacctctcccgccgcacccatcgtccccccgttcccggctaaaccctgcttgagccctagacaccgcccgcctccgggaggtagagagcatgcacgccaggttcctcagcgcgccgtcccctgcctccgccgccccctccccgtacgttcgcttggccttcacgggcgccctcccgcgccgcgcgtgttggaagccgcgaggccccgcgtccgcgtccgcgccgccgcctcggcctctccactcgctgtgcgcccgggcctccatgcagcccgcctctcccgcgcacgacgggcatggtggtccgccggtgcacggcgtctccaacaccgtcatcggggtcctggggggcggtcagctcgggaagatgctctgccatgcagcgagtcagatggggattagaattgtcatcctcgaccctcttcccggctgccccgcgagctcggtttgcgatgagcacgtcatcgggagcttcaacgatggggacacggtccgggagttcgccaagaggtgtggggtcctaacagtggagattgagcatgttgatgccgccacactggagaagctggaaaaacagggcgttgactgcgagcctaaagcctccacaatcacgattattcaggacaagtacaggcagaaaaagcatttctcaagatacgagatcccattgcctgacttcatggaagtagatactttacgcagtatagaggaggctggggaaaagtttggctatcccctaatggtcaaaagcaagagattagcatatgatggtcgaggaaatgctgtagccaagaacaaagaggagctatcttctgttgttgcttcactgggtgggtttgagcggggcttgtatgttgagagatggactcctttcgtaaaggagctttctgtaattgtggcaaggagcagagacaactctactgtctgctatcctgttgtggaaacagttcacaaggaaaatatatgccatgttgttgaagctcctgctgatgtatctaacaaaataaagaagttagctactagcgtggctgaaaaagctatcaaatcattagaaggagctggtgtctttgctgtagagttgtttttaacagaagatgatcagattttattgaatgaggtagcccctaggcctcacaatagtgggcatcacacaatagagtcatgctacacctcacaatatgagcagcatatacgcgctattcttggccttcctcttggtgatccctcaatgaaagcacctgcagcaataatgtacaacatcctgggcgaggatgagggtgaagcagggttctttctggctcatcagcttatcagtagggcactaaccattccaggcacatcggtccattggtacgcaaagccagagatgcggaagcaaaggaagatgggtcatattacaattgtggggccttctaagataagtgtaaaatcacgcttggacaacttgctgcaaagaaactcgtctgatcccaaggaagccctcgtgttgctattataatggggtcccaatctgatcttcctgtgatgaaagatgctgagagggttttgaaagagttcgacataccttgtgagttaactattgtttctgcacatcgtacaccagagcggatgtatgattatgcgaagtctgctaaagacaggggtttcgaggtcataattgcaggtgcaggcggagcagctcatttaccagggatggtggcttcattgactcctcttcctgtaatcggagttcccattaagacttcaacactatcaggatttgattccctcctatctattgtgcaaatgccaaaaggtattcctgttgcgactgttgctatcgggattgcagaaaatgcaggtttgctggcagctaggattctggctgcaagagatcctgagctccaggacagggtaactaagtaccaggatgatctgagggacatggttttggagacggcagaaaggctggaggaccaaggcccggaggaatttctgaagggaatggattgaccccttttgaagccctggctctggggcctgggaggaatacgagtgtattatgggtcggcgataactcactgtccactcgattatggtttaagatggggagtcatcaagaagatactttaataggctcggctgcattcgattttccttacaattcttttttgataattgtgctatcttaacccatctcaacatgcccttttcccttctaatatagggtatgaattttgggtttagagggggaaaaaagaatgggagtaaacgttgtacgtacgaaaaataaaacggttcgagtaacgtaaaaaacatgcctggatttttcagccgcacaagttgctttgagtcaagtaattgtacatattccctccgttctaaataaggccttgtttggttattaccattgttcatggattggatttggttattatcattgcacatggattgaatgagattataaaaaattaagaag

SEQ ID NO: 29072 - DNA, 2597 bp, Zea Mays
tgcatagcctatcgagcgacggcctacgctcaaaaaacacaaatcgctttccgcgccgccgccgcgccgccgaccggcgctcctcacctctcccgccgcacccatcgtccccccgttcccggctaaaccctgcttgagccctagacaccgcccgcctccgggaggtagagagcatgcacgccaggttcctcagcgcgccgtcccctgcctccgccgccccctccccgtacgttcgcttggccttcacgggcgccctcccgcgccgcgcgtgttggaagccgcgaggccccgcgtccgcgtccgcgccgccgcctcggcctctccactcgctgtgcgcccgggcctccatgcagcccgcctctcccgcgcacgacgggcatggtggtccgccggtgcacggcgtctccaacaccgtcatcggggtcctggggggcggtcagctcgggaagatgctctgccatgcagcgagtcagatggggattagaattgtcatcctcgaccctcttcccggctgccccgcgagctcggtttgcgatgagcacgtcatcgggagcttcaacgatggggacacggtccgggagttcgccaagaggtgtggggtcctaacagtggagattgagcatgttgatgccgccacactggagaagctggaaaaacagggcgttgactgcgagcctaaagcctccacaatcacgattattcaggacaagtacaggcagaaaaagcatttctcaagatacgagatcccattgcctgacttcatggaagtagatactttacgcagtatagaggaggctggggaaaagtttggctatcccctaatggtcaaaagcaagagattagcatatgatggtcgaggaaatgctgtagccaagaacaaagaggagctatcttctgttgttgcttcactgggtgggtttgagcggggcttgtatgttgagagatggactcctttcgtaaaggagctttctgtaattgtggcaaggagcagagacaactctactgtctgctatcctgttgtggaaacagttcacaaggaaaatatatgccatgttgttgaagctcctgctgatgtatctaacaaaataaagaagttagctactagcgtggctgaaaaagctatcaaatcattagaaggagctggtgtctttgctgtagagttgtttttaacagaagatgatcaggtttttttggaccatctacatattttttcaaaatttattcctcttggagtggtgtttacatcattatccttgtgttgttctttctctagattttattgaatgaggtagcccctaggcctcacaatagtgggcatcacacaatagagtcatgctacacctcacaatatgagcagcatatacgcgctattcttggccttcctcttggtgatccctcaatgaaagcacctgcagcaataatgtacaacatcctgggcgaggatgagggtgaagcagggttctttctggctcatcagcttatcagtagggcactaaccattccaggcacatcggtccattggtacgcaaagccagagatgcggaagcaaaggaagatgggtcatattacaattgtggggccttctaagataagtgtaaaatcacgcttggacaacttgctgcaaagaaactcgtctgatcccaaggaagttagccctcgtgttgctattataatggggtcccaatctgatcttcctgtgatgaaagatgctgagagggttttgaaagagttcgacataccttagcggatgtatgattatgcgaagtctgctaaagacaggggtttcgaggtcataattgcaggtgcaggcggagcagctcatttaccagggatggtggcttcattgactcctcttcctgtaatcggagttcccattaagacttcaacactatcaggatttgattccctcctatctattgtgcaaatgccaaaaggtattcctgttgcgactgttgctatcgggattgcagaaaatgcaggtttgctggcagctaggattctggctgcaagagatcctgagctccaggacagggtaactaagtaccaggatgatctgagggacatggttttggagacggcagaaaggctggaggaccaaggcccggaggaatttctgaagggaatggattgaccccttttgaagccctggctctggggcctgggaggaatacgagtgtattatgggtcggcgataactcactgtccactcgattatggtttaagatggggagtcatcaagaagatactttaataggctcggctgcattcgattttccttacaattcttttttgataattgtgctatcttaacccatctcaacatgcccttttcccttctaatatagggtatgaattttgggtttagagggggaaaaaagaatgggagtaaacgttgtacgtacgaaaaataaaacggttcgagtaacgtaaaaaacatgcctggatttttcagccgcacaagttgctttgagtcaagtaattgtacatattccctccgttctaaataaggccttgtttggttattaccattgttcatggattggatttggttattatcattgcacatggattgaatgagattataaaaaattaagaag

SEQ ID NO: 29073 - DNA, 2530 bp, Zea Mays
tgcatagcctatcgagcgacggcctacgctcaaaaaacacaaatcgctttccgcgccgccgccgcgccgccgaccggcgctcctcacctctcccgccgcacccatcgtccccccgttcccggctaaaccctgcttgagccctagacaccgcccgcctccgggaggtagagagcatgcacgccaggttcctcagcgcgccgtcccctgcctccgccgccccctccccgtacgttcgcttggccttcacgggcgccctcccgcgccgcgcgtgttggaagccgcgaggccccgcgtccgcgtccgcgccgccgcctcggcctctccactcgctgtgcgcccgggcctccatgcagcccgcctctcccgcgcacgacgggcatggtggtccgccggtgcacggcgtctccaacaccgtcatcggggtcctggggggcggtcagctcgggaagatgctctgccatgcagcgagtcagatggggattagaattgtcatcctcgaccctcttcccggctgccccgcgagctcggtttgcgatgagcacgtcatcgggagcttcaacgatggggacacggtccgggagttcgccaagaggtgtggggtcctaacagtggagattgagcatgttgatgccgccacactggagaagctggaaaaacagggcgttgactgcgagcctaaagcctccacaatcacgattattcaggacaagtacaggcagaaaaagcatttctcaagatacgagatcccattgcctgacttcatggaagtagatactttacgcagtatagaggaggctggggaaaagtttggctatcccctaatggtcaaaagcaagagattagcatatgatggtcgaggaaatgctgtagccaagaacaaagaggagctatcttctgttgttgcttcactgggtgggtttgagcggggcttgtatgttgagagatggactcctttcgtaaaggagctttctgtaattgtggcaaggagcagagacaactctactgtctgctatcctgttgtggaaacagttcacaaggaaaatatatgccatgttgttgaagctcctgctgatgtatctaacaaaataaagaagttagctactagcgtggctgaaaaagctatcaaatcattagaaggagctggtgtctttgctgtagagttgtttttaacagaagatgatcagattttattgaatgaggtagcccctaggcctcacaatagtgggcatcacacaatagagtcatgctacacctcacaatatgagcagcatatacgcgctattcttggccttcctcttggtgatccctcaatgaaagcacctgcagcaataatgtacaacatcctgggcgaggatgagggtgaagcagggttctttctggctcatcagcttatcagtagggcactaaccattccaggcacatcggtccattgagatgcggaagcaaaggaagatgggtcatattacaattgtggggccttctaagataagtgtaaaatcacgcttggacaacttgctgcaaagaaactcgtctgatcccaaggaagttagccctcgtgttgctattataatggggtcccaatctgatcttcctgtgatgaaagatgctgagagggttttgaaagagttcgacataccttgtgagttaactattgtttctgcacatcgtacaccagagcggatgtatgattatgcgaagtctgctaaagacaggggtttcgaggtcataattgcaggtgcaggcggagcagctcatttaccagggatggtggcttcattgactcctcttcctgtaatcggagttcccattaagacttcaacactatcaggatttgattccctcctatctattgtgcaaatgccaaaaggtattcctgttgcgactgttgctatcgggattgcagaaaatgcaggtttgctggcagctaggattctggctgcaagagatcctgagctccaggacagggtaactaagtaccaggatgatctgagggacatggttttggagacggcagaaaggctggaggaccaaggcccggaggaatttctgaagggaatggattgaccccttttgaagccctggctctggggcctgggaggaatacgagtgtattatgggtcggcgataactcactgtccactcgattatggtttaagatggggagtcatcaagaagatactttaataggctcggctgcattcgattttccttacaattcttttttgataattgtgctatcttaacccatctcaacatgcccttttcccttctaatatagggtatgaattttgggtttagagggggaaaaaagaatgggagtaaacgttgtacgtacgaaaaataaaacggttcgagtaacgtaaaaaacatgcctggatttttcagccgcacaagttgctttgagtcaagtaattgtacatattccctccgttctaaataaggccttgtttggttattaccattgttcatggattggatttggttattatcattgcacatggattgaatgagattataaaaaattaagaag

SEQ ID NO: 29074 - DNA, 2527 bp, Zea Mays
tgcatagcctatcgagcgacggcctacgctcaaaaaacacaaatcgctttccgcgccgccgccgcgccgccgaccggcgctcctcacctctcccgccgcacccatcgtccccccgttcccggctaaaccctgcttgagccctagacaccgcccgcctccgggaggtagagagcatgcacgccaggttcctcagcgcgccgtcccctgcctccgccgccccctccccgtacgttcgcttggccttcacgggcgccctcccgcgccgcgcgtgttggaagccgcgaggccccgcgtccgcgtccgcgccgccgcctcggcctctccactcgctgtgcgcccgggcctccatgcagcccgcctctcccgcgcacgacgggcatggtggtccgccggtgcacggcgtctccaacaccgtcatcggggtcctggggggcggtcagctcgggaagatgctctgccatgcagcgagtcagatggggattagaattgtcatcctcgaccctcttcccggctgccccgcgagctcggtttgcgatgagcacgtcatcgggagcttcaacgatggggacacggtccgggagttcgccaagaggtgtggggtcctaacagtggagattgagcatgttgatgccgccacactggagaagctggaaaaacagggcgttgactgcgagcctaaagcctccacaatcacgattattcaggacaagtacaggcagaaaaagcatttctcaagatacgagatcccattgcctgacttcatggaatatagaggaggctggggaaaagtttggctatcccctaatggtcaaaagcaagagattagcatatgatggtcgaggaaatgctgtagccaagaacaaagaggagctatcttctgttgttgcttcactgggtgggtttgagcggggcttgtatgttgagagatggactcctttcgtaaaggagctttctgtaattgtggcaaggagcagagacaactctactgtctgctatcctgttgtggaaacagttcacaaggaaaatatatgccatgttgttgaagctcctgctgatgtatctaacaaaataaagaagttagctactagcgtggctgaaaaagctatcaaatcattagaaggagctggtgtctttgctgtagagttgtttttaacagaagatgatcagattttattgaatgaggtagcccctaggcctcacaatagtgggcatcacacaatagagtcatgctacacctcacaatatgagcagcatatacgcgctattcttggccttcctcttggtgatccctcaatgaaagcacctgcagcaataatgtacaacatcctgggcgaggatgagggtgaagcagggttctttctggctcatcagcttatcagtagggcactaaccattccaggcacatcggtccattggtacgcaaagccagagatgcggaagcaaaggaagatgggtcatattacaattgtggggccttctaagataagtgtaaaatcacgcttggacaacttgctgcaaagaaactcgtctgatcccaaggaagttagccctcgtgttgctattataatggggtcccaatctgatcttcctgtgatgaaagatgctgagagggttttgaaagagttcgacataccttgtgagttaactattgtttctgcacatcgtacaccagagcggatgtatgattatgcgaagtctgctaaagacaggggtttcgaggtcataattgcaggtgcaggcggagcagctcatttaccagggatggtggcttcattgactcctcttcctgtaatcggagttcccattaagacttcaacactatcaggatttgattccctcctatctattgtgcaaatgccaaaaggtattcctgttgcgactgttgctatcgggattgcagaaaatgcaggtttgctggcagctaggattctggctgcaagagatcctgagctccaggacagggtaactaagtaccaggatgatctgagggacatggttttggagacggcagaaaggctggaggaccaaggcccggaggaatttctgaagggaatggattgaccccttttgaagccctggctctggggcctgggaggaatacgagtgtattatgggtcggcgataactcactgtccactcgattatggtttaagatggggagtcatcaagaagatactttaataggctcggctgcattcgattttccttacaattcttttttgataattgtgctatcttaacccatctcaacatgcccttttcccttctaatatagggtatgaattttgggtttagagggggaaaaaagaatgggagtaaacgttgtacgtacgaaaaataaaacggttcgagtaacgtaaaaaacatgcctggatttttcagccgcacaagttgctttgagtcaagtaattgtacatattccctccgttctaaataaggccttgtttggttattaccattgttcatggattggatttggttattatcattgcacatggattgaatgagattataaaaaattaagaag

SEQ ID NO: 29075 - DNA, 2496 bp, Zea Mays
tgcatagcctatcgagcgacggcctacgctcaaaaaacacaaatcgctttccgcgccgccgccgcgccgccgaccggcgctcctcacctctcccgccgcacccatcgtccccccgttcccggctaaaccctgcttgagccctagacaccgcccgcctccgggaggtagagagcatgcacgccaggttcctcagcgcgccgtcccctgcctccgccgccccctccccgtacgttcgcttggccttcacgggcgccctcccgcgccgcgcgtgttggaagccgcgaggccccgcgtccgcgtccgcgccgccgcctcggcctctccactcgctgtgcgcccgggcctccatgcagcccgcctctcccgcgcacgacgggcatggtggtccgccggtgcacggcgtctccaacaccgtcatcggggtcctggggggcggtcagctcgggaagatgctctgccatgcagcgagtcagatggggattagaattgtcatcctcgaccctcttcccggctgccccgcgagctcggtttgcgatgagcacgtcatcgggagcttcaacgatggggacacggtccgggagttcgccaagaggtgtggggtcctaacagtggagattgagcatgttgatgccgccacactggagaagctggaaaaacagggcgttgactgcgagcctaaagcctccacaatcacgattattcaggacaagtacaggcagaaaaagcatttctcaagatacgagatcccattgcctgacttcatggaatatagaggaggctggggaaaagtttggctatcccctaatggtcaaaagcaagagattagcatatgatggtcgaggaaatgctgtagccaagaacaaagaggagctatcttctgttgttgcttcactgggtgggtttgagcggggcttgtatgttgagagatggactcctttcgtaaaggagctttctgtaattgtggcaaggagcagagacaactctactgtctgctatcctgttgtggaaacagttcacaaggaaaatatatgccatgttgttgaagctcctgctgatgtatctaacaaaataaagaagttagctactagcgtggctgaaaaagctatcaaatcattagaaggagctggtgtctttgctgtagagttgtttttaacagaagatgatcagattttattgaatgaggtagcccctaggcctcacaatagtgggcatcacacaatagagtcatgctacacctcacaatatgagcagcatatacgcgctattcttggccttcctcttggtgatccctcaatgaaagcacctgcagcaataatgtacaacatcctgggcgaggatgagggtgaagcagggttctttctggctcatcagcttatcagtagggcactaaccattccaggcacatcggtccattggtacgcaaagccagagatgcggaagcaaaggaagatgggtcatattacaattgtggggccttctaagataagtgtaaaatcacgcttggacaacttgctgcaaagaaactcgtctgatcccaaggaagttagccctcgtgttgctattataatggggtcccaatctgatcttcctgtgatgaaagatgctgagagggttttgaaagagttcgacataccttgtgagagcggatgtatgattatgcgaagtctgctaaagacaggggtttcgaggtcataattgcaggtgcaggcggagcagctcatttaccagggatggtggcttcattgactcctcttcctgtaatcggagttcccattaagacttcaacactatcaggatttgattccctcctatctattgtgcaaatgccaaaaggtattcctgttgcgactgttgctatcgggattgcagaaaatgcaggtttgctggcagctaggattctggctgcaagagatcctgagctccaggacagggtaactaagtaccaggatgatctgagggacatggttttggagacggcagaaaggctggaggaccaaggcccggaggaatttctgaagggaatggattgaccccttttgaagccctggctctggggcctgggaggaatacgagtgtattatgggtcggcgataactcactgtccactcgattatggtttaagatggggagtcatcaagaagatactttaataggctcggctgcattcgattttccttacaattcttttttgataattgtgctatcttaacccatctcaacatgcccttttcccttctaatatagggtatgaattttgggtttagagggggaaaaaagaatgggagtaaacgttgtacgtacgaaaaataaaacggttcgagtaacgtaaaaaacatgcctggatttttcagccgcacaagttgctttgagtcaagtaattgtacatattccctccgttctaaataaggccttgtttggttattaccattgttcatggattggatttggttattatcattgcacatggattgaatgagattataaaaaattaagaag

SEQ ID NO: 29076 - DNA, 2841 bp, Zea Mays
accaaatttacagatacgtccatcctctctcgaagccgccgcctcctgccgtcctgccactgcgagtggccagtgcccactgcccagtggccgttgctggttgctgctccccttccactcccacagttccactactttcaccgcgcccgcgccaccgtttgcccccttcctccgccaccaccacagtgccacaccactcctaaccctaatccgcgcgagccaaatcttagccgcaagatccattcgccgcatgcctctcccttcccggcggcagcgccggctaagctgagccggacaggtaactcccttcgacgccccggcgccgttgctgtcacagccggcgccatgggctgcgtctgcggccgcccctccgcctttgacgacggccagtgccgcgcgacgcctccgccggccgcgaagctctcggcggcggtgaggagcaaggaggaagcacggaaacagcagcagctccagcttcagcagcatgtgagggcaggaagcggaagggaggaggcgctcgagaggaggcgagcaatgatggcgatggcggcggtgtgccaggtgaggagcccggtgccgagggcggttgaggcggagcatgtggccgtggggtggccgccgtggctcgtcgccgtcgccccggaggccgtgcgcggatgggtgccccgccgcgccgagtcgttcgagaagctcgacaagattggtcagggtacatacagtaatgtttacagagctcgtgacctcgaaaaggagaagattgttgctttgaagaaagtgcggtttgataatttggaacctgagagcgtgaaatttatggcaagggaaatcctcattttgcgccgacttgatcatccaaatgttatcaaactagagggtctagtaacatcaagaatgtcctgcagcttatatcttgtttttgagtacatggagcatgatctagccggactagcttctttccctggagtaaaatttactgagtctcaggtaaagtgttacatgcaacagctcctccgtggtcttgagcattgccacagccgtcacattctgcaccgtgacattaagggttcaaatctcttgattgataaccgaggcatattgaagatagcagattttggattagcaagtttctttgatcctgaacaacgacaccctttgactagtcgtgttgtcacgctatggtataggccaccagagctcttgcttggtgccaccaattatggtgttgctgtagacctctggagtgctggctgcattcttgccgagctatatgctggcaagcctatcatgcctggtagaacagaggttgagcagttgcataaaatatttaaactctgtggttcaccgtcagaggattattggaggaaatctaagcttccccatgccaccattttcaaaccgcaacacccgtatgcaaggcgtgtaccagaaacatttaaagagttccctgttcctgctctggcattagtagatgttcttctttcagtagacccagctgatcgtggaactgcgtcttctgcattgcaaagtgagttttttacaacaaaaccatatgcctgcaatccttcaagcttgcctaggtaccccccaagcaaagagtttgatgcaaaacgtcgggaggaggaagctcgaagtcatgcactttttaggcaaggtgttactggaggaaagcaacataaacatgaccctgaaagaagaaccagagaatcaagagcagtccctgcccctgaggcaaatgcagaattagtatcatcattgcagaaaaggcaagcccaagctaataccaggagcaggagcgaaatgttcaatccctgcaaagaagactccgcgtccggattccgaatcgaaccaccccggccaactcctgttaccgagtcttctgaagacccacaacgtgcctacccaaccaggatcttccattctgggcctctagttaaccagagccagccatcaaaggctggaggcggcaaaaatggtgaacctcaggtccctggtgttgcgaatcaccctgtggttttgtcgacaagatcaggtccccgggcagacgatagcggccggacaatggtcgctcaagctgaagcatttgctcatgggcggaggctgtcggagtccatcaatgagcatttcagtaacagtgggaagtacgatcaagtgttcccgaagaaggatgacaggaacattagggctgatggagctattggctacggatccaaaggcagcaagatccaccactctgggcccctgacctgtccttcaggcagcaacgtcgacgagatgctgaaggagaacgaccggcaaatccaagaagtgttccggcgaacccgggtggagaagtcgcgagcgaggagggaccatggacatcaccagggcggtataagacctggcgatttcggcgccatcccagtcttcccttccagccgctccagctatcaggctgtgcagcagtaaggccggcgctcgaacaagatcggttggcgttggaacctccgatgtgtttcggtcccacgctttttccgggaggggatgtgtagcatacgctatgctatgctatgtacagggacagggaggcagcagcagcagccgtgtagagactctgaaggtgaggagagggggaggtgatttgtttattggcggcgattcgagtgtctcggtgaccaaactcgtgtatcgtcaggtagttttgagatgttcgctgcaactgcaatgcaatatggtgtgtgtatctcagtctcagctcgccaagacgaagttggccaccaagagcattttcactgtgatggcatcaaatctttcaaacccatgctgagacttgggagctttgttgaagcacctgttcttgtgatc

SEQ ID NO: 29077 - DNA, 3211 bp, Zea Mays
accaaatttacagatacgtccatcctctctcgaagccgccgcctcctgccgtcctgccactgcgagtggccagtgcccactgcccagtggccgttgctggttgctgctccccttccactcccacagttccactactttcaccgcgcccgcgccaccgtttgcccccttcctccgccaccaccacagtgccacaccactcctaaccctaatccgcgcgagccaaatcttagccgcaagatccattcgccgcatgcctctcccttcccggcggcagcgccggctaagctgagccggacaggtaactcccttcgacgccccggcgccgttgctgtcacagccggcgccatgggctgcgtctgcggccgcccctccgcctttgacgacggccagtgccgcgcgacgcctccgccggccgcgaagctctcggcggcggtgaggagcaaggaggaagcacggaaacagcagcagctccagcttcagcagcatgtgagggcaggaagcggaagggaggaggcgctcgagaggaggcgagcaatgatggcgatggcggcggtgtgccaggtgaggagcccggtgccgagggcggttgaggcggagcatgtggccgtggggtggccgccgtggctcgtcgccgtcgccccggaggccgtgcgcggatgggtgccccgccgcgccgagtcgttcgagaagctcgacaagattggtcagggtacatacagtaatgtttacagagctcgtgacctcgaaaaggagaagattgttgctttgaagaaagtgcggtttgataatttggaacctgagagcgtgaaatttatggcaagggaaatcctcattttgcgccgacttgatcatccaaatgttatcaaactagagggtctagtaacatcaagaatgtcctgcagcttatatcttgtttttgagtacatggagcatgatctagccggactagcttctttccctggagtaaaatttactgagtctcaggtaaagtgttacatgcaacagctcctccgtggtcttgagcattgccacagccgtcacattctgcaccgtgacattaagggttcaaatctcttgattgataaccgaggcatattgaagatagcagattttggattagcaagtttctttgatcctgaacaacgacaccctttgactagtcgtgttgtcacgctatggtataggccaccagagctcttgcttggtgccaccaattatggtgttgctgtagacctctggagtgctggctgcattcttgccgagctatatgctggcaagcctatcatgcctggtagaacagaggttgagcagttgcataaaatatttaaactctgtggttcaccgtcagaggattattggaggaaatctaagcttccccatgccaccattttcaaaccgcaacacccgtatgcaaggcgtgtaccagaaacatttaaagagttccctgttcctgctctggcattagtagatgttcttctttcagtagacccagctgatcgtggaactgcgtcttctgcattgcaaagtgaggtatacaatttccctcttaaacctatctccagcaacacaagacatttgtctttgttttcgaactggtcattcttttttatgagacatgttgtttcaatactcattttttgcattacttgaaatattttataatttgagtttgaacatggcaaaacgaactattttgtgcttaccagttgccagtctatactcgatagacgatagtctggcaatcaggaagaaggggtagcaccgtacatttcgatgtcatgcttttaatcttattggaatagccacttttctccttctattatcaagtaatatgcccaaaaatggcattgtttcctttctatttcattcatctcgccttaaataattgactttgaacttactgttgtgtctgtagttttttacaacaaaaccatatgcctgcaatccttcaagcttgcctaggtaccccccaagcaaagagtttgatgcaaaacgtcgggaggaggaagctcgaaggcaaggtgttactggaggaaagcaacataaacatgaccctgaaagaagaaccagagaatcaagagcagtccctgcccctgaggcaaatgcagaattagtatcatcattgcagaaaaggcaagcccaagctaataccaggagcaggagcgaaatgttcaatccctgcaaagaagactccgcgtccggattccgaatcgaaccaccccggccaactcctgttaccgagtcttctgaagacccacaacgtgcctacccaaccaggatcttccattctgggcctctagttaaccagagccagccatcaaaggctggaggcggcaaaaatggtgaacctcaggtccctggtgttgcgaatcaccctgtggttttgtcgacaagatcaggtccccgggcagacgatagcggccggacaatggtcgctcaagctgaagcatttgctcatgggcggaggctgtcggagtccatcaatgagcatttcagtaacagtgggaagtacgatcaagtgttcccgaagaaggatgacaggaacattagggctgatggagctattggctacggatccaaaggcagcaagatccaccactctgggcccctgacctgtccttcaggcagcaacgtcgacgagatgctgaaggagaacgaccggcaaatccaagaagtgttccggcgaacccgggtggagaagtcgcgagcgaggagggaccatggacatcaccagggcggtataagacctggcgatttcggcgccatcccagtcttcccttccagccgctccagctatcaggctgtgcagcagtaaggccggcgctcgaacaagatcggttggcgttggaacctccgatgtgtttcggtcccacgctttttccgggaggggatgtgtagcatacgctatgctatgctatgtacagggacagggaggcagcagcagcagccgtgtagagactctgaaggtgaggagagggggaggtgatttgtttattggcggcgattcgagtgtctcggtgaccaaactcgtgtatcgtcaggtagttttgagatgttcgctgcaactgcaatgcaatatggtgtgtgtatctcagtctcagctcgccaagacgaagttggccaccaagagcattttcactgtgatggcatcaaatctttcaaacccatgctgagacttgggagctttgttgaagcacctgttcttgtgatc

SEQ ID NO: 29078 - DNA, 3043 bp, Zea Mays
accaaatttacagatacgtccatcctctctcgaagccgccgcctcctgccgtcctgccactgcgagtggccagtgcccactgcccagtggccgttgctggttgctgctccccttccactcccacagttccactactttcaccgcgcccgcgccaccgtttgcccccttcctccgccaccaccacagtgccacaccactcctaaccctaatccgcgcgagccaaatcttagccgcaagatccattcgccgcatgcctctcccttcccggcggcagcgccggctaagctgagccggacaggtaactcccttcgacgccccggcgccgttgctgtcacagccggcgccatgggctgcgtctgcggccgcccctccgcctttgacgacggccagtgccgcgcgacgcctccgccggccgcgaagctctcggcggcggtgaggagcaaggaggaagcacggaaacagcagcagctccagcttcagcagcatgtgagggcaggaagcggaagggaggaggcgctcgagaggaggcgagcaatgatggcgatggcggcggtgtgccaggtgaggagcccggtgccgagggcggttgaggcggagcatgtggccgtggggtggccgccgtggctcgtcgccgtcgccccggaggccgtgcgcggatgggtgccccgccgcgccgagtcgttcgagaagctcgacaagattggtcagggtacatacagtaatgtttacagagctcgtgacctcgaaaaggagaagattgttgctttgaagaaagtgcggtttgataatttggaacctgagagcgtgaaatttatggcaagggaaatcctcattttgcgccgacttgatcatccaaatgttatcaaactagagggtctagtaacatcaagaatgtcctgcagcttatatcttgtttttgagtacatggagcatgatctagccggactagcttctttccctggagtaaaatttactgagtctcaggtaaagtgttacatgcaacagctcctccgtggtcttgagcattgccacagccgtcacattctgcaccgtgacattaagggttcaaatctcttgattgataaccgaggcatattgaagatagcagattttggattagcaagtttctttgatcctgaacaacgacaccctttgactagtcgtgttgtcacgctatggtataggccaccagagctcttgcttggtgccaccaattatggtgttgctgtagacctctggagtgctggctgcattcttgccgagctatatgctggcaagcctatcatgcctggtagaacagaggttgagcagttgcataaaatatttaaactctgtggttcaccgtcagaggattattggaggaaatctaagcttccccatgccaccattttcaaaccgcaacacccgtatgcaaggcgtgtaccagaaacatttaaagagttccctgttcctgctctggcattagtagatgttcttctttcagtagacccagctgatcgtggaactgcgtcttctgcattgcaaagtgagttttttacaacaaaaccatatgcctgcaatccttcaagcttgcctaggtaccccccaagcaaagagtttgatgcaaaacgtcgggaggaggaagctcgaagaggacagcaattgttatcttttcttccttgattgtcgttctctgtgcccaagggatagatgttgtgaaacagagtgatgaggcaaggtgttactggaggaaagcaacataaacatgaccctgaaagaagaaccagagaatcaagagcagtccctgcccctgaggcaaatgcagaattagtatcatcattgcaggtaattctccacttgttgacagttgacacttcctttatctttagctttggagatgcacatgtactacttgttttttttatcatttcaaaccatacataacctgtgttgcttgctgtatgaatatctttgacctcagaaaaggcaagcccaagctaataccaggagcaggagcgaaatgttcaatccctgcaaagaagactccgcgtccggattccgaatcgaaccaccccggccaactcctgttaccgagtcttctgaagacccacaacgtgcctacccaaccaggatcttccattctgggcctctagttaaccagagccagccatcaaaggctggaggcggcaaaaatggtgaacctcaggtccctggtgttgcgaatcaccctgtggttttgtcgacaagatcaggtccccgggcagacgatagcggccggacaatggtcgctcaagctgaagcatttgctcatgggcggaggctgtcggagtccatcaatgagcatttcagtaacagtgggaagtacgatcaagtgttcccgaagaaggatgacaggaacattagggctgatggagctattggctacggatccaaaggcagcaagatccaccactctgggcccctgacctgtccttcaggcagcaacgtcgacgagatgctgaaggagaacgaccggcaaatccaagaagtgttccggcgaacccgggtggagaagtcgcgagcgaggagggaccatggacatcaccagggcggtataagacctggcgatttcggcgccatcccagtcttcccttccagccgctccagctatcaggctgtgcagcagtaaggccggcgctcgaacaagatcggttggcgttggaacctccgatgtgtttcggtcccacgctttttccgggaggggatgtgtagcatacgctatgctatgctatgtacagggacagggaggcagcagcagcagccgtgtagagactctgaaggtgaggagagggggaggtgatttgtttattggcggcgattcgagtgtctcggtgaccaaactcgtgtatcgtcaggtagttttgagatgttcgctgcaactgcaatgcaatatggtgtgtgtatctcagtctcagctcgccaagacgaagttggccaccaagagcattttcactgtgatggcatcaaatctttcaaacccatgctgagacttgggagctttgttgaagcacctgttcttgtgatc

SEQ ID NO: 29079 - DNA, 3873 bp, Zea Mays
accaaatttacagatacgtccatcctctctcgaagccgccgcctcctgccgtcctgccactgcgagtggccagtgcccactgcccagtggccgttgctggttgctgctccccttccactcccacagttccactactttcaccgcgcccgcgccaccgtttgcccccttcctccgccaccaccacagtgccacaccactcctaaccctaatccgcgcgagccaaatcttagccgcaagatccattcgccgcatgcctctcccttcccggcggcagcgccggctaagctgagccggacaggtaactcccttcgacgccccggcgccgttgctgtcacagccggcgccatgggctgcgtctgcggccgcccctccgcctttgacgacggccagtgccgcgcgacgcctccgccggccgcgaagctctcggcggcggtgaggagcaaggaggaagcacggaaacagcagcagctccagcttcagcagcatgtgagggcaggaagcggaagggaggaggcgctcgagaggaggcgagcaatgatggcgatggcggcggtgtgccaggtgaggagcccggtgccgagggcggttgaggcggagcatgtggccgtggggtggccgccgtggctcgtcgccgtcgccccggaggccgtgcgcggatgggtgccccgccgcgccgagtcgttcgagaagctcgacaagattggtcagggtacatacagtaatgtttacagagctcgtgacctcgaaaaggagaagattgttgctttgaagaaagtgcggtttgataatttggaacctgagagcgtgaaatttatggcaagggaaatcctcattttgcgccgacttgatcatccaaatgttatcaaactagagggtctagtaacatcaagaatgtcctgcagcttatatcttgtttttgagtacatggagcatgatctagccggactagcttctttccctggagtaaaatttactgagtctcaggtaaagtgttacatgcaacagctcctccgtggtcttgagcattgccacagccgtcacattctgcaccgtgacattaagggttcaaatctcttgattgataaccgaggcatattgaagatagcagattttggattagcaagtttctttgatcctgaacaacgacaccctttgactagtcgtgttgtcacgctatggtataggccaccagagctcttgcttggtgccaccaattatggtgttgctgtagacctctggagtgctggctgcattcttgccgagctatatgctggcaagcctatcatgcctggtagaacagaggttgagcagttgcataaaatatttaaactctgtggttcaccgtcagaggattattggaggaaatctaagcttccccatgccaccattttcaaaccgcaacacccgtatgcaaggcgtgtaccagaaacatttaaagagttccctgttcctgctctggcattagtagatgttcttctttcagtagacccagctgatcgtggaactgcgtcttctgcattgcaaagtgaggtatacaatttccctcttaaacctatctccagcaacacaagacatttgtctttgttttcgaactggtcattcttttttatgagacatgttgtttcaatactcattttttgcattacttgaaatattttataatttgagtttgaacatggcaaaacgaactattttgtgcttaccagttgccagtctatactcgatagacgatagtctggcaatcaggaagaaggggtagcaccgtacatttcgatgtcatgcttttaatcttattggaatagccacttttctccttctattatcaagtaatatgcccaaaaatggcattgtttcctttctatttcattcatctcgccttaaataattgactttgaacttactgttgtgtctgtagttttttacaacaaaaccatatgcctgcaatccttcaagcttgcctaggtaccccccaagcaaagagtttgatgcaaaacgtcgggaggaggaagctcgaaggtaagcacatccaacttggtgctcgcattttatctatcgatcaaaaacaattcttaatgaggcaatgatataagcacttcactaggccatggtgcaccaaatctatctttgtcgagcccatcaaacttagatgaatattattatgtttttcagaatcacatgaacatatactatctccatttcaaaagatccatcgtccacgatatctttgtgcaccttttgccatttgtactcacactgtgatagttgaaaaattgagttactggtgtgagtcatgtaacagaggacagcaattgttatcttttcttccttgattgtcgttctctgtgcccaagggatagatgttgtgaaacagagtgatgaggtgaatctgtcaatcccctctttctttatatattacacaacattgcatacaatgccatacatggatgctgcttcccctacacctacacagaattataacatttattttcctttttcatgtattagcatgtcctgtttattagacctgcactacttgtttcatttttctttctatttcctttagttcattgcctgctccatttgtgctatttaaatttcaatactcaagcaaaaggcaaccagcattgttgtcatacatttgattttttttttacaaatcatagtcatgcactttttaggcaaggtgttactggaggaaagcaacataaacatgaccctgaaagaagaaccagagaatcaagagcagtccctgcccctgaggcaaatgcagaattagtatcatcattgcagaaaaggcaagcccaagctaataccaggagcaggagcgaaatgttcaatccctgcaaagaagactccgcgtccggattccgaatcgaaccaccccggccaactcctgttaccgagtcttctgaagacccacaacgtgcctacccaaccaggatcttccattctgggcctctagttaaccagagccagccatcaaaggctggaggcggcaaaaatggtgaacctcaggtccctggtgttgcgaatcaccctgtggttttgtcgacaagatcaggtccccgggcagacgatagcggccggacaatggtcgctcaagctgaagcatttgctcatgggcggaggctgtcggagtccatcaatgagcatttcagtaacagtgggaagtacgatcaagtgttcccgaagaaggatgacaggaacattagggctgatggagctattggctacggatccaaaggcagcaagatccaccactctgggcccctgacctgtccttcaggcagcaacgtcgacgagatgctgaaggagaacgaccggcaaatccaagaagtgttccggcgaacccgggtggagaagtcgcgagcgaggagggaccatggacatcaccagggcggtataagacctggcgatttcggcgccatcccagtcttcccttccagccgctccagctatcaggctgtgcagcagtaaggccggcgctcgaacaagatcggttggcgttggaacctccgatgtgtttcggtcccacgctttttccgggaggggatgtgtagcatacgctatgctatgctatgtacagggacagggaggcagcagcagcagccgtgtagagactctgaaggtgaggagagggggaggtgatttgtttattggcggcgattcgagtgtctcggtgaccaaactcgtgtatcgtcaggtagttttgagatgttcgctgcaactgcaatgcaatatggtgtgtgtatctcagtctcagctcgccaagacgaagttggccaccaagagcattttcactgtgatggcatcaaatctttcaaacccatgctgagacttgggagctttgttgaagcacctgttcttgtgatc

SEQ ID NO: 29080 - DNA, 3092 bp, Zea Mays
accaaatttacagatacgtccatcctctctcgaagccgccgcctcctgccgtcctgccactgcgagtggccagtgcccactgcccagtggccgttgctggttgctgctccccttccactcccacagttccactactttcaccgcgcccgcgccaccgtttgcccccttcctccgccaccaccacagtgccacaccactcctaaccctaatccgcgcgagccaaatcttagccgcaagatccattcgccgcatgcctctcccttcccggcggcagcgccggctaagctgagccggacaggtaactcccttcgacgccccggcgccgttgctgtcacagccggcgccatgggctgcgtctgcggccgcccctccgcctttgacgacggccagtgccgcgcgacgcctccgccggccgcgaagctctcggcggcggtgaggagcaaggaggaagcacggaaacagcagcagctccagcttcagcagcatgtgagggcaggaagcggaagggaggaggcgctcgagaggaggcgagcaatgatggcgatggcggcggtgtgccaggtgaggagcccggtgccgagggcggttgaggcggagcatgtggccgtggggtggccgccgtggctcgtcgccgtcgccccggaggccgtgcgcggatgggtgccccgccgcgccgagtcgttcgagaagctcgacaagattggtcagggtacatacagtaatgtttacagagctcgtgacctcgaaaaggagaagattgttgctttgaagaaagtgcggtttgataatttggaacctgagagcgtgaaatttatggcaagggaaatcctcattttgcgccgacttgatcatccaaatgttatcaaactagagggtctagtaacatcaagaatgtcctgcagcttatatcttgtttttgagtacatggagcatgatctagccggactagcttctttccctggagtaaaatttactgagtctcaggtaaagtgttacatgcaacagctcctccgtggtcttgagcattgccacagccgtcacattctgcaccgtgacattaagggttcaaatctcttgattgataaccgaggcatattgaagatagcagattttggattagcaagtttctttgatcctgaacaacgacaccctttgactagtcgtgttgtcacgctatggtataggccaccagagctcttgcttggtgccaccaattatggtgttgctgtagacctctggagtgctggctgcattcttgccgagctatatgctggcaagcctatcatgcctggtagaacagaggttgagcagttgcataaaatatttaaactctgtggttcaccgtcagaggattattggaggaaatctaagcttccccatgccaccattttcaaaccgcaacacccgtatgcaaggcgtgtaccagaaacatttaaagagttccctgttcctgctctggcattagtagatgttcttctttcagtagacccagctgatcgtggaactgcgtcttctgcattgcaaagtgagttttttacaacaaaaccatatgcctgcaatccttcaagcttgcctaggtaccccccaagcaaagagtttgatgcaaaacgtcgggaggaggaagctcgaaggcaaggtgttactggaggaaagcaacataaacatgaccctgaaagaagaaccagagaatcaagagcagtccctgcccctgaggcaaatgcagaattagtatcatcattgcagaaaaggcaagcccaagctaataccaggagcaggagcgaaatgttcaatccctgcaaagaagactccgcgtccggattccgaatcgaaccaccccggccaactcctgttaccgagtcttctgaagacccacaacgtgcctacccaaccaggatcttccattctgggcctctagttaaccagagccagccatcaaaggctggaggcggcaaaaatggtgaacctcaggtccctggtgttgcgaatcaccctgtggttttgtcgacaagatcaggtccccgggcagacgatagcggccggacaatggtcgctcaagctgaagcatttgctcatgggcggaggctgtcggagtccatcaatgagcatttcagtaacagtgggaagtacgatcaagtgttcccgaagaaggatgacaggaacattagggctgatggagctattgtaagtaacgtcctacctgaaatgcaaaagggtgaaaagcttgattgtcctgtttcagccatggttactgcaatgttagttcagaactgtattttaacatgcatcgccaagctaaaaaaaaattataggttagcaaacccaggtattaggtcaatgaaacatgaaaaagggggcaaaaccgaaaccaaccccatctattcttagttcattaccagtacttttggaagaaaaaaaaactgaccattttctggctcttgacgaaacagggctacggatccaaaggcagcaagatccaccactctgggcccctgacctgtccttcaggcagcaacgtcgacgagatgctgaaggagaacgaccggcaaatccaagaagtgttccggcgaacccgggtggagaagtcgcgagcgaggagggaccatggacatcaccagggcggtataagacctggcgatttcggcgccatcccagtcttcccttccagccgctccagctatcaggctgtgcagcagtaaggccggcgctcgaacaagatcggttggcgttggaacctccgatgtgtttcggtcccacgctttttccgggaggggatgtgtagcatacgctatgctatgctatgtacagggacagggaggcagcagcagcagccgtgtagagactctgaaggtgaggagagggggaggtgatttgtttattggcggcgattcgagtgtctcggtgaccaaactcgtgtatcgtcaggtagttttgagatgttcgctgcaactgcaatgcaatatggtgtgtgtatctcagtctcagctcgccaagacgaagttggccaccaagagcattttcactgtgatggcatcaaatctttcaaacccatgctgagacttgggagctttgttgaagcacctgttcttgtgatc

SEQ ID NO: 29081 - DNA, 2537 bp, Zea Mays
ctccacacgctcccgtccgcgaccccagatcccatcccatgactgtcgtcgtgtcttcgcccctagctccatcatcccgtcgtgtcccgccgtgccatcctcctctctgctccacgatcacctcctctgctcccctcgtgcccagcgtcgcgtccgcgaaccagccccctcactctctctcccgcccggctctcctcgcccaactctctctcccgcaatcccgcggcctcgccccaaatcgccgccccgactctcggtcctcgcccatgctctccatggaaggagatcgaggaatccgcgtccgctgcgcccagctctctccacgtccatagtctccctggaaagcgattcctcgatctgcgtccgcttgcttcagctcctccgttcccaaacctcatcaaccagcatctctagggttttcgcagccaccgcccatggctgccactccagaccgcgtcaatgccgaccttcgtcgttgcctcaccgtcgacaccccaccgccgccccagctcttcgatccatgccaacgttttaggatttgcgaggcattttggcgggtgtttgatgtcgccacccccgtgggttttcatgctgttattgccggtgctggggttcgtggctgggccattgatgcttggtggcgccaggtgttcagatgcttcaaggggggtggtgtgctagctttatgttgcggtactacatctatggcagatttagtcgctgctgccatacaccagatgcccagatcttcttcaggccttcgtcggtggtcgaagcgtgaggctgatggtggcgctggtagtccacaaggaactggatttggacgcgctccccttgtctctaggtaagagacccaggtaaggaacagataagtggttgttctgatttctgatattagccaatttccccctccaatctattacagatttatatgcccctctagggatcagcagatcccacacctattacatgatctgtccttctagaatagaatccactctctatcttctgaaccggtactgccttcttcaatatcggccaccggccggtccacctcttcaagaatcgtccttcatcgccattcatcggatctgatctattacaagaatacatgcatattatagggtgggagataacatcccatataacattgtacctaatcctcatctatttgatagttgtttgtgtttttaaggctgcatgggtgtatgacagttttggcggtatccattgtttgaacgatgggagtatagaggacttctctgcataaataggtgttacttcgaggccacgctgtgcacgcaggtagcgaggggtggcgcgtcgccaccatggagggaggatgaccatgacggacacttcgtattcgaccttggcgagaacacccaccgatataaaatcttgagcagaatgggagaaggtttgggttttctgcaatctgtcgtctcctcttctgctgggtatctccgttattattctaatgaagagggctacgagttggattttttcgtaggtctagaggtcaagcctgggcccattgtcaagtgtgtgcttggacatgactttatcctgcacttttgagtgtaaatctcattgtaatgtgtacttacttttctctgttggatttgctctgtatacttacttggatttaatcctgtaggttgcatttggggaatcaaagaaaagtgaaagtgccatgtcaaagttgatgaccagaagcttgctattggaatgctctctattgaaaaatacccatagatagaaattgatttggttttcaataaagagtgtgagctgtcacacacattgaaaattaccaatgtatttttctttggttacagggttgagcaaccaatcgaggaagatgaataatggatcttgattatgaagatgaagaggagctaaacattccaataatcaaggaaaatggcaaatgtgatgggaaggaggaccagagaagtgaagaaaggaagttgttgcagcttcaaaatcaagtcttgggcttgaaaaaagtaaggatgagtatgagtctgatgattctgatgagggcaaaggtgatgggaaggaggaccagagaagtgaagagaaggcagttgctgcagcttcaaaatcaagtcttgggcttgaaaaaaaagcaaggatgagtatgagtctgatgattctgatgagggtgagtgattatctcctaaagaatgcaatgttgtgatttgaagggtatggtgcagaaaaattttgtgtgcatgtcatgatagtttcatacaacacacgggcgaacgcactgggagcctaccacctcccgtgctcaccattgccatgtttgatacctgactgctactgctattactttgaatctccggggtgctcatggagtcatggtgcatatgctcatgtttgcagggtgtcagtttttttcatcgtctacttctagagataacaactttagtatgttggttaaagattctcggtgtgctaagcttttctttttttgcttcatatgaaactcaactatatagatggtgccctactttacattttgc

SEQ ID NO: 29082 - DNA, 1999 bp, Zea Mays
tatttccaggaaaacgttttctgggcctcgtctcgactgaaactcttcgagccttcgacgtgcctctcctccgctcgtggccaccgatttcactggcttcatttcgaatcataaatttcatctcctggagtgttgctttgcttgctcctggaatcttcggaaccgaaggccaccgcgccaaccgcccaattaccgaaccaaaccctaccggtcgcggctcctccatagtccatactctcgcgcgcctaaaccctagccatcctcctcgccgccggcgaccgccgccatgagccgctacgacggccgcgctgcggacgcgggctcctaccgcgaccgccgcagcgagggggcgttcggaggcgggtcgagggcgttctcggcgccgagcaaggcggacgcttccgcggcggcctcggagctagatgggctgccgcgcttcgagaagaacttctacgtggagtcacccgcggtggccggcatgacggaggaagaggtggaggcgtaccgccgccgccgggagatcaccgtcgacggccgcgacgtgcccaagccggtgcgtgagttccgtgatgtgggcttcccagaatatgtgttgcaagagatcacaaaagctggttttgtggaacctacccctatccaatcgcaaggttggccgatggcattgagaggccgcgaccttattggcattgcagagacaggatcagggaaaactcttgcttaccttttacctgccattgttcatgtgaatgcgcagcctattctttcccctggcgatggtccaattgtcttggtgttagctcctacacgtgaacttgctgttcagatacagcaagaagcaaccaagtttggtgcatcatcaaagataaaaagtacttgcatatatggtggtgtgccaaaaggtccacaagttcgtgatcttcaaaaagatgaagcagaccggatgctagacatgggatttgaacctcagattaagaaaattgtttctcagattcgtccagatcgccaaacactttactggagtgctacctggccgaaggaagttgagcagctagcaaggaatttcctttttgacccatacaaggtcactattggttctgaagacttgaaggctaatcatgccattgttcagcatgtagagatattatctgagagtcagaagtataacaagctggttaatctactggaggatataatggatggtagccgaattttaatatttatggacaccaagaagggatgcgatcagactactagacagcttcgaatggatggttggcctgctttgtctatccatggtgacaagagccaagcagaacgggattgggtcctttctgaatttaagtcagggaaaagtcctattatgacggccactgatgttgctgctcgaggcctagatgtcaaggatgtgaagtatgtcattaactatgactttccggggtcactcgaggattatgttcatcgtataggtcgaactggcagagcaggtgcaaaaggaacagcgtacacctttttcactgcagctaatgccagatttgccaaggaacttattaatattctggaagaagctggacaaaaggtcagctctgaattagctgctatgggtcgtggtgcacctcctccatcttcaggttaccgtgatagatatagggggtatgggggtggccgatcgtggagttgacgttcaaatgcttagttgctgctaagagcaatgctttacgtttgtttgttgatggatatgttgttttggcgcactgataagagcaatgctttacattttggctagtattcggtaatgatggattcacatactcttggatattgacctgtctcgatgctagaaaagtggcatgatatcatgcctgcaatatcattagtttatttttagccatagtttcagattgacagcattgcccataattagctcacatcagaggtaagaatttgtagtaaacatcattccatccatgatttggtgctcatttttactcttcattttgga

SEQ ID NO: 29083 - DNA, 2158 bp, Zea Mays
tatttccaggaaaacgttttctgggcctcgtctcgactgaaactcttcgagccttcgacgtgcctctcctccgctcgtggccaccgatttcactggcttcatttcgaatcataaatttcatctcctggagtgttgctttgcttgctcctggaatcttcggaaccgaaggccaccgcgccaaccgcccaattaccgaaccaaaccctaccggtcgcggctcctccatagtccatactctcgcgcgcctaaaccctagccatcctcctcgccgccggcgaccgccgccatgagccgctacgacggccgcgctgcggacgcgggctcctaccgcgaccgccgcagcgagggggcgttcggaggcgggtcgagggcgttctcggcgccgagcaaggcggacgcttccgcggcggcctcggagctagatgggctgccgcgcttcgagaagaacttctacgtggagtcacccgcggtggccggcatgacggaggaagaggtggaggcgtaccgccgccgccgggagatcaccgtcgacggccgcgacgtgcccaagccggtgcgtgagttccgtgatgtgggcttcccagaatatgtgttgcaagagatcacaaaagctggttttgtggaacctacccctatccaatcgcaaggttggccgatggcattgagaggccgcgaccttattggcattgcagagacaggatcagggaaaactcttgcttaccttttacctgccattgttcatgtgaatgcgcagcctattctttcccctggcgatggtccaattgtcttggtgttagctcctacacgtgaacttgctgttcagatacagcaagaagcaaccaagtttggtgcatcatcaaagataaaaagtacttgcatatatggtggtgtgccaaaaggtccacaagttcgtgatcttcaaaaaggtgttgaaattgttatagctacaccaggacgactaattgatatgattgaatcacatcatacaaacttgcgaagggtcacatatcttgttttagatgaagcagaccggatgctagacatgggatttgaacctcagattaagaaaattgtttctcagattcgtccagatcgccaaacactttactggagtgctacctggccgaaggaagttgagcagctagcaaggaatttcctttttgacccatacaaggtcactattggttctgaagacttgaaggctaatcatgccattgttcagcatgtagagatattatctgagagtcagaagtataacaagctggttaatctactggaggatataatggatggtagccgaattttaatatttatggacaccaagaagggatgcgatcagactactagacagcttcgaatggatggttggcctgctttgtctatccatggtgacaagagccaagcagaacgggattgggtcctttctgaatttaagtcagggaaaagtcctattatgacggccactgatgttgctgctcgaggcctagatgtcaaggatgtgaagtatgtcattaactatgactttccggggtcactcgaggattatgttcatcgtataggtcgaactggcagagcaggtgcaaaaggaacagcgtacacctttttcactgcagctaatgccagatttgccaaggaacttattaatattctggaagaagctggacaaaaggtcagctctgaattagctgctatgggtcgtggtgcacctcctccatcttcaggttaccgtgatagatatagggggtatgggggtggccgatcgtggagttgacgttcaaatgcttagttgctgctaagagcaatgctttacgtttgtttgttgatggatatgttgttttggcgcactgataagagcaatgctttacattttggctagtattcgcataattcaatgttcatccctgaaaaatcgcagtctgaaatcaatagctctgttatagcatgtggtaagcaaggatctggcagaagatggggttgtggtcatcgctgctgtcccgtatcgaatacatctgtcaatcggagctatctgcaacgctaagctgaaaactggattttgtctgtatcaatagcttctggattttagaaattacctgcatgattgcgtgaagatcttatcatcatcatcatctgttgtttagattataccatttgtttacat

SEQ ID NO: 29084 - DNA, 1456 bp, Zea Mays
atccatcagtgtggactgtcgaaccgggggatgggttgggacgttgggtcctggtccacgtgaccacgtctagcagtagcagactagcaggctctcgaaactcacgttcccgtgtcgctcaactggcacaggactggacccgtcccgtacggcatcgcaccccgcagccgcaggccgcatcttcctcgcgtgctctgccctctgtgcctgcccatccgttgatcccatcggcttccccttcctcttccccgatccccttcctcccccgatcccatccaattccacttccacaccgcgggcctcgccgccgacgccgacgccgccggccatgtccaagtacggcaccattcccacctcctcctccgcgggcggagggcccgtgcccctcggcggcgcctccccgctcgatttcatctcccgcgccaaggctcggggcgcctcggcgctggcgacgcgccggccctggcgcgagctcgtggacgtccacgccgtcggcctgcccccgagcctcggcgacgcgtacctccgcgtgcgcgccaacctcgcccacttcgccatgaactatgccatcgtcgtcctcgtcgtcgtcttcctctccctcctctggcaccccgtctccctcatcgtattcctcgtctgcatgcttgcctggctcgtcctctacttcctccgcgacgagcccctcgtcctcttcggccgcgtcgtcgccgacggctacgtcctcgccgtgctcgccgtcgtcacgctcgtcctgctcctcctcaccgacgccaccgccaacatcctctcctcgctgctcatcggcctcgtgctcgtcctcgtccacgccgcgctgcacaaggcggaggacaacgccgccgacgaggctgaccgctggtacgcgccggtgtcacagcagccgtcgcactgaggatctgaatgtggccgttctgcgccttggctgtgatcctattctgtactccctgtttccgagttcctccagctgcgcgagctgggccatccccatctcatctgcgatgaaaaacctgtccctgttggttgtgattcacctgctgccggttccatgggaagttttggatccagcgacgacgcagggctgttaaacttgttctccacgcccatttctgtgggacctgcgttcagattttatcgacgccatgcatgtaggcaagggatgctgatatttcagacatggttttattctacgtggtgtctgggagcctgggaagaaatctcgttttgcttgattgccggtttctctcttttttttttgaaatagaaatgaggtgtaactctgggattaggcctgatcccagttgtttcggctgcgcaggcaccaaccgagtgctaaactgctaattagtctgtctccagcggattgtggtcggaccatataaactgtactgtttatcccgaaatttaaaatatgagatgtgataggccgctgaagacacat

SEQ ID NO: 29085 - DNA, 1505 bp, Zea Mays
atccatcagtgtggactgtcgaaccgggggatgggttgggacgttgggtcctggtccacgtgaccacgtctagcagtagcagactagcaggctctcgaaactcacgttcccgtgtcgctcaactggcacaggactggacccgtcccgtacggcatcgcaccccgcagccgcaggccgcatcttcctcgcgtgctctgccctctgtgcctgcccatccgttgatcccatcggcttccccttcctcttccccgatccccttcctcccccgatcccatccaattccacttccacaccgcgggcctcgccgccgacgccgacgccgccggccatgtccaagtacggcaccattcccacctcctcctccgcgggcggagggcccgtgcccctcggcggcgcctccccgctcgatttcatctcccgcgccaaggctcggggcgcctcggcgctggcgacgcgccggccctggcgcgagctcgtggacgtccacgccgtcggcctgcccccgagcctcggcgacgcgtacctccgcgtgcgcgccaacctcgcccacttcgccatgaactatgccatcgtcgtcctcgtcgtcgtcttcctctccctcctctggcaccccgtctccctcatcgtattcctcgtctgcatgcttgcctggctcgtcctctacttcctccgcgacgagcccctcgtcctcttcggccgcgtcgtcgccgacggctacgtcctcgccgtgctcgccgtcgtcacgctcgtcctgctcctcctcaccgacgccaccgccaacatcctctcctcgctgctcatcggcctcgtgctcgtcctcgtccacgccgcgctgcacaaggcggaggacaacgccgccgacgaggctgaccgctggatctgaatgtggccgttctgcgccttggctgtgatcctattctgtactccctgtttccgagttcctccagctgcgcgagctgggccatccccatctcatctgcgatgaaaaacctgtccctgttggttgtgattcacctgctgccggttccatgggaagttttggatccagcgacgacgcagggctgttaaacttgttctccacgcccatttctgtggtacgtttaaagcgtctcgttcacgtgtatcaaatccggactgaagtctagtgtacattttgagttggagaaatgtgatgccagggacctgcgttcagattttatcgacgccatgcatgtaggcaagggatgctgatatttcagacatggttttattctacgtggtgtctgggagcctgggaagaaatctcgttttgcttgattgccggtttctctcttttttttttgaaatagaaatgaggtgtaactctgggattaggcctgatcccagttgtttcggctgcgcaggcaccaaccgagtgctaaactgctaattagtctgtctccagcggattgtggtcggaccatataaactgtactgtttatcccgaaatttaaaatatgagatgtgataggccgctgaagacacat

SEQ ID NO: 29086 - DNA, 975 bp, Zea Mays
cccaccccacccgcaaaaccgaatccaaataatcgccaccgctctccgcaccgaatcgaagaaagcggcgatggcagcggagaagccggctccggtgcgcgtgctgtactgcggcgtctgcggcctcccggccgagtactgcgagttcggccccgacttccagcgctgcaagccctggctgcgggcgcacgcgcccggcgtctaccccgacgacctcgtcgccggtccctcctcgtccggcggtgcgggtggcgacagggacgtcgacaaggtcggggagcgcctccagggcgtcgggatctccgacggctccagcagcgccgcaggggatgcttccgcgtctaagcccgaagaggtcaaacgcctgcctggtggtgtaaagctgagtgatgcttcaaagaagcttgggaagaagtttgcaaccggagcttctgttgttaagggcccgaccgagaaggaacagattgacgtgcaaggggacatatcatatgatattgtggagttcattacagatacatggcctgatgtacctgagtcggccattttcttcattgaagatggaaggaaggttcctgccgcttgatgtcactatgaggcgcaggaccaatggatttacaattataacacagagataaagcaaaggcgtggctgtcaaggcatgtagcggccataccagttcgtctctttgtccgaagtcatggactgttcttccaagttttatcaggagtggcgttttgtttaccaccgtcacctgcttccatgtatgagatcaaatctatacagttaccagtttgttatatgtgtgatgtctgttgtccgtggcttccatgtttcgtcaaatatatataccgtggtccgtggcctgtgttagcaatagcgtggaggagaagggaagaggagacgaagaaaggagaggaacacgggaagcgcgtgcaggtggtttgcgacatccaatccaacactgctctgtttcag

SEQ ID NO: 29087 - DNA, 1827 bp, Zea Mays
gcaaaaccgaatccaaataatcgccaccgctctccgcaccgaatcgaagaaagcggcgatggcagcggagaagccggctccggtgcgcgtgctgtactgcggcgtctgcggcctcccggccgagtactgcgagttcggccccgacttccagcgctgcaagccctggctgcgggcgcacgcgcccggcgtctaccccgacgacctcgtcgccggtccctcctcgtccggcggtgcgggtggcgacagggacgtcgacaaggtcggggagcgcctccagggcgtcgggatctccgacggctccagcagcgccgcaggggatgcttccgcgtctaagcccgaagaggtcaaacgcctgcctggtggtaagctcaagaaaaaggacaagaaaaaaacggcagcggcagcggcagcggcaggaacagcaacatcaagccagcaacaaatatgatttggtgaggttgaagttgaaccatccgtgaggtggcccgtcccttttcccctcagcttctccacctcgcgcctatagatccctctcccccattacacctcaccgccaagctcacggagtagcagtgacaccgcagcttccaagaaccgccccccggcctgcggagcagagcagagcaatgtcttccaacggcaagcccaccccgcagcccccggcgggcggcaacggcccgcccaagatgtaccagcggcccatctaccggccgcagcaggcgcccgccaagcggcggcgcggcgggcggtcctgcccgttcagctgctgctgctgcttcttctggacggcgctcgtcgtcctgctcctcgccttcctggccgcagtggcgggcggcgccttctacctgctgtaccgcccgcagcggcccgcgttcacgctgaccgcggcgcgcgtgacgaggctgagcctgtcgccgtccgccacggcgcccgcgctgagcgacgccatcgacgtgacgctcacggcccggaaccccaacaggaagctcgcctacctctacgacgacttcgccgtgacggccgccacggccgccaacgccgtcccgctgggcgaggcctccgcgcccgggttcgcgcacggcgccggcaacgtcaccgtcatccgggccaccgtctccgcgtccgcgctcgcggtcgaccccgccgcggccgcctccgacgtcaagaggtccggcgagttcaccatcgctctggacctggagaccagggccggcgtcagggtgggcgcgctcaagactaagaagatcggcatcctggtgcactgcgacggcgtcaaggtggccgcgcccgcgcccgcgcccgcggcgccggccaagagcaagaagaagcttgcgaaggcggcggtagcggcagcggtggcgccggcggccgacgccccggcacccgccgcctccgcggctgtcgacgacgcgccggcgccgcccgccgcggccaccagcgtcgcgcgcgtgtgccaggtcaggatccgggtcaagatctggaagtggaccttctagtcacgtcggcagcctccgaggggccgcattgcaattttttcgggtataaaatggaaaatatggcgttgcttttcgcgtcggatgaagtttctcaactggaaccgaaccaaataccggtcgctgtaatttttttttgtgcttgaattttaccaaaaatttggcgggggaggtcgagaggcaggaagtgacttgcgtgctcaagccagtcagaggaggctatacatttctgttctgtagtgtgaggttttcttttttgtttttgtttttttttgtagtgccgtttcttcattttcattcatcttgctgtaggagtgcacggcggcactgggga

SEQ ID NO: 29088 - DNA, 2634 bp, Zea Mays
gtggtgctgtcccccctgctcctgctcctgcctccggggcgcggcgccttcccgtctcccttcctcctcctctcccaccgctcggcctcctccaccacacgcgctcggcggtgccctccccggcgcggcgccgaaatgcaggtggggcctcgtcggcttcccgcggctgcgacgggccggagcagctaacgccgcggcctggggctgtgatctggggccgcgccgcattgccgactgcctgccgccgggctcgcgcgcgcagttcctgcctgccggtggcgaggggaggcaagatgcggcatctcgctctcctcgcgcttcttctcgctcccgttctcggatccacaggcaccactctgtccccttctccggccgccactgattctcctgcaaaccaaggacaggcttctagtcctcctcaatctgcatttgctcttggtccagtagctgttccaactgcgccgaccactccatcggcgagtccttccccggagaaagccgcggctgtaagtcctgctgctcccacggagccacgaattgccccggctccagtggctcctcctaaagagtatagtgcacctcctccagttgaggttgcacccactgatcccaccgatgaggttcctccaccagtagctccaccacaagctgcagttggaaatcccactccaattcttcctgggacacctgcattgctaccttatgttcaggctcctgctccatctgtcgttctcaagcctaatccaccagtcgtggtgtcacctccacctgcgaataatcaaccaagtaggccggttgggtctgtccctccttatccaccccctgcatcgccccctccggcaaatggcattccaccatacccaccttcaggaaggtttcctgctattcctcctgccacttcagcagtcccacctccagccacatcacctgttattgcacaagcaccacagcgacgagcagatcctccaagtagagattataagaacggaaacgcagtgccgccagcaaatacttaccctcctacaaatctcaagaagcatcatgttccacatgcatcccctccaaagggatccactggtcaaactgtcccaggtcacaaatcaccagttacaggatctgcgcctgcaacaagtcctttgccccagaacacaaacatgccttcaatcccgaagaatgcttcatcagtgccacatgcccatccctcaccaccaagtatagctccagaattggcacccactggtagatctcatgctcagggatggaaatccagtaatcccaataacaaaacaaatagattacatgccccatcttatccaccgcctcgtgctcaagggcccgaggtctcacgaaccccaagacagactgggactaaaaactatactcaccatgcgcctccaccattccctcaaggacaccctagctttcctgtacactccccatccccttcaccagcctcatcgaggggtcctgcgaacgcgaagaaaagaaatcatatttctcctactcttccttcaatccctcccctaccagagccaaaagcaccgtcagcgcatcctatttggacattacctccaccaccacctaattcagattgcaattccttatcatgcccagagcctctaacagatccacctgcgggagcaccatgtgcatgtgtgctaccaatcagagttggaattcgtctaagcgttgacctttactcattttttccattggtctctgattttgctgaagaggtagcttcaggggtaaacatggcacagaggcaggtccgtgtaatgggtgcgaacgttgcaggtgatcaacctgacaaaacaatggttcttgttgatctagttccagtgcaagtgaagttcgacaatgctacagcattttcagcatttgaaagcttgtggagcaaaaaagtttctttaaaaccatcagtctttgggaactatgagattctctatgttgtatatccagggcttcctccttcaccaccttcagggcaaggtgttggggatggggcgtttggcaacaacagaaatgcaagggccgtgaagccccttggggtcgatgtaagaagtcccaagagaaaagtgaatggcagcctcattgctattgttgttttgtctactgttatagcattgattatttgctgtctggctgcatggtcgctaatcctcagattcaggggtccgagccacacagctcggggatttccacatactgcacttccaaaattttctaggtcatctggtacgtgtaactaacctgctaattttctgataattgcaccttgatgtgatgtaattggactagctctttgattcgtagcagaataacagtaacttttctccaatgaagtagtgccactgttgaaattcatcatgaacttgtagtctataagcaagttttttttatttggtatcctttccaaggaaaattccattgcttatttgaaatgccagccaacagtgcttgcaatgacttttcagttaaaaggctttcgtttcagtttctgcatcgtgttatgtgcccttgctagaataatatgcacagtttaggcagtactagttttcgttctgaccagtgttttaaaggtgtcgcctaggcgtccaggcgtctcagtcgcctagctaaatcagcaagagg

SEQ ID NO: 29089 - DNA, 2530 bp, Zea Mays
cctgctcctgcctccggggcgcggcgccttcccgtctcccttcctcctcctctcccaccgctcggcctcctccaccacacgcgctcggcggtgccctccccggcgcggcgccgaaatgcaggtggggcctcgtcggcttcccgcggctgcgacgggccggagcagctaacgccgcggcctggggctgtgatctggggccgcgccgcattgccgactgcctgccgccgggctcgcgcgcgcagttcctgcctgccggtggcgaggggaggcaagatgcggcatctcgctctcctcgcgcttcttctcgctcccgttctcggatccacaggcaccactctgtccccttctccggccgccactgattctcctgcaaaccaaggacaggcttctagtcctcctcaatctgcatttgctcttggtccagtagctgttccaactgcgccgaccactccatcggcgagtccttccccggagaaagccgcggctgtaagtcctgctgctcccacggagccacgaattgccccggctccagtggctcctcctaaagagtatagtgcacctcctccagttgaggttgcacccactgatcccaccgatgaggttcctccaccagtagctccaccacaagctgcagttggaaatcccactccaattcttcctgggacacctgcattgctaccttatgttcaggctcctgctccatctgtcgttctcaagcctaatccaccagtcgtggtgtcacctccacctgcgaataatcaaccaagtaggccggttgggtctgtccctccttatccaccccctgcatcgccccctccggcaaatggcattccaccatacccaccttcaggaaggtttcctgctattcctcctgccacttcaggaaacgcagtgccgccagcaaatacttaccctcctacaaatctcaagaagcatcatgttccacatgcatcccctccaaagggatccactggtcaaactgtcccaggtcacaaatcaccagttacaggatctgcgcctgcaacaagtcctttgccccagaacacaaacatgccttcaatcccgaagaatgcttcatcagtgccacatgcccatccctcaccaccaagtatagctccagaattggcacccactggtagatctcatgctcagggatggaaatccagtaatcccaataacaaaacaaatagattacatgccccatcttatccaccgcctcgtgctcaagggcccgaggtctcacgaaccccaagacagactgggactaaaaactatactcaccatgcgcctccaccattccctcaaggacaccctagctttcctgtacactccccatccccttcaccagcctcatcgaggggtcctgcgaacgcgaagaaaagaaatcatatttctcctactcttccttcaatccctcccctaccagagccaaaagcaccgtcagcgcatcctatttggacattacctccaccaccacctaattcagattgcaattccttatcatgcccagagcctctaacagatccacctgcgggagcaccatgtgcatgtgtgctaccaatcagagttggaattcgtctaagcgttgacctttactcattttttccattggtctctgattttgctgaagaggtagcttcaggggtaaacatggcacagaggcaggtccgtgtaatgggtgcgaacgttgcaggtgatcaacctgacaaaacaatggttcttgttgatctagttccagtgcaagtgaagttcgacaatgctacagcattttcagcatttgaaagcttgtggagcaaaaaagtttctttaaaaccatcagtctttgggaactatgagattctctatgttgtatatccagggcttcctccttcaccaccttcagggcaaggtgttggggatggggcgtttggcaacaacagaaatgcaagggccgtgaagccccttggggtcgatgtaagaagtcccaagagaaaagtgaatggcagcctcattgctattgttgttttgtctactgttatagcattgattatttgctgtctggctgcatggtcgctaatcctcagattcaggggtccgagccacacagctcggggatttccacatactgcacttccaaaattttctaggtcatctggtacgtgtaactaacctgctaattttctgataattgcaccttgatgtgatgtaattggactagctctttgattcgtagcagaataacagtaacttttctccaatgaagtagtgccactgttgaaattcatcatgaacttgtagtctataagcaagttttttttatttggtatcctttccaaggaaaattccattgcttatttgaaatgccagccaacagtgcttgcaatgacttttcagttaaaaggctttcgtttcagtttctgcatcgtgttatgtgcccttgctagaataatatgcacagtttaggcagtactagttttcgttctgaccagtgttttaaaggtgtcgcctaggcgtccaggcgtctcagtcgcctagctaaatcagcaagagg

SEQ ID NO: 29090 - DNA, 2343 bp, Zea Mays
cctgcctccggggcgcggcgccttcccgtctcccttcctcctcctctcccaccgctcggcctcctccaccacacgcgctcggcggtgccctccccggcgcggcgccgaaatgcaggtggggcctcgtcggcttcccgcggctgcgacgggccggagcagctaacgccgcggcctggggctgtgatctggggccgcgccgcattgccgactgcctgccgccgggctcgcgcgcgcagttcctgcctgccggtggcgaggggaggcaagatgcggcatctcgctctcctcgcgcttcttctcgctcccgttctcggatccacaggcaccactctgtccccttctccggccgccactgattctcctgcaaaccaaggacaggcttctagtcctcctcaatctgcatttgctcttggtccagtagctgttccaactgcgccgaccactccatcggcgagtccttccccggagaaagccgcggctgtaagtcctgctgctcccacggagccacgaattgccccggctccagtggctcctcctaaagagtatagtgcacctcctccagttgaggttgcacccactgatcccaccgatgaggttcctccaccagtagctccaccacaagctgcagttggaaatcccactccaattcttcctgggacacctgcattgctaccttatgttcaggctcctgctccatctgtcgttctcaagcctaatccaccagtcgtggtgtcacctccacctgcgaataatcaaccaatccctccttatccaccccctgcatcgccccctccggcaaatggcattccaccatacccaccttcaggaaggtttcctgctattcctcctgccacttcagtcccacctccagccacatcacctgttattgcacaagcaccacagcgacgagcagatcctccaagtagagattataagaacggaaacgcagtgccgccagcaaatacttaccctcctacaaatctcaagaagcatcatgttccacatgcatcccctccaaagggatccactggtcaaactgtcccaggtcacaaatcaccagttacaggatctgcgcctgcaacaagtcctttgccccagaacacaaacatgccttcaatcccgaagaatgcttcatcagtgccacatgcccatccctcaccaccaagtatagctccagaattggcacccactggtagatctcatgctcagggatggaaatccagtaatcccaataacaaaacaaatagattacatgccccatcttatccaccgcctcgtgctcaagggcccgaggtctcacgaaccccaagacagactgggactaaaaactatactcaccatgcgcctccaccattccctcaaggacaccctagctttcctgtacactccccatccccttcaccagcctcatcgaggggtcctgcgaacgcgaagaaaagaaatcatatttctcctactcttccttcaatccctcccctaccagagccaaaagcaccgtcagcgcatcctatttggacattacctccaccaccacctaattcagattgcaattccttatcatgcccagagcctctaacagatccacctgcgggagcaccatgtgcatgtgtgctaccaatcagagttggaattcgtctaagcgttgacctttactcattttttccattggtctctgattttgctgaagaggtagcttcaggggtaaacatggcacagaggcaggtccgtgtaatgggtgcgaacgttgcaggtgatcaacctgacaaaacaatggttcttgttgatctagttccagtgcaagtgaagttcgacaatgctacagcattttcagcatttgaaagcttgtggagcaaaaaagtttctttaaaaccatcagtctttgggaactatgagattctctatgttgtatatccagggcttcctccttcaccaccttcagggcaaggtgttggggatggggcgtttggcaacaacagaaatgcaagggccgtgaagccccttggggtcgatctctttgattcgtagcagaataacagtaacttttctccaatgaagtagtgccactgttgaaattcatcatgaacttgtagtctataagcaagttttttttatttggtatcctttccaaggaaaattccattgcttatttgaaatgccagccaacagtgcttgcaatgacttttcagttaaaaggctttcgtttcagtttctgcatcgtgttatgtgcccttgctagaataatatgcacagtttaggcagtactagttttcgttctgaccagtgttttaaaggtgtcgcctaggcgtccaggcgtctcagtcgcctagctaaatcagcaagagg

SEQ ID NO: 29091 - DNA, 2590 bp, Zea Mays
cggcgccttcccgtctcccttcctcctcctctcccaccgctcggcctcctccaccacacgcgctcggcggtgccctccccggcgcggcgccgaaatgcaggtggggcctcgtcggcttcccgcggctgcgacgggccggagcagctaacgccgcggcctggggctgtgatctggggccgcgccgcattgccgactgcctgccgccgggctcgcgcgcgcagttcctgcctgccggtggcgaggggaggcaagatgcggcatctcgctctcctcgcgcttcttctcgctcccgttctcggatccacaggcaccactctgtccccttctccggccgccactgattctcctgcaaaccaaggacaggcttctagtcctcctcaatctgcatttgctcttggtccagtagctgttccaactgcgccgaccactccatcggcgagtccttccccggagaaagccgcggctgtaagtcctgctgctcccacggagccacgaattgccccggctccagtggctcctcctaaagagtatagtgcacctcctccagttgaggttgcacccactgatcccaccgatgaggttcctccaccagtagctccaccacaagctgcagttggaaatcccactccaattcttcctgggacacctgcattgctaccttatgttcaggctcctgctccatctgtcgttctcaagcctaatccaccagtcgtggtgtcacctccacctgcgaataatcaaccaagtaggccggttgggtctgtccctccttatccaccccctgcatcgccccctccggcaaatggcattccaccatacccaccttcaggaaggtttcctgctattcctcctgccacttcagtcccacctccagccacatcacctgttattgcacaagcaccacagcgacgagcagatcctccaagtagagattataagaacggaaacgcagtgccgccagcaaatacttaccctcctacaaatctcaagaagcatcatgttccacatgcatcccctccaaagggatccactggtcaaactgtcccaggtcacaaatcaccagttacaggatctgcgcctgcaacaagtcctttgccccagaacacaaacatgccttcaatcccgaagaatgcttcatcagtgccacatgcccatccctcaccaccaagtatagctccagaattggcacccactggtagatctcatgctcagggatggaaatccagtaatcccaataacaaaacaaatagattacatgccccatcttatccaccgcctcgtgctcaagggcccgaggtctcacgaaccccaagacagactgggactaaaaactatactcaccatgcgcctccaccattccctcaaggacaccctagctttcctgtacactccccatccccttcaccagcctcatcgaggggtcctgcgaacgcgaagaaaagaaatcatatttctcctactcttccttcaatccctcccctaccagagccaaaagcaccgtcagcgcatcctatttggacattacctccaccaccacctaattcagattgcaattccttatcatgcccagagcctctaacagatccacctgcgggagcaccatgtgcatgtgtgctaccaatcagagttggaattcgtctaagcgttgacctttactcattttttccattggtctctgattttgctgaagaggtagcttcaggggtaaacatggcacagaggcaggtccgtgtaatgggtgcgaacgttgcaggtgatcaacctgacaaaacaatggttcttgttgatctagttccagtgcaagtgaagttcgacaatgctacagcattttcagcatttgaaagcttgtggagcaaaaaagtttctttaaaaccatcagtctttgggaactatgagattctctatgttgtatatccagggcttcctccttcaccaccttcagggcaaggtgttggggatggggcgtttggcaacaacagaaatgcaagggccgtgaagccccttggggtcgatgtaagaagtcccaagagaaaagtgaatggcagcctcattgctattgttgttttgtctactgttatagcattgattatttgctgtctggctgcatggtcgctaatcctcagattcaggggtccgagccacacagctcggggatttccacatactgcacttccaaaattttctaggtcatctggtacgtgtaactaacctgctaattttctgataattgcaccttgatgtgatgtaattggactagctctttgattcgtagcagaataacagtaacttttctccaatgaagtagtgccactgttgaaattcatcatgaacttgtagtctataagcaagttttttttatttggtatcctttccaaggaaaattccattgcttatttgaaatgccagccaacagtgcttgcaatgacttttcagttaaaaggctttcgtttcagtttctgcatcgtgttatgtgcccttgctagaataatatgcacagtttaggcagtactagttttcgttctgaccagtgttttaaaggtgtcgcctaggcgtccaggcgtctcagtcgcctagctaaatcagcaagagg

SEQ ID NO: 29092 - DNA, 2530 bp, Zea Mays
cgccttcccgtctcccttcctcctcctctcccaccgctcggcctcctccaccacacgcgctcggcggtgccctccccggcgcggcgccgaaatgcaggtggggcctcgtcggcttcccgcggctgcgacgggccggagcagctaacgccgcggcctggggctgtgatctggggccgcgccgcattgccgactgcctgccgccgggctcgcgcgcgcagttcctgcctgccggtggcgaggggaggcaagatgcggcatctcgctctcctcgcgcttcttctcgctcccgttctcggatccacaggcaccactctgtccccttctccggccgccactgattctcctgcaaaccaaggacaggcttctagtcctcctcaatctgcatttgctcttggtccagtagctgttccaactgcgccgaccactccatcggcgagtccttccccggagaaagccgcggctgtaagtcctgctgctcccacggagccacgaattgccccggctccagtggctcctcctaaagagtatagtgcacctcctccagttgaggttgcacccactgatcccaccgatgaggttcctccaccagtagctccaccacaagctgcagttggaaatcccactccaattcttcctgggacacctgcattgctaccttatgttcaggctcctgctccatctgtcgttctcaagcctaatccaccagtcgtggtgtcacctccacctgcgaataatcaaccaagtaggccggttgggtctgtccctccttatccaccccctgcatcgccccctccggcaaatggcattccaccatacccaccttcaggaaggtttcctgctattcctcctgccacttcagtcccacctccagccacatcacctgttattgcacaagcaccacagcgacgagcagatcctccaagtagagattataagaacggaaacgcagtgccgccagcaaatacttaccctcctacaaatctcaagaagcatcatgttccacatgcatcccctccaaagggatccactggtcaaactgtcccaggtcacaaatcaccagttacaggatctgcgcctgcaacaagtcctttgccccagaacacaaacatgccttcaatcccgaagaatgcttcatcagtgccacatgcccatccctcaccaccaagtatagctccagaattggcacccactggtagatctcatgctcagggatggaaatccagtaatcccaataacaaaacaaatagattacatgccccatcttatccaccgcctcgtgctcaagggcccgaggtctcacgaaccccaagacagactgggactaaaaactatactcaccatgcgcctccaccattccctcaagaactgctggattccacaggaaatcatatttctcctactcttccttcaatccctcccctaccagagccaaaagcaccgtcagcgcatcctatttggacattacctccaccaccacctaattcagattgcaattccttatcatgcccagagcctctaacagatccacctgcgggagcaccatgtgcatgtgtgctaccaatcagagttggaattcgtctaagcgttgacctttactcattttttccattggtctctgattttgctgaagaggtagcttcaggggtaaacatggcacagaggcaggtccgtgtaatgggtgcgaacgttgcaggtgatcaacctgacaaaacaatggttcttgttgatctagttccagtgcaagtgaagttcgacaatgctacagcattttcagcatttgaaagcttgtggagcaaaaaagtttctttaaaaccatcagtctttgggaactatgagattctctatgttgtatatccagggcttcctccttcaccaccttcagggcaaggtgttggggatggggcgtttggcaacaacagaaatgcaagggccgtgaagccccttggggtcgatgtaagaagtcccaagagaaaagtgaatggcagcctcattgctattgttgttttgtctactgttatagcattgattatttgctgtctggctgcatggtcgctaatcctcagattcaggggtccgagccacacagctcggggatttccacatactgcacttccaaaattttctaggtcatctggtacgtgtaactaacctgctaattttctgataattgcaccttgatgtgatgtaattggactagctctttgattcgtagcagaataacagtaacttttctccaatgaagtagtgccactgttgaaattcatcatgaacttgtagtctataagcaagttttttttatttggtatcctttccaaggaaaattccattgcttatttgaaatgccagccaacagtgcttgcaatgacttttcagttaaaaggctttcgtttcagtttctgcatcgtgttatgtgcccttgctagaataatatgcacagtttaggcagtactagttttcgttctgaccagtgttttaaaggtgtcgcctaggcgtccaggcgtctcagtcgcctagctaaatcagcaagagg

SEQ ID NO: 29093 - DNA, 2069 bp, Zea Mays
ctcctctcccaccgctcggcctcctccaccacacgcgctcggcggtgccctccccggcgcggcgccgaaatgcaggtggggcctcgtcggcttcccgcggctgcgacgggccggagcagctaacgccgcggcctggggctgtgatctggggccgcgccgcattgccgactgcctgccgccgggctcgcgcgcgcagttcctgcctgccggtggcgaggggaggcaagatgcggcatctcgctctcctcgcgcttcttctcgctcccgttctcggatccacagcgccgaccactccatcggcgagtccttccccggagaaagccgcggctgtaagtcctgctgctcccacggagccacgaattgccccggctccagtggctcctcctaaagagtatagtgcacctcctccagttgaggttgcacccactgatcccaccgatgaggttcctccaccagtagctccaccacaagctgcagttggaaatcccactccaattcttcctgggacacctgcattgctaccttatgttcaggctcctgctccatctgtcgttctcaagcctaatccaccagtcgtggtgtcacctccacctgcgaataatcaaccaagtaggccggttgggtctgtccctccttatccaccccctgcatcgccccctccggcaaatggcattccaccatacccaccttcaggaaggtttcctgctattcctcctgccacttcagcagtcccacctccagccacatcacctgttattgcacaagcaccacagcgacgagcagatcctccaagtagagattataagaacggaaacgcagtgccgccagcaaatacttaccctcctacaaatctcaagaagcatcatgttccacatgcatcccctccaaagggatccactggtcaaactgtcccaggtcacaaatcaccagttacaggatctgcgcctgcaacaagtcctttgccccagaacacaaacatgccttcaatcccgaagaatgcttcatcagtgccacatgcccatccctcaccaccaagtatagctccagaattggcacccactggtagatctcatgctcagggatggaaatccagtaatcccaataacaaaacaaatagattacatgccccatcttatccaccgcctcgtgctcaagggcccgaggtctcacgaaccccaagacagactgggactaaaaactatactcaccatgcgcctccaccattccctcaaggacaccctagctttcctgtacactccccatccccttcaccagcctcatcgaggggtcctgcgaacgcgaagaaaagaaatcatatttctcctactcttccttcaatccctcccctaccagagccaaaagcaccgtcagcgcatcctatttggacattacctccaccaccacctaattcagaggtagcttcaggggtaaacatggcacagaggcaggtccgtgtaatgggtgcgaacgttgcaggtgatcaacctgacaaaacaatggttcttgttgatctagttccagtgcaagtgaagttcgacaatgctacagcattttcagcatttgaaagcttgtggagcaaaaaagtttctttaaaaccatcagtctttgggaactatgagattctctatgttgtatatccagggcttcctccttcaccaccttcagggcaaggtgttggggatggggcgtttggcaacaacagaaatgcaagggccgtgaagccccttggggtcgatctctttgattcgtagcagaataacagtaacttttctccaatgaagtagtgccactgttgaaattcatcatgaacttgtagtctataagcaagttttttttatttggtatcctttccaaggaaaattccattgcttatttgaaatgccagccaacagtgcttgcaatgacttttcagttaaaaggctttcgtttcagtttctgcatcgtgttatgtgcccttgctagaataatatgcacagtttaggcagtactagttttcgttctgaccagtgttttaaaggtgtcgcctaggcgtccaggcgtctcagtcgcctagctaaatcagcaagagg

SEQ ID NO: 29094 - DNA, 2550 bp, Zea Mays
ctcctctcccaccgctcggcctcctccaccacacgcgctcggcggtgccctccccggcgcggcgccgaaatgcaggtggggcctcgtcggcttcccgcggctgcgacgggccggagcagctaacgccgcggcctggggctgtgatctggggccgcgccgcattgccgactgcctgccgccgggctcgcgcgcgcagttcctgcctgccggtggcgaggggaggcaagatgcggcatctcgctctcctcgcgcttcttctcgctcccgttctcggatccacaggcaccactctgtccccttctccggccgccactgattctcctgcaaaccaaggacaggcttctagtcctcctcaatctgcatttgctcttggtccagtagctgttccaactgcgccgaccactccatcggcgagtccttccccggagaaagccgcggctgtaagtcctgctgctcccacggagccacgaattgccccggctccagtggctcctcctaaagagtatagtgcacctcctccagttgaggttgcacccactgatcccaccgatgaggttcctccaccagtagctccaccacaagctgcagttggaaatcccactccaattcttcctgggacacctgcattgctaccttatgttcaggctcctgctccatctgtcgttctcaagcctaatccaccagtcgtggtgtcacctccacctgcgaataatcaaccaatccctccttatccaccccctgcatcgccccctccggcaaatggcattccaccatacccaccttcaggaaggtttcctgctattcctcctgccacttcagcagtcccacctccagccacatcacctgttattgcacaagcaccacagcgacgagcagatcctccaagtagagattataagaacggaaacgcagtgccgccagcaaatacttaccctcctacaaatctcaagaagcatcatgttccacatgcatcccctccaaagggatccactggtcaaactgtcccaggtcacaaatcaccagttacaggatctgcgcctgcaacaagtcctttgccccagaacacaaacatgccttcaatcccgaagaatgcttcatcagtgccacatgcccatccctcaccaccaagtatagctccagaattggcacccactggtagatctcatgctcagggatggaaatccagtaatcccaataacaaaacaaatagattacatgccccatcttatccaccgcctcgtgctcaagggcccgaggtctcacgaaccccaagacagactgggactaaaaactatactcaccatgcgcctccaccattccctcaaggacaccctagctttcctgtacactccccatccccttcaccagcctcatcgaggggtcctgcgaacgcgaagaaaagaaatcatatttctcctactcttccttcaatccctcccctaccagagccaaaagcaccgtcagcgcatcctatttggacattacctccaccaccacctaattcagattgcaattccttatcatgcccagagcctctaacagatccacctgcgggagcaccatgtgcatgtgtgctaccaatcagagttggaattcgtctaagcgttgacctttactcattttttccattggtctctgattttgctgaagaggtagcttcaggggtaaacatggcacagaggcaggtccgtgtaatgggtgcgaacgttgcaggtgatcaacctgacaaaacaatggttcttgttgatctagttccagtgcaagtgaagttcgacaatgctacagcattttcagcatttgaaagcttgtggagcaaaaaagtttctttaaaaccatcagtctttgggaactatgagattctctatgttgtatatccagggcttcctccttcaccaccttcagggcaaggtgttggggatggggcgtttggcaacaacagaaatgcaagggccgtgaagccccttggggtcgatgtaagaagtcccaagagaaaagtgaatggcagcctcattgctattgttgttttgtctactgttatagcattgattatttgctgtctggctgcatggtcgctaatcctcagattcaggggtccgagccacacagctcggggatttccacatactgcacttccaaaattttctaggtcatctggtacgtgtaactaacctgctaattttctgataattgcaccttgatgtgatgtaattggactagctctttgattcgtagcagaataacagtaacttttctccaatgaagtagtgccactgttgaaattcatcatgaacttgtagtctataagcaagttttttttatttggtatcctttccaaggaaaattccattgcttatttgaaatgccagccaacagtgcttgcaatgacttttcagttaaaaggctttcgtttcagtttctgcatcgtgttatgtgcccttgctagaataatatgcacagtttaggcagtactagttttcgttctgaccagtgttttaaaggtgtcgcctaggcgtccaggcgtctcagtcgcctagctaaatcagcaagagg

SEQ ID NO: 29095 - DNA, 2347 bp, Zea Mays
ctcctctcccaccgctcggcctcctccaccacacgcgctcggcggtgccctccccggcgcggcgccgaaatgcaggtggggcctcgtcggcttcccgcggctgcgacgggccggagcagctaacgccgcggcctggggctgtgatctggggccgcgccgcattgccgactgcctgccgccgggctcgcgcgcgcagttcctgcctgccggtggcgaggggaggcaagatgcggcatctcgctctcctcgcgcttcttctcgctcccgttctcggatccacagcgccgaccactccatcggcgagtccttccccggagaaagccgcggctgtaagtcctgctgctcccacggagccacgaattgccccggctccagtggctcctcctaaagagtatagtgcacctcctccagttgaggttgcacccactgatcccaccgatgaggttcctccaccagtagctccaccacaagctgcagttggaaatcccactccaattcttcctgggacacctgcattgctaccttatgttcaggctcctgctccatctgtcgttctcaagcctaatccaccagtcgtggtgtcacctccacctgcgaataatcaaccaatccctccttatccaccccctgcatcgccccctccggcaaatggcattccaccatacccaccttcaggaaggtttcctgctattcctcctgccacttcagcagtcccacctccagccacatcacctgttattgcacaagcaccacagcgacgagcagatcctccaagtagagattataagaacgtgccgccagcaaatacttaccctcctacaaatctcaagaagcatcatgttccacatgcatcccctccaaagggatccactggtcaaactgtcccaggtcacaaatcaccagttacaggatctgcgcctgcaacaagtcctttgccccagaacacaaacatgccttcaatcccgaagaatgcttcatcagtgccacatgcccatccctcaccaccaagtatagctccagaattggcacccactggtagatctcatgctcagggatggaaatccagtaatcccaataacaaaacaaatagattacatgccccatcttatccaccgcctcgtgctcaagggcccgaggtctcacgaaccccaagacagactgggactaaaaactatactcaccatgcgcctccaccattccctcaaggacaccctagctttcctgtacactccccatccccttcaccagcctcatcgaggggtcctgcgaacgcgaagaaaagaaatcatatttctcctactcttccttcaatccctcccctaccagagccaaaagcaccgtcagcgcatcctatttggacattacctccaccaccacctaattcaggtaaagttttctgtactttttaagataatggaagcataggtacagttttctgtagatgtcctcatttggttgtcaatccaaaacttacatgttcgatctggtaataactgtatggcgtatgatatttgtgcttgcttatatgtttaacctgccaaatgcagattgcaattccttatcatgcccagagcctctaacagatccacctgcgggagcaccatgtgcatgtgtgctaccaatcagagttggaattcgtctaagcgttgacctttactcattttttccattggtctctgattttgctgaagaggtagcttcaggggtaaacatggcacagaggcaggtccgtgtaatgggtgcgaacgttgcaggtgatcaacctgacaaaacaatggttcttgttgatctagttccagtgcaagtgaagttcgacaatgctacagcattttcagcatttgaaagcttgtggagcaaaaaagtttctttaaaaccatcagtctttgggaactatgagattctctatgttgtatatccagggcttcctccttcaccaccttcagggcaaggtgttggggatggggcgtttggcaacaacagaaatgcaagggccgtgaagccccttggggtcgatctctttgattcgtagcagaataacagtaacttttctccaatgaagtagtgccactgttgaaattcatcatgaacttgtagtctataagcaagttttttttatttggtatcctttccaaggaaaattccattgcttatttgaaatgccagccaacagtgcttgcaatgacttttcagttaaaaggctttcgtttcagtttctgcatcgtgttatgtgcccttgctagaataatatgcacagtttaggcagtactagttttcgttctgaccagtgttttaaaggtgtcgcctaggcgtccaggcgtctcagtcgcctagctaaatcagcaagagg

SEQ ID NO: 29096 - DNA, 1473 bp, Zea Mays
gccacttcagccacatcacctgttattgcacaagcaccacagcgacgagcagatcctccaagtagagattataagaacgtgccgccagcaaatacttaccctcctacaaatctcaagaagcatcatgttccacatgcatcccctccaaagggatccactggtcaaactgtcccaggtcacaaatcaccagttacaggatctgcgcctgcaacaagtcctttgccccagaacacaaacatgccttcaatcccgaagaatgcttcatcagtgccacatgcccatccctcaccaccaagtatagctccagaattggcacccactggtagatctcatgctcagggatggaaatccagtaatcccaataacaaaacaaatagattacatgccccatcttatccaccgcctcgtgctcaagggcccgaggtctcacgaaccccaagacagactgggactaaaaactatactcaccatgcgcctccaccattccctcaaggacaccctagctttcctgtacactccccatccccttcaccagcctcatcgaggggtcctgcgaacgcgaagaaaagaaatcatatttctcctactcttccttcaatccctcccctaccagagccaaaagcaccgtcagcgcatcctatttggacattacctccaccaccacctaattcagattgcaattccttatcatgcccagagcctctaacagatccacctgcgggagcaccatgtgcatgtgtgctaccaatcagagttggaattcgtctaagcgttgacctttactcattttttccattggtctctgattttgctgaagaggtagcttcaggggtaaacatggcacagaggcaggtccgtgtaatgggtgcgaacgttgcaggtgatcaacctgacaaaacaatggttcttgttgatctagttccagtgcaagtgaagttcgacaatgctacagcattttcagcatttgaaagcttgtggagcaaaaaagtttctttaaaaccatcagtctttgggaactatgagattctctatgttgtatatccagggcttcctccttcaccaccttcagggcaaggtgttggggatggggcgtttggcaacaacagaaatgcaagggccgtgaagccccttggggtcgatctctttgattcgtagcagaataacagtaacttttctccaatgaagtagtgccactgttgaaattcatcatgaacttgtagtctataagcaagttttttttatttggtatcctttccaaggaaaattccattgcttatttgaaatgccagccaacagtgcttgcaatgacttttcagttaaaaggctttcgtttcagtttctgcatcgtgttatgtgcccttgctagaataatatgcacagtttaggcagtactagttttcgttctgaccagtgttttaaaggtgtcgcctaggcgtccaggcgtctcagtcgcctagctaaatcagcaagagg

SEQ ID NO: 29097 - DNA, 894 bp, Zea Mays
ctgcttggcaccttcgccacagcccacaggagagaaccttgtccagtcgtccaggtacaaagatggagagagtgagcccaggaaactctctgcctctggcctctctgctcgctcagctctggccagcggaggagaagaagagagtccccgtgacgaccgtgagtgaccgacctctgccgtggggcgctggcagccatttgcttgctgccgtcgttgcgcgatgagcgcgggtgcagcccggtccgtgctcgtcgtcgtcttcttcgccctgcctcttctcgtctccatgacccacgtgttgccaacctgctatgcaggcggccaccagcagccggcgcatgtcggagcggacccgcgctcaccaccgatcgatggcggcgagcacgcagagcagcggcagcagcttagcaggctgggctccaggccgccgtgctgcgaccgcaagtgcggcgcgtgcgcgccgtgcaaggccgtgcaggtgcgcgccggcgccggcgccgcggcggagcgccgcctccgcccgcgctgcgccaactacgagcccgtcgggtggaagtgcaggtgcggcgccgccgtcttcgacccttgacgtggctagctaactgcccgctacgtacggctgccagctccagcttcgaccagtccgtggccctgctgaattgtaatcgtcgcatgcacacgctggtgacgctgctgcctgctggatggtagcgagcatgtgggcttgtttgcgtctgcattagacttgtgctacgccacacttgtgtacgtagacgtagcctgcatactactcccaccgcatgtctatctgcaacacgattgtgggtttgtgacaatgaattttgcttagattttaagagacggtgttgttggttagccagtcatatgcttcag

SEQ ID NO: 29098 - DNA, 2659 bp, Zea Mays
atgcttggcccggcttccctccatttcgaatttcaaaacccccagcgcctcctgcctgcgcagtgcccacccacccgctcccactccaaaggctccaaagccaaagcaggcgcacgcgccacgcgcacctctgtctcgtctctcgcccgctctccactcttcctcccaaagcctgccgccgcgtggggggttgcttgcttgctgcccgctcctctccctgctcctgtgtctctgccgcccaccgcttccgggaacaagtccggttgccgccgccgccgctctgtgcgagaggagggagggacggagcgggatgggagggtccgggaagtgggtcaagtcgctgatagggctcaagaagcagcccgagaaggaagactgcaaggtgaggcggggaaacgaaataggtgttcttcgtttctcgccagaaatagtccccccgtttttaccagccgtttttttggtttttgtttttagtctgaatggttcctgtctgtcttctgagaattcgtgattcatccatgcttcggagatttcgttgtagatagataggtgtctccatacatgccgctttctcgtcgtcgcaggctcagcttgaacaaaatttcattagccgttacttgttcgtgttagcataggatttgaaacttttttctactcctagaaatagtagaatggcaacccctcctgcatctgataccgtgcgtcaatggccaccaaaagcatccctcgcggcacttgtctatgagcaacgtttccgtgcctgcccaggacaagctgcagctcccatcagtccacggcggaggattgcgaggcaagggccgcaggtggaagctgtggcggacctcctccggcgaccagggctccatgtggcgcggctccagaggcggcagccagcgctcggcggcgtcggaggcctcggacgacgcgtcctcggtggccgccgtccccgccgacccgttcacggccgccgtcgccaccgtcgcccgcgccccggccagggacttcatggccgtccgccaggagtgggccgccatccgcgtccagaccgcgttccgcgggttcttggctcggcgggcgctccgggcgctcaaggggctggtgcggctccaggcgatcgtgcgcgggcggcaggtgcggaagcaggcggccgtgacgctgcggtgcatgcaggcgctggtgcgggtgcaggcgcgcatccgggcgcgccgcgtgcgcatgtccaccgagggccaggccgtgcagaagctgctcgaggcgcgccgcacccagatggatatcctcagggaagccgaggtctcaattgccttctccttttctacaagatgattctggcctggttctcaaacgcatcgggtagaagacgaacagaccctcattgctgctgtaatctctctctttcccaggaaggatggtgtgacagccagggaacacttgaacaagtgagggtcaagctgcagaagcggcaggagggcgcaatcaagcgtgagcgggctatcgcctatgcatattcgcagcaggccgacggtgctgccaaatgcaatccaccgaagcttacttccaatggactggtgaaccactccggcatgctgctcaagcaccagaacttagacaagggcaacggcaactggagctggctggagaggtggatggcagcgcggccatgggagaacaggctgatggaggagcacaactccagctccccggacttccggtcctccaagaactgcgaggactcctttggtgtgctcggcgacttctctgaaccgaactcagtgaaggtgcgcaagaacaatgtcagcaagcgggtctgcgcaaaacctccagggccaacacacgcccacggacatcatcagcgcctcaaggcccagtcgatctcgtctctgagcactgagctgcacaacgacgagagctccgcgtcctcctcgtcttgctttgcgtctacccctatatcattcacacttgtggcttcggagaagacagaggacagcgtcaggacgagacccaactacatgagcatgacggagtcgatcaaggctaagcagaaggcatgcagcgcccagaggacggtggcgctgaagcaatgtgatgataggaaagccatgagcgccgagctgaaggtcgctcaggtgtgactgtttcgtggaactccatgcagagatagatggagccgacttcgacatcctctctatgctaggatgttttgcttggtgtcttgccacattcttgagtggctcggtgctgcattcctgagttgtcctcctgttgctgggtgtctgattgttcaacttcttgttgtcagattgcatctttgttcactcattgtggctgcatctttgttcagccgttgtggctttgtcagtggtagagtctctgtaagatagttctttgagtagacaacattgtggatttctttcctgggtgttgatttcaggtcaaaaaagacaggataatttacaacgtcctgcttcccaagatagctctttgagcagaaaacattgtcggtactatgctgatgctgtggtcttaactggaagctggagccagtgtgctaaactattgcaatggttaatttccatctgacctcataatgtgaggtacttataatatataatgctctctaatgtgaggctgtaactagtaactacactctattgttctg

SEQ ID NO: 29099 - DNA, 2190 bp, Zea Mays
atgcttggcccggcttccctccatttcgaatttcaaaacccccagcgcctcctgcctgcgcagtgcccacccacccgctcccactccaaaggctccaaagccaaagcaggcgcacgcgccacgcgcacctctgtctcgtctctcgcccgctctccactcttcctcccaaagcctgccgccgcgtggggggttgcttgcttgctgcccgctcctctccctgctcctgtgtctctgccgcccaccgcttccgggaacaagtccggttgccgccgccgccgctctgtgcgagaggagggagggacggagcgggatgggagggtccgggaagtgggtcaagtcgctgatagggctcaagaagcagcccgagaaggaagactgcaagatgagcaacgtttccgtgcctgcccaggacaagctgcagctcccatcagtccacggcggaggattgcgaggcaagggccgcaggtggaagctgtggcggacctcctccggcgaccagggctccatgtggcgcggctccagaggcggcagccagcgctcggcggcgtcggaggcctcggacgacgcgtcctcggtggccgccgtccccgccgacccgttcacggccgccgtcgccaccgtcgcccgcgccccggccagggacttcatggccgtccgccaggagtgggccgccatccgcgtccagaccgcgttccgcgggttcttggctcggcgggcgctccgggcgctcaaggggctggtgcggctccaggcgatcgtgcgcgggcggcaggtgcggaagcaggcggccgtgacgctgcggtgcatgcaggcgctggtgcgggtgcaggcgcgcatccgggcgcgccgcgtgcgcatgtccaccgagggccaggccgtgcagaagctgctcgaggcgcgccgcacccagatggatatcctcagggaagccgaggaaggatggtgtgacagccagggaacacttgaacaagtgagggtcaagctgcagaagcggcaggagggcgcaatcaagcgtgagcgggctatcgcctatgcatattcgcagcaggccgacggtgctgccaaatgcaatccaccgaagcttacttccaatggactggtgaaccactccggcatgctgctcaagcaccagaacttagacaagggcaacggcaactggagctggctggagaggtggatggcagcgcggccatgggagaacaggctgatggaggagcacaactccagctccccggacttccggtcctccaagaactgcgaggactcctttggtgtgctcggcgacttctctgaaccgaactcagtgaaggtgcgcaagaacaatgtcagcaagcgggtctgcgcaaaacctccagggccaacacacgcccacggacatcatcagcgcctcaaggcccagtcgatctcgtctctgagcactgagctgcacaacgacgagagctccgcgtcctcctcgtcttgctttgcgtctacccctatatcattcacacttgtggcttcggagaagacagaggacagcgtcaggacgagacccaactacatgagcatgacggagtcgatcaaggctaagcagaaggcatgcagcgcccagaggacggtggcgctgaagcaatgtgatgataggaaagccatgagcgccgagctgaaggtcgctcaggtgtgactgtttcgtggaactccatgcagagatagatggagccgacttcgacatcctctctatgctaggatgttttgcttggtgtcttgccacattcttgagtggctcggtgctgcattcctgagttgtcctcctgttgctgggtgtctgattgttcaacttcttgttgtcagattgcatctttgttcactcattgtggctgcatctttgttcagccgttgtggctttgtcagtggtagagtctctgtaagatagttctttgagtagacaacattgtggatttctttcctgggtgttgatttcaggtcaaaaaagacaggataatttacaacgtcctgcttcccaagatagctctttgagcagaaaacattgtcggtactatgctgatgctgtggtcttaactggaagctggagccagtgtgctaaactattgcaatggttaatttccatctgacctcataatgtgaggtacttataatatataatgctctctaatgtgaggctgtaactagtaactacactctattgttctg

SEQ ID NO: 29100 - DNA, 4063 bp, Zea Mays
cttcctcttcccttttctttctcttatatccctcgcccgccaagccgcggccgcagtagtgcagcagaaacgcaaaccggccaccccgcccgcactcgccgccccatctcttccgctcccgtcctctccgatccatccacgacgcgggaaccagcctccgaacagcagcttcccgccgccggcccccaagcctctgcgggcgtggttgcgtctccgcggtggcgccaccggagcggctcttgcgtccgagaggcgccctcgtgcgcgcgattttggccagatccgaccagcaatatttgtcgattctgaacaagcaccgtttgatgggcccggcaaagggttctcgaacaattaacaagaccatagtaaaaggatatgaagatcaacagcagcatgatgacccatctagttcaagcaaagctaaacagaaaaagaggaaaatttcagatttagatcccaaatggagcaaggatgaacttacacgcttttatgaagcctaccgtcaacatgggaaggattggaaaaagatcagcatagcgataggcggtaagtcgtcggacatggtgcggtctctttacagtgcacatcggactttcttatctcttccagaacatcaagctactgccatggggtttatcgcgctggtgactggtcatcacaatgcttcggagaaaaccacgagtcatagaggatatgatcacatagccagagcatctggaaaggcaaggaaacatggagaacaacagaaatcaattgatggacctgacctgcacaactgtcatgaaggggaaattactggattttcagcttccttcaaaaaacgatactatggcgaattggtcaggaacagccgaaatcatgctgttcagaggcgtactcctcttataccagttatagctcctgcagacaggagtaccattgatgagcccacaccaggaattgaaaacgtcatcaattttaattctaccaagagaaaatatgaagcggccaatcatggctgtgctgttgctccaacaaataagtactcttcggacagagtttctggattcgctgaaacatgcaaggctgatcaagattttaagaaaacacgaattcagcaaactgtggaggaaagtcagactggtatagttgagcatgagacaacgatggcatctaaagaagggaataagctagtctcttctgtaaacaacaatcagatacttatcgacagtatttctgaaggccatgttttggaatgttgagcctgagcacacaccccattaaactcgttagcctccagcccactaccgtggaaaaataaaatacatataatatttggcacacagatgaactacctttacaaattgcaatcagagcaaaaaccctgaccccctgtacaatatgtgattaggcattcattatgttcacttcttcaaccacataattgctgtctgatgatatgttggtcttggatgtattgaatagcctggtgaatgcaccctctaaaatgtcagaactagagattaatattccttcaggttcgcttggaaaaactgactctgtgttaagggaggaaggccaccctaccattgatctgtctaaacaagggaagccagttcgtaaatccagtgcttccaagactaggaagaaaaaacataagaagatattaggtgcagaggtgcctgctgaagcacaaaaaaaatgtgacgataatttagtcctgccggaaacactgagggttggtatcactgatgattcttccttgtgtactgactctggaagagcgaggacaccggaagcatctgaagatatttctgctgaagtccccaatacacaaacagaagccaagcctgaatttataatgtctggaaggaccaggttgaaatctcagatgcattgcaaaacaaagcctatgtcgtgcaatgaaggttcagataattttcaggcaaagaagttgctgcactgtttgtcatctgaaccacttcgtagatggtgcacatatgagtggttctacagtgcagttgattatccatggttttcaaataatgagtttgtgcactacttagatcatgcaaaattgagtcatctttcaaggttgactagatcagaatggagcgcgattcgaagctcccttggtaaaccgcggcgattttcaaatcattttctggcagtggaaaaagaaaaacttgaggattatcgggagaaagttagaaaaatctacgctcaactcaatgatggttcacgggattctctacctgcagacctagctaggccattttcaattggtcagcaggttattgttcgtcatccaagttctagggaactttgtgatggcaaagtggtgatgatggggccggattgttacaaggtccattttgatgatcctgaccttggtgttgatactgtgaaggacactgattgtatgccagttaattggctgcataatcgtcctgacaacatgagaaggaactacctttcaaatgatgtgtacaacatactggagatggatcacattcctgaccttacaccaagtgagaaccggaatcatgctataaatggaactactgtattcgaggagctcaaaagtctgcgcttaacatcagatagacagcctaaggcagaatctattatacatagtgaacggccaccatataggagtacatctgatggccctacaagttctagtggtttctcttgcccagacaataatgctggtcacaacggtgaactagagtcatatgtagctgcattttttgaaaactcactatcacaagccaggcagatggttgacgaagccatccaggcaaactctggtggtagtgatgatgaaaaggtatgcatgttaaatcaagtgacaggatgtctaggctcagattctcgtggcgtgcaacttccatctgacctgatatcaaactgcatcgcaacggttatttcaatcaagcgccttagcgactcgcgacatccatttggtaacgtagcaggcgtcttggagcatgctttatcaatgctgcgtccaagctgtccacagaacctcggagtttacacagaaataaagagagacctttgcaccatagcgaaccagatttttgcacttgtgccaacagcatcgggcaattgcagccctcctgtctcgcccatgtaactgggacctgccccggatagacccgttgccttcttgcaggccctgcagtagacacgctgcttcctctgctgtgagttcaaaacagaggttttgctgctgttggagcttgatgttatgaagtccggttgaatggtagcatacggaggacgcaagtctgatgtgctgacttgagcttgtatatgcagcgtgcgatcattaattggctagcctccttgtaacctgtgtatatacctgaatgaataatttataggtccatatacagattcaggatagttaatatctgatacagtagtgaataaagatgtatttctgcagtcatgattctcgtcttctcgatgtaatgtcacaggaacgtttcttgataggaaatttacataataatattaaaatgagcgagccaagagttcaagacccgttcgctgtgaaccgcgacaggtttccttagtgcctctgtacattgggacaggacataaattattcgatcctgatcgtacatacacacatttgggaacacgtattttatcaaataaatttgtgtcggcctggtaccttcacagtatcaacacaaatttattcttcctaattcctggacaaagaaatttacggatgataacaacacaactgcttcatcctcaactgtgttcttaacagaacatcatccttgaatcctgcaattacggtcattagatcctaattatgtcaaacgacactcaattcatagctcaattagagtattagaaaagagaaatttctcaagaataaactaacctttaatcagtatagtacaagagcaaggatttttcacattccccacaaatgtgtacttttcttctacgagaacatactcatagacaagatcagatgagcctagacaattttcagtcaagtcatcaactgaattgatagctccaccaccacgtgatagctcgaagagcaataatc

SEQ ID NO: 29101 - DNA, 4293 bp, Zea Mays
cagaaacgcaaaccggccaccccgcccgcactcgccgccccatctcttccgctcccgtcctctccgatccatccacgacgcgggaaccagcctccgaacagcagcttcccgccgccggcccccaagcctctgcgggcgtggttgcgtctccgcggtggcgccaccggagcggctcttgcgtccgagaggcgccctcgtgcgcgcgattttggccagatccgaccagcaatatttgtcgattctgaacaagcaccgtttgatgggcccggcaaagggttctcgaacaattaacaagaccatagtaaaaggatatgaagatcaacagcagcatgatgacccatctagttcaagcaaagctaaacagaaaaagaggaaaatttcagatttagatcccaaatggagcaaggatgaacttacacgcttttatgaagcctaccgtcaacatgggaaggattggaaaaagatcagcatagcgataggcggtaagtcgtcggacatggtgcggtctctttacagtgcacatcggactttcttatctcttccagaacatcaagctactgccatggggtttatcgcgctggtgactggtcatcacaatgcttcggagaaaaccacgagtcatagaggatatgatcacatagccagagcatctggaaaggcaaggaaacatggagaacaacagaaatcaattgatggacctgacctgcacaactgtcatgaaggggaaattactggattttcagcttccttcaaaaaacgatactatggcgaattggtcaggaacagccgaaatcatgctgttcagaggcgtactcctcttataccagttatagctcctgcagacaggagtaccattgatgagcccacaccaggaattgaaaacgtcatcaattttaattctaccaagagaaaatatgaagcggccaatcatggctgtgctgttgctccaacaaataagtactcttcggacagagtttctggattcgctgaaacatgcaaggctgatcaagattttaagaaaacacgaattcagcaaactgtggaggaaagtcagactggtatagttgagcatgagacaacgatggcatctaaagaagggaataagctagtctcttctgtaaacaacaatcagatacttatcgacagtatttctgaagatgatatgttggtcttggatgtattgaatagcctggtgaatgcaccctctaaaatgtcagaactagagattaatattccttcaggttcgcttggaaaaactgactctgtgttaagggaggaaggccaccctaccattgatctgtctaaacaagggaagccagttcgtaaatccagtgcttccaagactaggaagaaaaaacataagaagatattaggtgcagaggtgcctgctgaagcacaaaaaaaatgtgacgataatttagtcctgccggaaacactgagggttggtatcactgatgattcttccttgtgtactgactctggaagagcgaggacaccggaagcatctgaagatatttctgctgaagtccccaatacacaaacagaagccaagcctgaatttataatgtctggaaggaccaggttgaaatctcagatgcattgcaaaacaaagcctatgtcgtgcaatgaaggttcagataattttcaggcaaagaagttgctgcactgtttgtcatctgaaccacttcgtagatggtgcacatatgagtggttctacagtgcagttgattatccatggttttcaaataatgagtttgtgcactacttagatcatgcaaaattgagtcatctttcaaggttgactagatcagaatggagcgcgattcgaagctcccttggtaaaccgcggcgattttcaaatcattttctggcagtggaaaaagaaaaacttgaggattatcgggagaaagttagaaaaatctacgctcaactcaatgatggttcacgggattctctacctgcagacctagctaggccattttcaattggtcagcaggttattgttcgtcatccaagttctagggaactttgtgatggcaaagtggtgatgatggggccggattgttacaaggtccattttgatgatcctgaccttggtgttgatactgtgaaggtatgtagtttctgtttcagctgctttcattaattattgtcagtaagacttttatattatgctggtaatgtgaccttttttcatgttaagcatcaaacctttagttttcacgttgaagaatcaatttcacaattcactgaacattgttctagttttttgttctgtaagcctattcctgtgcaaatgtagtggcaagcttttttgcccttacatgtggagagcaatcaaggaacttttcaaaagtggattgtcagcacgggtagctgttgcatcctgctacaatctcggtcgggtactgaccattctgcatacaaacttctctttggtttgacatgtggcatgcttgatttatgatgtattttttgtattcatactttgggtcgtattttcctagaacttggtgagcatttgctagttattcacaaacttttgcgttcatgtgcttgagaattttaatgacagtctgatgctatgttacatacatacctaaacttatttggtttcaggacactgattgtatgccagttaattggctgcataatcgtcctgacaacatgagaaggaactacctttcaaatgatgtgtacaacatactggagatggatcacattcctgaccttacaccaagtgagaaccggaatcatgctataaatggaactactgtattcgaggagctcaaaagtctgcgcttaacatcagatagacagcctaaggcagaatctattatacatagtgaacggccaccatataggagtacatctgatggccctacaagttctagtggtttctcttgcccagacaataatgctggtcacaacggtgaactagagtcatatgtagctgcattttttgaaaactcactatcacaagccaggcagatggttgacgaagccatccaggcaaactctggtggtagtgatgatgaaaaggtatgcatgttaaatcaagtgacaggatgtctaggctcagattctcgtggcgtgcaacttccatctgacctgatatcaaactgcatcgcaacggttatttcaatcaagcgccttagcgactcgcgacatccatttggtaacgtagcaggcgtcttggagcatgctttatcaatgctgcgtccaagctgtccacagaacctcggagtttacacagaaataaagagagacctttgcaccatagcgaaccagatttttgcacttgtgccaacagcatcgggcaattgcagccctcctgtctcgcccatgtaactgggacctgccccggatagacccgttgccttcttgcaggccctgcagtagacacgctgcttcctctgctgtgagttcaaaacagaggttttgctgctgttggagcttgatgttatgaagtccggttgaatggtagcatacggaggacgcaagtctgatgtgctgacttgagcttgtatatgcagcgtgcgatcattaattggctagcctccttgtaacctgtgtatatacctgaatgaataatttataggtccatatacagattcaggatagttaatatctgatacagtagtgaataaagatgtatttctgcagtcatgattctcgtcttctcgatgtaatgtcacaggaacgtttcttgataggaaatttacataataatattaaaatgagcgagccaagagttcaagacccgttcgctgtgaaccgcgacaggtttccttagtgcctctgtacattgggacaggacataaattattcgatcctgatcgtacatacacacatttgggaacacgtattttatcaaataaatttgtgtcggcctggtaccttcacagtatcaacacaaatttattcttcctaattcctggacaaagaaatttacggatgataacaacacaactgcttcatcctcaactgtgttcttaacagaacatcatccttgaatcctgcaattacggtcattagatcctaattatgtcaaacgacactcaattcatagctcaattagagtattagaaaagagaaatttctcaagaataaactaacctttaatcagtatagtacaagagcaaggatttttcacattccccacaaatgtgtacttttcttctacgagaacatactcatagacaagatcagatgagcctagacaattttcagtcaagtcatcaactgaattgatagctccaccaccacgtgatagctcgaagagcaataatc

SEQ ID NO: 29102 - DNA, 4403 bp, Zea Mays
cagaaacgcaaaccggccaccccgcccgcactcgccgccccatctcttccgctcccgtcctctccgatccatccacgacgcgggaaccagcctccgaacagcagcttcccgccgccggcccccaagcctctgcgggcgtggttgcgtctccgcggtggcgccaccggagcggctcttgcgtccgagaggcgccctcgtgcgcgcgattttggccagatccgaccagcaatatttgtcgattctgaacaagcaccgtttgatgggcccggcaaagggttctcgaacaattaacaagaccatagtaaaaggatatgaagatcaacagcagcatgatgacccatctagttcaagcaaagctaaacagaaaaagaggaaaatttcagatttagatcccaaatggagcaaggatgaacttacacgcttttatgaagcctaccgtcaacatgggaaggattggaaaaagatcagcatagcgataggcggtaagtcgtcggacatggtgcggtctctttacagtgcacatcggactttcttatctcttccagaacatcaagctactgccatggggtttatcgcgctggtgactggtcatcacaatgcttcggagaaaaccacgagtcatagaggatatgatcacatagccagagcatctggaaaggcaaggaaacatggagaacaacagaaatcaattgatggacctgacctgcacaactgtcatgaaggggaaattactggattttcagcttccttcaaaaaacgatactatggcgaattggtcaggaacagccgaaatcatgctgttcagaggcgtactcctcttataccagttatagctcctgcagacaggagtaccattgatgagcccacaccaggaattgaaaacgtcatcaattttaattctaccaagagaaaatatgaagcggccaatcatggctgtgctgttgctccaacaaataagtactcttcggacagagtttctggattcgctgaaacatgcaaggctgatcaagattttaagaaaacacgaattcagcaaactgtggaggaaagtcagactggtatagttgagcatgagacaacgatggcatctaaagaagggaataagctagtctcttctgtaaacaacaatcagatacttatcgacagtatttctgaaggtatttttagcaattggttcattcttttcacttctattgtcaacatactatttctgaaggtatttttagcaattggttcatccttttcacttttattgtcaacatactcatgttttatccagactttattttctgccttgcttccagttccgttttctgttttgaaatacttcataatcatgcactattatggtatatattcatcctcagacatgctcactttctgcatacttgatttccaggccatgttttggaatgttgagcctgagcacacaccccattaaactcgttagcctccagcccactaccgtggaaaaataaaatacatataatatttggcacacagatgaactacctttacaaattgcaatcagagcaaaaaccctgaccccctgtacaatatgtgattaggcattcattatgttcacttcttcaaccacataattgctgtctggtgcgtattcctcgtcatacgatttcactcgtattgttgttgaaaggcatccttattagtaatccttggtactgctaaggttaataaacagtgtaatgttttactagttactaccgttttagatgaaaatatttggctgcttgtgtcctgttatggctgcagatgatatgttggtcttggatgtattgaatagcctggtgaatgcaccctctaaaatgtcagaactagagattaatattccttcaggttcgcttggaaaaactgactctgtgttaagggaggaaggccaccctaccattgatctgtctaaacaagggaagccagttcgtaaatccagtgcttccaagactaggaagaaaaaacataagaagatattaggtgcagaggtgcctgctgaagcacaaaaaaaatgtgacgataatttagtcctgccggaaacactgagggttggtatcactgatgattcttccttgtgtactgactctggaagagcgaggacaccggaagcatctgaagatatttctgctgaagtccccaatacacaaacagaagccaagcctgaatttataatgtctggaaggaccaggttgaaatctcagatgcattgcaaaacaaagcctatgtcgtgcaatgaaggttcagataattttcaggcaaagaagttgctgcactgtttgtcatctgaaccacttcgtagatggtgcacatatgagtggttctacagtgcagttgattatccatggttttcaaataatgagtttgtgcactacttagatcatgcaaaattgagtcatctttcaaggttgactagatcagaatggagcgcgattcgaagctcccttggtaaaccgcggcgattttcaaatcattttctggcagtggaaaaagaaaaacttgaggattatcgggagaaagttagaaaaatctacgctcaactcaatgatggttcacgggattctctacctgcagacctagctaggccattttcaattggtcagcaggttattgttcgtcatccaagttctagggaactttgtgatggcaaagtggtgatgatggggccggattgttacaaggtccattttgatgatcctgaccttggtgttgatactgtgaaggacactgattgtatgccagttaattggctgcataatcgtcctgacaacatgagaaggaactacctttcaaatgatgtgtacaacatactggagatggatcacattcctgaccttacaccaagtgagaaccggaatcatgctataaatggaactactgtattcgaggagctcaaaagtctgcgcttaacatcagatagacagcctaaggcagaatctattatacatagtgaacggccaccatataggagtacatctgatggccctacaagttctagtggtttctcttgcccagacaataatgctggtcacaacggtgaactagagtcatatgtagctgcattttttgaaaactcactatcacaagccaggcagatggttgacgaagccatccaggcaaactctggtggtagtgatgatgaaaaggtatgcatgttaaatcaagtgacaggatgtctaggctcagattctcgtggcgtgcaacttccatctgacctgatatcaaactgcatcgcaacggttatttcaatcaagcgccttagcgactcgcgacatccatttggtaacgtagcaggcgtcttggagcatgctttatcaatgctgcgtccaagctgtccacagaacctcggagtttacacagaaataaagagagacctttgcaccatagcgaaccagatttttgcacttgtgccaacagcatcgggcaattgcagccctcctgtctcgcccatgtaactgggacctgccccggatagacccgttgccttcttgcaggccctgcagtagacacgctgcttcctctgctgtgagttcaaaacagaggttttgctgctgttggagcttgatgttatgaagtccggttgaatggtagcatacggaggacgcaagtctgatgtgctgacttgagcttgtatatgcagcgtgcgatcattaattggctagcctccttgtaacctgtgtatatacctgaatgaataatttataggtccatatacagattcaggatagttaatatctgatacagtagtgaataaagatgtatttctgcagtcatgattctcgtcttctcgatgtaatgtcacaggaacgtttcttgataggaaatttacataataatattaaaatgagcgagccaagagttcaagacccgttcgctgtgaaccgcgacaggtttccttagtgcctctgtacattgggacaggacataaattattcgatcctgatcgtacatacacacatttgggaacacgtattttatcaaataaatttgtgtcggcctggtaccttcacagtatcaacacaaatttattcttcctaattcctggacaaagaaatttacggatgataacaacacaactgcttcatcctcaactgtgttcttaacagaacatcatccttgaatcctgcaattacggtcattagatcctaattatgtcaaacgacactcaattcatagctcaattagagtattagaaaagagaaatttctcaagaataaactaacctttaatcagtatagtacaagagcaaggatttttcacattccccacaaatgtgtacttttcttctacgagaacatactcatagacaagatcagatgagcctagacaattttcagtcaagtcatcaactgaattgatagctccaccaccacgtgatagctcgaagagcaataatc

SEQ ID NO: 29103 - DNA, 4558 bp, Zea Mays
cagaaacgcaaaccggccaccccgcccgcactcgccgccccatctcttccgctcccgtcctctccgatccatccacgacgcgggaaccagcctccgaacagcagcttcccgccgccggcccccaagcctctgcgggcgtggttgcgtctccgcggtggcgccaccggagcggctcttgcgtccgagaggcgccctcgtgcgcgcgattttggccagatccgaccagcaatatttgtcgattctgaacaagcaccgtttgatgggcccggcaaagggttctcgaacaattaacaagaccatagtaaaaggatatgaagatcaacagcagcatgatgacccatctagttcaagcaaagctaaacagaaaaagaggaaaatttcagatttagatcccaaatggagcaaggatgaacttacacgcttttatgaagcctaccgtcaacatgggaaggattggaaaaagatcagcatagcgataggcggtaagtcgtcggacatggtgcggtctctttacagtgcacatcggactttcttatctcttccagaacatcaagctactgccatggggtttatcgcgctggtgactggtcatcacaatgcttcggagaaaaccacgagtcatagaggatatgatcacatagccagagcatctggaaaggcaaggaaacatggagaacaacagaaatcaattgatggacctgacctgcacaactgtcatgaaggggaaattactggattttcagcttccttcaaaaaacgatactatggcgaattggtcaggaacagccgaaatcatgctgttcagaggcgtactcctcttataccagttatagctcctgcagacaggagtaccattgatgagcccacaccaggaattgaaaacgtcatcaattttaattctaccaagagaaaatatgaagcggccaatcatggctgtgctgttgctccaacaaataagtactcttcggacagagtttctggattcgctgaaacatgcaaggctgatcaagattttaagaaaacacgaattcagcaaactgtggaggaaagtcagactggtatagttgagcatgagacaacgatggcatctaaagaagggaataagctagtctcttctgtaaacaacaatcagatacttatcgacagtatttctgaaggtatttttagcaattggttcattcttttcacttctattgtcaacatactatttctgaaggtatttttagcaattggttcatccttttcacttttattgtcaacatactcatgttttatccagactttattttctgccttgcttccagttccgttttctgttttgaaatacttcataatcatgcactattatggtatatattcatcctcagacatgctcactttctgcatacttgatttccaggccatgttttggaatgttgagcctgagcacacaccccattaaactcgttagcctccagcccactaccgtggaaaaataaaatacatataatatttggcacacagatgaactacctttacaaattgcaatcagagcaaaaaccctgaccccctgtacaatatgtgattaggcattcattatgttcacttcttcaaccacataattgctgtctgatgatatgttggtcttggatgtattgaatagcctggtgaatgcaccctctaaaatgtcagaactagagattaatattccttcaggttcgcttggaaaaactgactctgtgttaagggaggaaggccaccctaccattgatctgtctaaacaagggaagccagttcgtaaatccagtgcttccaagactaggaagaaaaaacataagaagatattaggtgcagaggtgcctgctgaagcacaaaaaaaatgtgacgataatttagtcctgccggaaacactgagggttggtatcactgatgattcttccttgtgtactgactctggaagagcgaggacaccggaagcatctgaagatatttctgctgaagtccccaatacacaaacagaagccaagcctgaatttataatgtctggaaggaccaggttgaaatctcagatgcattgcaaaacaaagcctatgtcgtgcaatgaaggttcagataattttcaggcaaagaagttgctgcactgtttgtcatctgaaccacttcgtagatggtgcacatatgagtggttctacagtgcagttgattatccatggttttcaaataatgagtttgtgcactacttagatcatgcaaaattgagtcatctttcaaggttgactagatcagaatggagcgcgattcgaagctcccttggtaaaccgcggcgattttcaaatcattttctggcagtggaaaaagaaaaacttgaggattatcgggagaaagttagaaaaatctacgctcaactcaatgatggttcacgggattctctacctgcagacctagctaggccattttcaattggtcagcaggttattgttcgtcatccaagttctagggaactttgtgatggcaaagtggtgatgatggggccggattgttacaaggtccattttgatgatcctgaccttggtgttgatactgtgaagtggcaagcttttttgcccttacatgtggagagcaatcaaggaacttttcaaaagtggattgtcagcacgggtagctgttgcatcctgctacaatctcggtcgggtactgaccattctgcatacaaacttctctttggtttgacatgtggcatgcttgatttatgatgtattttttgtattcatactttgggtcgtattttcctagaacttggtgagcatttgctagttattcacaaacttttgcgttcatgtgcttgagaattttaatgacagtctgatgctatgttacatacatacctaaacttatttggtttcaggacactgattgtatgccagttaattggctgcataatcgtcctgacaacatgagaaggaactacctttcaaatgatgtgtacaacatactggagatggatcacattcctgaccttacaccaagtgagaaccggaatcatgctataaatggaactactgtattcgaggagctcaaaagtctgcgcttaacatcagatagacagcctaaggcagaatctattatacatagtgaacggccaccatataggagtacatctgatggccctacaagttctagtggtttctcttgcccagacaataatgctggtcacaacggtgaactagagtcatatgtagctgcattttttgaaaactcactatcacaagccaggcagatggttgacgaagccatccaggcaaactctggtggtagtgatgatgaaaaggtatgcatgttaaatcaagtgacaggatgtctaggctcagattctcgtggcgtgcaacttccatctgacctgatatcaaactgcatcgcaacggttatttcaatcaagcgccttagcgactcgcgacatccatttggtaacgtagcaggcgtcttggagcatgctttatcaatgctgcgtccaagctgtccacagaacctcggagtttacacagaaataaagagagacctttgcaccatagcgaaccagatttttgcacttgtgccaacagcatcgggcaattgcagccctcctgtctcgcccatgtaactgggacctgccccggatagacccgttgccttcttgcaggccctgcagtagacacgctgcttcctctgctgtgagttcaaaacagaggttttgctgctgttggagcttgatgttatgaagtccggttgaatggtagcatacggaggacgcaagtctgatgtgctgacttgagcttgtatatgcagcgtgcgatcattaattggctagcctccttgtaacctgtgtatatacctgaatgaataatttataggtccatatacagattcaggatagttaatatctgatacagtagtgaataaagatgtatttctgcagtcatgattctcgtcttctcgatgtaatgtcacaggaacgtttcttgataggaaatttacataataatattaaaatgagcgagccaagagttcaagacccgttcgctgtgaaccgcgacaggtttccttagtgcctctgtacattgggacaggacataaattattcgatcctgatcgtacatacacacatttgggaacacgtattttatcaaataaatttgtgtcggcctggtaccttcacagtatcaacacaaatttattcttcctaattcctggacaaagaaatttacggatgataacaacacaactgcttcatcctcaactgtgttcttaacagaacatcatccttgaatcctgcaattacggtcattagatcctaattatgtcaaacgacactcaattcatagctcaattagagtattagaaaagagaaatttctcaagaataaactaacctttaatcagtatagtacaagagcaaggatttttcacattccccacaaatgtgtacttttcttctacgagaacatactcatagacaagatcagatgagcctagacaattttcagtcaagtcatcaactgaattgatagctccaccaccacgtgatagctcgaagagcaataatc

SEQ ID NO: 29104 - DNA, 1967 bp, Zea Mays
ctcaggtttactttagaaactccgctttcacgaggaatttccattttaacaaagaaaataaattaattttctatagaaaaataaaaatcatttgaaaaataaggcttacaaactaggaaggtccccgactcccacatggacttgggctgggcttcttctgtcagtttcagccggttgcgcttgcgccgttgtgcggacacttgctcgcacgccacatccacagaatccatctccagatgtcagcctccggcgaccccctggacgtcctcccggcggcggtcctcgccgacgtcctgggccgtgtagctgacgccggagacatcgcggcttgccgcctggcctcgcggacgcttctcgccgcgtcctacatctgcccccgcgttcgcctctgcgccgccgaccgcgcccgccgccggcgcgagggcggtggtggttcccccgctttccgcgcgaccactgcaaacctcgcctcgcttctcgggcctcacctccggtccctgtcgctcgacacggccggcggtcagggttcccccgatgacgcgatgtgggtggaggagggagagttcgatgaggccgacggcctgcatctcacctgcggcgaggccgtggcggcctgggcgacgacctccgccggaacggtcctccgggagcttgatatcgccgactactggccgcaagcgtgctggcggaaggccgaggcgctccccctcatctcacactactgtcaaaatctcgtcaagttgtgccttaaaaatgcatggctttctgttgacaggctcaagaaaatgccaaatctgacttatctgacgcttgagttcattagactggatgatgaagacctcaaccaattgaatgaatgttttccttgccttcacacccttaatcttataggagtcggagggctcaaggaccctaagatccaccttcttcaactaaaggcttgctgctgggaggtatcaaatgtcccacggtctttggttgtccatgcaccagacttggtttttctggagttgaaatgtatcagaccagatacactcattttggacactccatccttgtctactctaaagctcaccattgataaacttggtgcaactgcccgagttgatggccttctgcgtttgtcgaatcttcgcatagaatcactggattttagttccctttttccagcattcatggacaatcaagctatcaggacattggagctcgagctacctgagtcttcaagtcaatatgaacttcttgaagcagttaacccggattatcttctaagacggctagccagctttagtgaagtcaagctgggcccaagattttcacgtgaactgaaactatgtcttgcccaatacaaagatatccagtttggaagttgcctgaagaagctcctaattcatgtcccacaatcagggagttgtttccatctcatgcccctgtttgagatctgtgcacctttgtgtgaggtgactgtgcttttccacgctgaatcagctgatgctgtccgtcgtcaagatgcaatgtcgatttgtatgcagaacttcccagagatcagatggcagtggggtacctggcagtagtaatactgtctatatatgcatattcgtacttgtaggcatattggttacataactgaaattatctgtgtgactgatacttgtagttttgctaacatagcagccccttctacacgattgggagctggttttgtttgatgacatactgtgcactagcattgtacgctgcaagtatggttgtctctgtttagtccattctatattactatatttcttgttgtctaaatattttacttgttgaaaactgtacctgcattattttgctattacctgctactttagctgtgacttgtgacgttcttttcccgtgtacatggaacagcaaggagattaatcgaccattaatcagctgatgtgcacatgccaaaccctgtctgccaaataatcctctccgaa

SEQ ID NO: 29105 - DNA, 1528 bp, Zea Mays
ctgggcttcttctgtcagtttcagccggttgcgcttgcgccgttgtgcggacacttgctcgcacgccacatccacagaatccatctccagatgtcagcctccggcgaccccctggacgtcctcccggcggcggtcctcgccgacgtcctgggccgtgtagctgacgccggagacatcgcggcttgccgcctggcctcgcggacgcttctcgccgcgtcctacatctgcccccgcgttcgcctctgcgccgccgaccgcgcccgccgccggcgcgagggcggtggtggttcccccgctttccgcgcgaccactgcaaacctcgcctcgcttctcgggcctcacctccggtccctgtcgctcgacacggccggcggtcagggttcccccgatgacgcgatgtgggtggaggagggagagttcgatgaggccgacggcctgcatctcacctgcggcgaggccgtggcggcctgggcgacgacctccgccggaacggtcctccgggagcttgatatcgccgactactggccgcaagcgtgctggcggaaggccgaggcgctccccctcatctcacactactgtcaaaatctcgtcaagttgtgccttaaaaatgcatggctttctgttgacaggctcaagaaaatgccaaatctgacttatctgacgcttgagttcattagactggatgatgaagacctcaaccaattgaatgaatgttttccttgccttcacacccttaatcttataggagtcggagggctcaaggaccctaagatccaccttcttcaactaaaggcttgctgctgggagcattcatggacaatcaagctatcaggacattggagctcgagctacctgagtcttcaagtcaatatgaacttcttgaagcagttaacccggattatcttctaagacggctagccagctttagtgaagtcaagctgggcccaagattttcacgtgaactgaaactatgtcttgcccaatacaaagatatccagtttggaagttgcctgaagaagctcctaattcatgtcccacaatcagggagttgtttccatctcatgcccctgtttgagatctgtgcacctttgtgtgaggtgactgtgcttttccacgctgaatcagctgatgctgtccgtcgtcaagatgcaatgtcgatttgtatgcagaacttcccagagatcagatggcagtggggtacctggcagtagtaatactgtctatatatgcatattcgtacttgtaggcatattggttacataactgaaattatctgtgtgactgatacttgtagttttgctaacatagcagccccttctacacgattgggagctggttttgtttgatgacatactgtgcactagcattgtacgctgcaagtatggttgtctctgtttagtccattctatattactatatttcttgttgtctaaatattttacttgttgaaaactgtacctgcattattttgctattacctgctactttagctgtgacttgtgacgttcttttcccgtgtacatggaac

SEQ ID NO: 29106 - DNA, 863 bp, Zea Mays
gcaaaatgacgtgtgtcatcgtgtaatgtaaaaagaggcaacacatcaaacaatataacctccttactgatggttattaaaaagcaggttaattgactgaccttttaattggtatatccaagtccgcattgtgagttcgcagtaaaatctattatgataggaggtaaacataaaaagtaccactgttttgcttgttctctttatgaacaaataaagaataacttcatcacagattcacagtacaatactattctacaatacgaacaaatattaagtgcaaataaattagaaaagtatcacactaaatatgtatatgcaagcgtggctttgtttctagtttatttattgtggaacatggatgatgggcacacaagagtacaagactactgcaaaaaaaaataaagccaaatttgtcatcaaaatgtgagctttgccttaggccacttaaaaaattgcctttgccacaagacattctaaattacacctaatatactacaagacatatatgcggtcgtgtgatgaaataagcagttgtataccttgtatacctctgcctggactgtttggaaatgctacaagttgtatctgtataaaagaagctcccctttcttttatgtattgacgctaaactgcaaagtactctctccagcccccctttcaaagggggctatataaaagaaccctttcaaagtttctgaaccaaccccccccctttcttttatgtagggtctctgtggtaccatggaggaaccttcaagttatatctgtacatcgtcgaaccattgaaagaaaactgatgtaacttacctgtagcaacaaacgaatgtgccagatattggaaacatcatacaaagtgataatat

SEQ ID NO: 29107 - DNA, 568 bp, Zea Mays
actggaggaacctgttggcgtttgggttttcaaggaggcagagggtgggagccccgtgagcgtggtggactacgcggtgcccagcatcaatggaagggagctcgagaagtgctggacccgctcgcgacggatcggagcccatggcgcacgaggccgaggccgttgagctggtggcgtacaccgtcgtgcactgtgtccggctggagggcaaggaccgccccgccatggctgacatcgtggccaacctggagacggcgttagcactctgcgagggaagcgccaccggcggcggcgaccatgggaccgacgggttcagaaacatctcctccagcgccagcctctgtcatgtccatggaccattggaagccctgtcctgagcctgagcctgaccgacgggcggatagagagagcggatagatgagtccattcttttccagtcttcgttcatgcaccagtcgcccgcgccaccgccattgttggttatggcgagctcgatccatctgtcctgtgattagtttgttgagacccagaaagggaacagacggatggtgatcgaattcattgctta

SEQ ID NO: 29108 - DNA, 4506 bp, Zea Mays
cccagcagagggccacgtgcgctcctccctcccagcgtgtgcactgcgctctctctatatgtgggcaaatttaatcttttttttgcatgctgggctccacatgtgttaagctggaataaactgacgccgttgggtgggtcatcgtgggaggtgagctgaccgccgcgccgtcggtggggggtagtaggggcctggtggtgggtgtgcttctgtgccgctccgcctccgcgtatatatacacgcgcacgcaatgtacgcgaggagttcaggggcggagccagcgaaagacaagacaagacaagccaggccagcggcggaggagagggagagagagagagagagcacgcgacaggaggcaggagggcgaggaggagcttgtagagggttaaggaaggccaccgccatgggggactccagcggctccgtgtcggtcgacgtcgagcggatcttcttcggcggcaaggagcatagagtaagaacgaggcatggctctctttcggtttctgtgtatggagacgaggacaagcccgcgctcgtaacttatccggatgtagccttaaatcacatgtcttgcttccaaggattgttcttctgtccggaggctgcgtccctgttgcttcacagtttctgcgtgtaccacatcacacctcaaggacacgagttgggagcagctccgatttcagctgatgtgcctgtgccatctgtcgacgaccttgcagatcaggttgctgatgtcctcgattttttcagtttagggtctgtcatgtgcttgggtgtcactgctggtgcctatgttctcaccctctttgcaactaagtatcgggagagggttcttggcctcatgttggtttcacctgtatgcaaagccccctcctggagcgagtggctgtataataaggtattatcaaacttgctttattactacgggacacgtgggttagtcaaggaaagtttgcttcagcggtacttcagcatggacgttcgtggtaacgggcaagatcctgagtcagagattgtccaagcctgcagaagtttacttgacgagaggcagggagctaacgtctggcggttccttcaggcaattagcaggcggcatgacttaacggaatcgctgaagaagctcaagtgccggacgctgatctttgttggagaaaactcacagttccatgcggacgctgtccacatgaccacaaagctggaccggagatactgcgctctagtcgaggttcaggcttgtggttcacttgtcacagaagagcagccccatgcgatggtgatcccgatggaatacttcctcatggggtacgggctctacaggccatcgcagcaggaaagcagcccccggagcacactgagcccgttctgcatatcacccgagcttctgtcaccggagagcatgggggtgaagctgaagcccatcaagacgcgcatctcgcttaacgtttagcatgggtggatctcggatggccatggcttgacaaccacagctcagctcatgaaagtgaagactccttgggctgagttgtgcagacacagttttgatgcctttcggcacctagcgttcgaagatctacaggtagaaggcagatttgttgttaatggctgtttttgttcatatatataatatatgatattacgctgttgttatgttctaccagcaagtcatatgttccttaaacaacacacatggacaccttccgtatccgtttcacagcacccaatatgttgcaagcactccaacacagagatgagagaataaatatgctacagacacagttaatcaactatacaatgctgctctgcagcaccaactgatagacttagcctcacctacctgtcatgtcagagtagggcgtgttgggacaatttcaattgtcagcacatcagactacagctgctagtgatttcatccgattggggaggaggtggggtttttagccttggaacagtgaaacttggcgggaggagcacaggtgacacagcagctttaacttgcagaagccttgtgtaacatctctggttaccctgcacgtggtgacaacatattcaaggaaatagtaccagtagatctgctttctgttattgtaatcttttccatgcatataatctaccaaacagccatttgctcacttgcaggtggtgaaacccaaccctgatgttctaccatatccttacttctagtgtacttgctcattgtagcatctacgactcacataatgctcaccaaaattccatcacatttgttgtttgtccatatatacagcagtctgcaacttatgcgtgttagcacacaaaactctctccggttttcatgaactctggaacacacagactgttattttggtgctgtcgaactagcaggcacgttggagagtaactgactccactaactccactctcctaaagaacagggcaaagccccaacataatagacttggccactactctagctctacctgacgaaactgaattgaaaacagacagatctcacagtaagctagactctgaattggaaagtctacggctaactgaaattgatgtgcaggagttatctacaatgcggaccaccaaaattaggacattgcattaacgatcaaaaccaagagaacaatacacataatttccatcagtttgttatctgtgaacatttagattgaataaaattcatgcagagcacggagcaccatggattaggtattaaaatatgtggacaaaaaaaatattagagcatctccaagagacactctattttcgactctctatatgacactctaattacctctccatatagattacattctatatatagcatctcgttccaacagattatctatttagtttggctagtcagcggctagccaaatttggctagagatggagccaatttgaagagccggatagcttggcgagttggatggctagtctgtttgaaagttattttgctgttgaatagctaaaatttggcttgctgagccatttaactaatctattggagatgctcttagagcattggctatgcacccgaacaagatcgctaacaaactaattagtatagatgatgaaacacaactaacaaattctattgtatccatgcaccatgcttatagcgaccctaaatgtgtgatgatcctttatgagcacctatgactcacatagcactcacctaaatttcatcaacttcattgtttgtccatatttacagcaggacgcaactcatgcggcctaccaagaattaggacattgtacaaaccatataaagtataacattgttatccatcacactatgtttctgtaaatatatggctgtatcagcaataagtaatgaagaatgaaggaatgtatcctgctaggttcttactaatctcttgctagtgaatgtagtcgcattttgagcacttccaaatcatttaataatcaactaaattacatcaaccttattctttgtccatatttatagaaagacataattcatgaagcctgccaagaattaggagatcaagttaagactttagagcacacagaggttcatatttactgtttgcaggctataattgtagaacaggttaacaatccacagttcctcactccagttcattttagcacttccagaaaagactcttctgaaggatacatatttttgaaataatacagagcaaacctaatttctcaattcattaccaatccatatttacagcaagaaagaacccatacatacagcctatcagagccttttagataaactctaggtcagctaaaacatttagtctatttgtttatgcacaattgaaaaacagaccaaattcacttaataaaacaacattagtatagatgatgaaacacaactaacaaattctattgtatccatgcaccatgcttatagcgaccctaaatgtgtgatgatcctttatgagcacctatgactcacatagcgctcacctaaatttcatcaacttcattgtttgtccatatttacagcaggacgcaactcatgaggcctaccaagaattaggacattgtacaaaccatataaagtagaacattgttatccatcacactatgtttctgtaaatatatggctgtatcagcaataaggaatgaagaatgaaggaatgtatcctgctaggttcttactaatctcttgctaatgaatgtagtcgcattttaagcacttccaaatcatttaataatcaactaaattacatcaaccttattctttgtccatatttatagaaagacaactcatgaagcctgccaagaattaggagatcaagttaaaactttagagcacacagaggtacatatttactgtttgcaggctataattgtagaacaggttagcaatccacagttccacactccagttcattttagcacttccagaaaagactcttctgaaggatacatatttttgaaataatacagagcaaacctaatttctcaattcattaccaatccatatttacagcaagaaagaacccatacatacagcctatcagagtcttttag

SEQ ID NO: 29109 - DNA, 4654 bp, Zea Mays
cttttttttgcatgctgggctccacatgtgttaagctggaataaactgacgccgttgggtgggtcatcgtgggaggtgagctgaccgccgcgccgtcggtggggggtagtaggggcctggtggtgggtgtgcttctgtgccgctccgcctccgcgtatatatacacgcgcacgcaatgtacgcgaggagttcaggggcggagccagcgaaagacaagacaagacaagccaggccagcggcggaggagagggagagagagagagagagcacgcgacaggaggcaggagggcgaggaggagcttgtagagggttaaggaaggccaccgccatgggggactccagcggctccgtgtcggtcgacgtcgagcggatcttcttcggcggcaaggagcatagagtaagaacgaggcatggctctctttcggtttctgtgtatggagacgaggacaagcccgcgctcgtaacttatccggatgtagccttaaatcacatgtcttgcttccaaggattgttcttctgtccggaggctgcgtccctgttgcttcacagtttctgcgtgtaccacatcacacctcaaggacacgagttgggagcagctccgatttcagctgatgtgcctgtgccatctgtcgacgaccttgcagatcaggttgctgatgtcctcgattttttcagtttagggtctgtcatgtgcttgggtgtcactgctggtgcctatgttctcaccctctttgcaactaagtatcgggagagggttcttggcctcatgttggtttcacctgtatgcaaagccccctcctggagcgagtggctgtataataaggtattatcaaacttgctttattactacgggacacgtgggttagtcaaggaaagtttgcttcagcggtacttcagcatggacgttcgtggtaacgggcaagatcctgagtcagagattgtccaagcctgcagaagtttacttgacgagaggcagggagctaacgtctggcggttccttcaggcaattagcaggcggcatgacttaacggaatcgctgaagaagctcaagtgccggacgctgatctttgttggagaaaactcacagttccatgcggacgctgtccacatgaccacaaagctggaccggagatactgcgctctagtcgaggttcaggcttgtggttcacttgtcacagaagagcagccccatgcgatggtgatcccgatggaatacttcctcatggggtacgggctctacaggccatcgcagcaggaaagcagcccccggagcacactgagcccgttctgcatatcacccgagcttctgtcaccggagagcatgggggtgaagctgaagcccatcaagacgcgcatctcgcttaacgtttagcatgggtggatctcggatggccatggcttgacaaccacagctcagctcatgaaagtgaagactccttgggctgagttgtgcagacacagttttgatgcctttcggcacctagcgttcgaagatctacaggtagaaggcagatttgttgttaatggctgtttttgttcatatatataatatatgatatgtaacttagtacacatgtatatctcaacacgtcatcgtttcatacagtacagaaaaactaaatgtgaaagctgaatccacgtccgattctcacatgaactctcaagcccgagggacattgtgttaacatagagctgttgctgttggagctgcaaacaaaaaaaaaagaactttgcatctttcacagttttatgatctgcattcattcacaggaatcacaaaagtacgctgttgttatgttctaccagcaagtcatatgttccttaaacaacacacatggacaccttccgtatccgtttcacagcacccaatatgttgcaagcactccaacacagagatgagagaataaatatgctacagacacagttaatcaactatacaatgctgctctgcagcaccaactgatagacttagcctcacctacctgtcatgtcagagtagggcgtgttgggacaatttcaattgtcagcacatcagactacagctgctagtgatttcatccgattggggaggaggtggggtttttagccttggaacagtgaaacttggcgggaggagcacaggtgacacagcagctttaacttgcagaagccttgtgtaacatctctggttaccctgcacgtggtgacaacatattcaaggaaatagtaccagtagatctgctttctgttattgtaatcttttccatgcatataatctaccaaacagccatttgctcacttgcaggtggtgaaacccaaccctgatgttctaccatatccttacttctagtgtacttgctcattgtagcatctacgactcacataatgctcaccaaaattccatcacatttgttgtttgtccatatatacagcagtctgcaacttatgcgtgttagcacacaaaactctctccggttttcatgaactctggaacacacagactgttattttggtgctgtcgaactagcaggcacgttggagagtaactgactccactaactccactctcctaaagaacagggcaaagccccaacataatagacttggccactactctagctctacctgacgaaactgaattgaaaacagacagatctcacagtaagctagactctgaattggaaagtctacggctaactgaaattgatgtgcaggagttatctacaatgcggaccaccaaaattaggacattgcattaacgatcaaaaccaagagaacaatacacataatttccatcagtttgttatctgtgaacatttagattgaataaaattcatgcagagcacggagcaccatggattaggtattaaaatatgtggacaaaaaaaatattagagcatctccaagagacactctattttcgactctctatatgacactctaattacctctccatatagattacattctatatatagcatctcgttccaacagattatctatttagtttggctagtcagcggctagccaaatttggctagagatggagccaatttgaagagccggatagcttggcgagttggatggctagtctgtttgaaagttattttgctgttgaatagctaaaatttggcttgctgagccatttaactaatctattggagatgctcttagagcattggctatgcacccgaacaagatcgctaacaaactaattagtatagatgatgaaacacaactaacaaattctattgtatccatgcaccatgcttatagcgaccctaaatgtgtgatgatcctttatgagcacctatgactcacatagcactcacctaaatttcatcaacttcattgtttgtccatatttacagcaggacgcaactcatgcggcctaccaagaattaggacattgtacaaaccatataaagtataacattgttatccatcacactatgtttctgtaaatatatggctgtatcagcaataagtaatgaagaatgaaggaatgtatcctgctaggttcttactaatctcttgctagtgaatgtagtcgcattttgagcacttccaaatcatttaataatcaactaaattacatcaaccttattctttgtccatatttatagaaagacataattcatgaagcctgccaagaattaggagatcaagttaagactttagagcacacagaggttcatatttactgtttgcaggctataattgtagaacaggttaacaatccacagttcctcactccagttcattttagcacttccagaaaagactcttctgaaggatacatatttttgaaataatacagagcaaacctaatttctcaattcattaccaatccatatttacagcaagaaagaacccatacatacagcctatcagagccttttagataaactctaggtcagctaaaacatttagtctatttgtttatgcacaattgaaaaacagaccaaattcacttaataaaacaacattagtatagatgatgaaacacaactaacaaattctattgtatccatgcaccatgcttatagcgaccctaaatgtgtgatgatcctttatgagcacctatgactcacatagcgctcacctaaatttcatcaacttcattgtttgtccatatttacagcaggacgcaactcatgaggcctaccaagaattaggacattgtacaaaccatataaagtagaacattgttatccatcacactatgtttctgtaaatatatggctgtatcagcaataaggaatgaagaatgaaggaatgtatcctgctaggttcttactaatctcttgctaatgaatgtagtcgcattttaagcacttccaaatcatttaataatcaactaaattacatcaaccttattctttgtccatatttatagaaagacaactcatgaagcctgccaagaattaggagatcaagttaaaactttagagcacacagaggtacatatttactgtttgcaggctataattgtagaacaggttagcaatccacagttccacactccagttcattttagcacttccagaaaagactcttctgaaggatacatatttttgaaataatacagagcaaacctaatttctcaattcattaccaatccatatttacagcaagaaagaacccatacatacagcctatcagagtcttttag

SEQ ID NO: 29110 - DNA, 4255 bp, Zea Mays
ctggtggtgggtgtgcttctgtgccgctccgcctccgcgtatatatacacgcgcacgcaatgtacgcgaggagttcaggggcggagccagcgaaagacaagacaagacaagccaggccagcggcggaggagagggagagagagagagagagcacgcgacaggaggcaggagggcgaggaggagcttgtagagggttaaggaaggccaccgccatgggggactccagcggctccgtgtcggtcgacgtcgagcggatcttcttcggcggcaaggagcatagagtaagaacgaggcatggctctctttcggtttctgtgtatggagacgaggacaagcccgcgctcgtaacttatccggatgtagccttaaatcgcagccaaccactaaccattcttttcatgttaggtcagttgggagcagctccgatttcagctgatgtgcctgtgccatctgtcgacgaccttgcagatcaggttgctgatgtcctcgattttttcagtttagggtctgtcatgtgcttgggtgtcactgctggtgcctatgttctcaccctctttgcaactaagtatcgggagagggttcttggcctcatgttggtttcacctgtatgcaaagccccctcctggagcgagtggctgtataataaggtattatcaaacttgctttattactacgggacacgtgggttagtcaaggaaagtttgcttcagcggtacttcagcatggacgttcgtggtaacgggcaagatcctgagtcagagattgtccaagcctgcagaagtttacttgacgagaggcagggagctaacgtctggcggttccttcaggcaattagcaggcggcatgacttaacggaatcgctgaagaagctcaagtgccggacgctgatctttgttggagaaaactcacagttccatgcggacgctgtccacatgaccacaaagctggaccggagatactgcgctctagtcgaggttcaggcttgtggttcacttgtcacagaagagcagccccatgcgatggtgatcccgatggaatacttcctcatggggtacgggctctacaggccatcgcagcaggaaagcagcccccggagcacactgagcccgttctgcatatcacccgagcttctgtcaccggagagcatgggggtgaagctgaagcccatcaagacgcgcatctcgcttaacgtttagcatgggtggatctcggatggccatggcttgacaaccacagctcagctcatgaaagtgaagactccttgggctgagttgtgcagacacagttttgatgcctttcggcacctagcgttcgaagatctacaggtagaaggcagatttgttgttaatggctgtttttgttcatatatataatatatgatattacgctgttgttatgttctaccagcaagtcatatgttccttaaacaacacacatggacaccttccgtatccgtttcacagcacccaatatgttgcaagcactccaacacagagatgagagaataaatatgctacagacacagttaatcaactatacaatgctgctctgcagcaccaactgatagacttagcctcacctacctgtcatgtcagagtagggcgtgttgggacaatttcaattgtcagcacatcagactacagctgctagtgatttcatccgattggggaggaggtggggtttttagccttggaacagtgaaacttggcgggaggagcacaggtgacacagcagctttaacttgcagaagccttgtgtaacatctctggttaccctgcacgtggtgacaacatattcaaggaaatagtaccagtagatctgctttctgttattgtaatcttttccatgcatataatctaccaaacagccatttgctcacttgcaggtggtgaaacccaaccctgatgttctaccatatccttacttctagtgtacttgctcattgtagcatctacgactcacataatgctcaccaaaattccatcacatttgttgtttgtccatatatacagcagtctgcaacttatgcgtgttagcacacaaaactctctccggttttcatgaactctggaacacacagactgttattttggtgctgtcgaactagcaggcacgttggagagtaactgactccactaactccactctcctaaagaacagggcaaagccccaacataatagacttggccactactctagctctacctgacgaaactgaattgaaaacagacagatctcacagtaagctagactctgaattggaaagtctacggctaactgaaattgatgtgcaggagttatctacaatgcggaccaccaaaattaggacattgcattaacgatcaaaaccaagagaacaatacacataatttccatcagtttgttatctgtgaacatttagattgaataaaattcatgcagagcacggagcaccatggattaggtattaaaatatgtggacaaaaaaaatattagagcatctccaagagacactctattttcgactctctatatgacactctaattacctctccatatagattacattctatatatagcatctcgttccaacagattatctatttagtttggctagtcagcggctagccaaatttggctagagatggagccaatttgaagagccggatagcttggcgagttggatggctagtctgtttgaaagttattttgctgttgaatagctaaaatttggcttgctgagccatttaactaatctattggagatgctcttagagcattggctatgcacccgaacaagatcgctaacaaactaattagtatagatgatgaaacacaactaacaaattctattgtatccatgcaccatgcttatagcgaccctaaatgtgtgatgatcctttatgagcacctatgactcacatagcactcacctaaatttcatcaacttcattgtttgtccatatttacagcaggacgcaactcatgcggcctaccaagaattaggacattgtacaaaccatataaagtataacattgttatccatcacactatgtttctgtaaatatatggctgtatcagcaataagtaatgaagaatgaaggaatgtatcctgctaggttcttactaatctcttgctagtgaatgtagtcgcattttgagcacttccaaatcatttaataatcaactaaattacatcaaccttattctttgtccatatttatagaaagacataattcatgaagcctgccaagaattaggagatcaagttaagactttagagcacacagaggttcatatttactgtttgcaggctataattgtagaacaggttaacaatccacagttcctcactccagttcattttagcacttccagaaaagactcttctgaaggatacatatttttgaaataatacagagcaaacctaatttctcaattcattaccaatccatatttacagcaagaaagaacccatacatacagcctatcagagccttttagataaactctaggtcagctaaaacatttagtctatttgtttatgcacaattgaaaaacagaccaaattcacttaataaaacaacattagtatagatgatgaaacacaactaacaaattctattgtatccatgcaccatgcttatagcgaccctaaatgtgtgatgatcctttatgagcacctatgactcacatagcgctcacctaaatttcatcaacttcattgtttgtccatatttacagcaggacgcaactcatgaggcctaccaagaattaggacattgtacaaaccatataaagtagaacattgttatccatcacactatgtttctgtaaatatatggctgtatcagcaataaggaatgaagaatgaaggaatgtatcctgctaggttcttactaatctcttgctaatgaatgtagtcgcattttaagcacttccaaatcatttaataatcaactaaattacatcaaccttattctttgtccatatttatagaaagacaactcatgaagcctgccaagaattaggagatcaagttaaaactttagagcacacagaggtacatatttactgtttgcaggctataattgtagaacaggttagcaatccacagttccacactccagttcattttagcacttccagaaaagactcttctgaaggatacatatttttgaaataatacagagcaaacctaatttctcaattcattaccaatccatatttacagcaagaaagaacccatacatacagcctatcagagtcttttag

SEQ ID NO: 29111 - DNA, 4465 bp, Zea Mays
gcgaggagttcaggggcggagccagcgaaagacaagacaagacaagccaggccagcggcggaggagagggagagagagagagagagcacgcgacaggaggcaggagggcgaggaggagcttgtagagggttaaggaaggccaccgccatgggggactccagcggctccgtgtcggtcgacgtcgagcggatcttcttcggcggcaagagtaagaacgaggcatggctctctttcggtttctgtgtatggagacgaggacaagcccgcgctcgtaacttatccggatgtagccttaaatcacatgtcttgcttccaaggattgttcttctgtccggaggctgcgtccctgttgcttcacagtttctgcgtgtaccacatcacacctcaaggacacgagttgggagcagctccgatttcagctgatgtgcctgtgccatctgtcgacgaccttgcagatcaggttgctgatgtcctcgattttttcagtttagggtctgtcatgtgcttgggtgtcactgctggtgcctatgttctcaccctctttgcaactaagtatcgggagagggttcttggcctcatgttggtttcacctgtatgcaaagccccctcctggagcgagtggctgtataataaggtattatcaaacttgctttattactacgggacacgtgggttagtcaaggaaagtttgcttcagcggtacttcagcatggacgttcgtggtaacgggcaagatcctgagtcagagattgtccaagcctgcagaagtttacttgacgagaggcagggagctaacgtctggcggttccttcaggcaattagcaggcggcatgacttaacggaatcgctgaagaagctcaagtgccggacgctgatctttgttggagaaaactcacagttccatgcggacgctgtccacatgaccacaaagctggaccggagatactgcgctctagtcgaggttcaggcttgtggttcacttgtcacagaagagcagccccatgcgatggtgatcccgatggaatacttcctcatggggtacgggctctacaggccatcgcagcaggaaagcagcccccggagcacactgagcccgttctgcatatcacccgagcttctgtcaccggagagcatgggggtgaagctgaagcccatcaagacgcgcatctcgcttaacgtttagcatgggtggatctcggatggccatggcttgacaaccacagctcagctcatgaaagtgaagactccttgggctgagttgtgcagacacagttttgatgcctttcggcacctagcgttcgaagatctacaggtagaaggcagatttgttgttaatggctgtttttgttcatatatataatatatgatatgtaacttagtacacatgtatatctcaacacgtcatcgtttcatacagtacagaaaaactaaatgtgaaagctgaatccacgtccgattctcacatgaactctcaagcccgagggacattgtgttaacatagagctgttgctgttggagctgcaaacaaaaaaaaaagaactttgcatctttcacagttttatgatctgcattcattcacaggaatcacaaaagtacgctgttgttatgttctaccagcaagtcatatgttccttaaacaacacacatggacaccttccgtatccgtttcacagcacccaatatgttgcaagcactccaacacagagatgagagaataaatatgctacagacacagttaatcaactatacaatgctgctctgcagcaccaactgatagacttagcctcacctacctgtcatgtcagagtagggcgtgttgggacaatttcaattgtcagcacatcagactacagctgctagtgatttcatccgattggggaggaggtggggtttttagccttggaacagtgaaacttggcgggaggagcacaggtgacacagcagctttaacttgcagaagccttgtgtaacatctctggttaccctgcacgtggtgacaacatattcaaggaaatagtaccagtagatctgctttctgttattgtaatcttttccatgcatataatctaccaaacagccatttgctcacttgcaggtggtgaaacccaaccctgatgttctaccatatccttacttctagtgtacttgctcattgtagcatctacgactcacataatgctcaccaaaattccatcacatttgttgtttgtccatatatacagcagtctgcaacttatgcgtgttagcacacaaaactctctccggttttcatgaactctggaacacacagactgttattttggtgctgtcgaactagcaggcacgttggagagtaactgactccactaactccactctcctaaagaacagggcaaagccccaacataatagacttggccactactctagctctacctgacgaaactgaattgaaaacagacagatctcacagtaagctagactctgaattggaaagtctacggctaactgaaattgatgtgcaggagttatctacaatgcggaccaccaaaattaggacattgcattaacgatcaaaaccaagagaacaatacacataatttccatcagtttgttatctgtgaacatttagattgaataaaattcatgcagagcacggagcaccatggattaggtattaaaatatgtggacaaaaaaaatattagagcatctccaagagacactctattttcgactctctatatgacactctaattacctctccatatagattacattctatatatagcatctcgttccaacagattatctatttagtttggctagtcagcggctagccaaatttggctagagatggagccaatttgaagagccggatagcttggcgagttggatggctagtctgtttgaaagttattttgctgttgaatagctaaaatttggcttgctgagccatttaactaatctattggagatgctcttagagcattggctatgcacccgaacaagatcgctaacaaactaattagtatagatgatgaaacacaactaacaaattctattgtatccatgcaccatgcttatagcgaccctaaatgtgtgatgatcctttatgagcacctatgactcacatagcactcacctaaatttcatcaacttcattgtttgtccatatttacagcaggacgcaactcatgcggcctaccaagaattaggacattgtacaaaccatataaagtataacattgttatccatcacactatgtttctgtaaatatatggctgtatcagcaataagtaatgaagaatgaaggaatgtatcctgctaggttcttactaatctcttgctagtgaatgtagtcgcattttgagcacttccaaatcatttaataatcaactaaattacatcaaccttattctttgtccatatttatagaaagacataattcatgaagcctgccaagaattaggagatcaagttaagactttagagcacacagaggttcatatttactgtttgcaggctataattgtagaacaggttaacaatccacagttcctcactccagttcattttagcacttccagaaaagactcttctgaaggatacatatttttgaaataatacagagcaaacctaatttctcaattcattaccaatccatatttacagcaagaaagaacccatacatacagcctatcagagccttttagataaactctaggtcagctaaaacatttagtctatttgtttatgcacaattgaaaaacagaccaaattcacttaataaaacaacattagtatagatgatgaaacacaactaacaaattctattgtatccatgcaccatgcttatagcgaccctaaatgtgtgatgatcctttatgagcacctatgactcacatagcgctcacctaaatttcatcaacttcattgtttgtccatatttacagcaggacgcaactcatgaggcctaccaagaattaggacattgtacaaaccatataaagtagaacattgttatccatcacactatgtttctgtaaatatatggctgtatcagcaataaggaatgaagaatgaaggaatgtatcctgctaggttcttactaatctcttgctaatgaatgtagtcgcattttaagcacttccaaatcatttaataatcaactaaattacatcaaccttattctttgtccatatttatagaaagacaactcatgaagcctgccaagaattaggagatcaagttaaaactttagagcacacagaggtacatatttactgtttgcaggctataattgtagaacaggttagcaatccacagttccacactccagttcattttagcacttccagaaaagactcttctgaaggatacatatttttgaaataatacagagcaaacctaatttctcaattcattaccaatccatatttacagcaagaaagaacccatacatacagcctatcagagtcttttag

SEQ ID NO: 29112 - DNA, 5090 bp, Zea Mays
gcgaggagttcaggggcggagccagcgaaagacaagacaagacaagccaggccagcggcggaggagagggagagagagagagagagcacgcgacaggaggcaggagggcgaggaggagcttgtagagggttaaggaaggccaccgccatgggggactccagcggctccgtgtcggtcgacgtcgagcggatcttcttcggcggcaaggagcatagagtaagaacgaggcatggctctctttcggtttctgtgtatggagacgaggacaagcccgcgctcgtaacttatccggatgtagccttaaatcacatgtcttgcttccaaggattgttcttctgtccggaggctgcgtccctgttgcttcacagtttctgcgtgtaccacatcacacctcaaggacacgagttgggagcagctccgatttcagctgatgtgcctgtgccatctgtcgacgaccttgcagatcaggttgctgatgtcctcgattttttcagtttagggtctgtcatgtgcttgggtgtcactgctggtgcctatgttctcaccctctttgcaactaagtatcgggagagggttcttggcctcatgttggtttcacctgtatgcaaagccccctcctggagcgagtggctgtataataaggtattatcaaacttgctttattactacgggacacgtgggttagtcaaggaaagtttgcttcagcggtacttcagcatggtacttttgatgcccccttcagcttttctcaagctctcgggcttataggcggtagtgggcgttcgggttacccaaaaatttcgggtcgggtaattcaggttttcaaaatttcgggttttaagaatcgatacccgaaattacaacgggttttacaataccgaaaattcgggtacccgaaattttgggttcgggttcgggtattcccgaactatccgaactattgtgtcggcttcataaaaacacatacaccctattaaattagtataaaaatatagtttgaataatgatatacatggacatataaaacacaagcaatctacaatcacaagttatgcacacatacacataattataaatgtacaaattaataattaagcatgacatgagtacatgacacatgaaagttcgggtaattcgggtacccgattgtgatacccgaataacccgaactaaattcgggttttgcaagttgctacccgaaattctcaaacaaaattcgggtttcgggtatttcgggttcgggttcgggtttcgggttttttgcccagccctacgtatagtgctttgcttattatccacatccactcagggccgctcctttctgatgcttcgtgcaggacgttcgtggtaacgggcaagatcctgagtcagagattgtccaagcctgcagaagtttacttgacgagaggcagggagctaacgtctggcggttccttcaggcaattagcaggcggcatgacttaacggaatcgctgaagaagctcaagtgccggacgctgatctttgttggagaaaactcacagttccatgcggacgctgtccacatgaccacaaagctggaccggagatactgcgctctagtcgaggttcaggcttgtggttcacttgtcacagaagagcagccccatgcgatggtgatcccgatggaatacttcctcatggggtacgggctctacaggccatcgcagcaggaaagcagcccccggagcacactgagcccgttctgcatatcacccgagcttctgtcaccggagagcatgggggtgaagctgaagcccatcaagacgcgcatctcgcttaacgtttagcatgggtggatctcggatggccatggcttgacaaccacagctcagctcatgaaagtgaagactccttgggctgagttgtgcagacacagttttgatgcctttcggcacctagcgttcgaagatctacaggtagaaggcagatttgttgttaatggctgtttttgttcatatatataatatatgatatgtaacttagtacacatgtatatctcaacacgtcatcgtttcatacagtacagaaaaactaaatgtgaaagctgaatccacgtccgattctcacatgaactctcaagcccgagggacattgtgttaacatagagctgttgctgttggagctgcaaacaaaaaaaaaagaactttgcatctttcacagttttatgatctgcattcattcacaggaatcacaaaagtacgctgttgttatgttctaccagcaagtcatatgttccttaaacaacacacatggacaccttccgtatccgtttcacagcacccaatatgttgcaagcactccaacacagagatgagagaataaatatgctacagacacagttaatcaactatacaatgctgctctgcagcaccaactgatagacttagcctcacctacctgtcatgtcagagtagggcgtgttgggacaatttcaattgtcagcacatcagactacagctgctagtgatttcatccgattggggaggaggtggggtttttagccttggaacagtgaaacttggcgggaggagcacaggtgacacagcagctttaacttgcagaagccttgtgtaacatctctggttaccctgcacgtggtgacaacatattcaaggaaatagtaccagtagatctgctttctgttattgtaatcttttccatgcatataatctaccaaacagccatttgctcacttgcaggtggtgaaacccaaccctgatgttctaccatatccttacttctagtgtacttgctcattgtagcatctacgactcacataatgctcaccaaaattccatcacatttgttgtttgtccatatatacagcagtctgcaacttatgcgtgttagcacacaaaactctctccggttttcatgaactctggaacacacagactgttattttggtgctgtcgaactagcaggcacgttggagagtaactgactccactaactccactctcctaaagaacagggcaaagccccaacataatagacttggccactactctagctctacctgacgaaactgaattgaaaacagacagatctcacagtaagctagactctgaattggaaagtctacggctaactgaaattgatgtgcaggagttatctacaatgcggaccaccaaaattaggacattgcattaacgatcaaaaccaagagaacaatacacataatttccatcagtttgttatctgtgaacatttagattgaataaaattcatgcagagcacggagcaccatggattaggtattaaaatatgtggacaaaaaaaatattagagcatctccaagagacactctattttcgactctctatatgacactctaattacctctccatatagattacattctatatatagcatctcgttccaacagattatctatttagtttggctagtcagcggctagccaaatttggctagagatggagccaatttgaagagccggatagcttggcgagttggatggctagtctgtttgaaagttattttgctgttgaatagctaaaatttggcttgctgagccatttaactaatctattggagatgctcttagagcattggctatgcacccgaacaagatcgctaacaaactaattagtatagatgatgaaacacaactaacaaattctattgtatccatgcaccatgcttatagcgaccctaaatgtgtgatgatcctttatgagcacctatgactcacatagcactcacctaaatttcatcaacttcattgtttgtccatatttacagcaggacgcaactcatgcggcctaccaagaattaggacattgtacaaaccatataaagtataacattgttatccatcacactatgtttctgtaaatatatggctgtatcagcaataagtaatgaagaatgaaggaatgtatcctgctaggttcttactaatctcttgctagtgaatgtagtcgcattttgagcacttccaaatcatttaataatcaactaaattacatcaaccttattctttgtccatatttatagaaagacataattcatgaagcctgccaagaattaggagatcaagttaagactttagagcacacagaggttcatatttactgtttgcaggctataattgtagaacaggttaacaatccacagttcctcactccagttcattttagcacttccagaaaagactcttctgaaggatacatatttttgaaataatacagagcaaacctaatttctcaattcattaccaatccatatttacagcaagaaagaacccatacatacagcctatcagagccttttagataaactctaggtcagctaaaacatttagtctatttgtttatgcacaattgaaaaacagaccaaattcacttaataaaacaacattagtatagatgatgaaacacaactaacaaattctattgtatccatgcaccatgcttatagcgaccctaaatgtgtgatgatcctttatgagcacctatgactcacatagcgctcacctaaatttcatcaacttcattgtttgtccatatttacagcaggacgcaactcatgaggcctaccaagaattaggacattgtacaaaccatataaagtagaacattgttatccatcacactatgtttctgtaaatatatggctgtatcagcaataaggaatgaagaatgaaggaatgtatcctgctaggttcttactaatctcttgctaatgaatgtagtcgcattttaagcacttccaaatcatttaataatcaactaaattacatcaaccttattctttgtccatatttatagaaagacaactcatgaagcctgccaagaattaggagatcaagttaaaactttagagcacacagaggtacatatttactgtttgcaggctataattgtagaacaggttagcaatccacagttccacactccagttcattttagcacttccagaaaagactcttctgaaggatacatatttttgaaataatacagagcaaacctaatttctcaattcattaccaatccatatttacagcaagaaagaacccatacatacagcctatcagagtcttttag

SEQ ID NO: 29113 - DNA, 1483 bp, Zea Mays
cggggaccccgtcgtttgcctcacccctagttagctaaccgcggtcggctcgcggcccgagggtacgaccatggttagcaggcagctttataagcgagcagcccttcggcctggtgtccctcgtccccagcccgcgcactgcccccggtctctctctctcaacacaccgataagcccagtccaccggatctcccgtagtccagagactgagttgaaggaaggaagccatgatgatgatgggcgaaggcgtgagcatgccgccgtggtcccaccacgtccctgtgagcggcgtcgacgaaggcgttcgagagctacctcaccaagagcatcatgtgctcgtcgccgaccagcaccctcctgtcgccgcccaagtcgcccccgtcggagtccccgccattgtcgcccgacttccgccgtgggtgctggccgggcgccgggtcccccgtcaacgacgtgctcgcctcgctccgccagctccgcctcagcagggccaactcgtccccgtcgggcggctggtgcggctaccctgcatccgcggtcgcgtacggatcgcctacggggggcgcgctctacggcctgtcctccaccccgagggccaccgccgcatcctgctacatggccaacctggaccctctcgacgtcagcttcggcggcgacgacgagcccgtggagagggtggagtccggccgcgccctccgcgcgaaggtgttcgagcggcttagcagggagggcgctgtttccggcgacgccggtggccccgacgtcggttgggtctccgacctcatcaactgagcgcggcggcggcagtggcaataacaatgggcacggagaaaggtgatggtgagccgtaacggagaaggatggtacggagtatccaaaaaaaaaatatttccctatatttaatttcgttcctcagttaattccgataatccccgtgtacatatctatcaccctgtgaatattctcagttggtaagagggaggatgctaggtggtggaagtggaaggaggggtggatttgttttggggttcttgagggtagtagaaaatatccaagaaaaatagaaaaaaaaagtgtacagcagatgcagtagcgcggtggcggtggttgtgtccctcttctgtgcatagggttagggtgttggtggcgaagcatggcgggggctgatgtgacgacgaaggcgggccggatttccaccacggcttggtatttctgtgattccggaacatggtagtttgatgttgttttttttaagttagtggactagttggcgattgcaacctgcttgtggattactctcccattttgttatgtaatctgttaagacatcagcattccctacagcatattttgtgtacctacgtcttagtagttgccgaaatctcaatcaaaatcacccgctattggaggtgaatttcccatgtaatcttctgctcatgtaaatggttttctttttaatgaatcgatgtttatcgccctaatg

SEQ ID NO: 29114 - DNA, 1464 bp, Zea Mays
ggacggcatggctgatggctccaacgaacgcaggacaggtacaagtactacctgcaggctgcagcgcaactgccagtcgcccgccctctagccttcgtgccgtctgcccgcccgccgtctagtcctctcttcgttctcttgctctcgcgctagcagagcggaggaggaggagaccaaccgggttggtggacgtgggcgggaggtgtgtgcgtgtgtcgtccatggggcggacgccgtgctgcgacagggcggccgtgaagcggggcccgtggtcgccggaggaggacgaggcgctgcgcagctacgtccagcgccacggcagcggcggcaactggatcaccatgcccaagaaagcgggtgcactgacgacgggtggatcgttgccggtcggcgtcgcgtgcagggctcaagaggtgcggcaagagctgcaggctgcgctggctcaactacctccgcccggacatccgccacggcggcttcaccgccgaggaggacgccgtcatcatgtccctctacgcccagctcgggagcaaatggtcgctgatagcctcgcagatggaggggaggacggacaacgacgtgaagaaccactggaacaccaagctcaagaagcgcctcctggccgcagcggccgcgtcctccgccccgccgccagcgcccgcgcccgcgcctctttccagcaccacgctcacgtcctcgctgttcccgtcgctcgccataccgaccgtgaagaccgaggcgtacacctgcgacgacttcctggcgccggcgctcggcctcggggacccgttcgccgccgccgccgccgccgccgacggctccacctcggccgcctccgcggcgtcgtcggcctccaacaactggtcggcggcggagaacggcgcaggcgaagcgtccctcttcctgctggacttctgcgcgggccccgacctcgccggcgccgaccagctccacctccccggcggctactactaccctctcgacccgatcttgccgtcgtcgcctcgtcggtatagctagcttcttcgcgcgctgcgtacgcggtacgccgctgtcgttccaaggacagcgtagcgtagcggtagggtctgtagtacgtactaccatggtgcatgtgctcgggagtcgggatcgtcgtcgcttcgttgatcagaagctaagctgcatgaaagcaaagctagccgcgcgcgcgcgttttgtctaggtcttcacgtcagatttctgccgaaattaacatttccagtcgccaattcgccatcggtgacctttgaaagaaacaaagaaagaaaaaaaaaactagtatctgtgactgtgattgaaaatgtgctactcgtagttggctaatggcgttgctctagtcttgaaaaaaaaaggcttcatgttcttgagtgcctattaactcgttaatttgttttgaaaaggatttcagtgtagctgtgtgttatcaaggcaattcacttcctt

SEQ ID NO: 29115 - DNA, 591 bp, Zea Mays
gtaaaacccgcgacgcgccaacactcggttcctggagctgatggccgttctcgtcttcctggcgatcgccctggttagagaaagctgtgcgggatcgatggaccgttgaacggaggcgcgtctgctctgccgcatgtattatattgattcaggtggacggtcgggtttcagagagactgctgctcaagtctttttacgtgggactgtgggagtgcagctgctgcatccatcgatcgcagcgctaggttctccagaaaccgaggcaagaggagtgcttgtggtacctcttcatctagcgtgcacaacacccacccgctactactgtagtagccgtagggggcaccgttgaagaagtagagggagtactggcgccgtcacagggaggggagaggccaccgttgattcgttgaagccagtctgaacggtggtgcctggacaagtagcgcctgggccccagctgctcagacttcggacaaccagtggatcgtgatctgtgccttgtgcgttcaatgctactggtggtagcaatagcattgaagcaaacgtcacgcaggcagagaacgcgaggctgcgctgttactcacgttttcc

SEQ ID NO: 29116 - DNA, 2036 bp, Zea Mays
cagagagactgctgctcaagtctttttacgtgggactgtgggagtgcagctgctgcatccatcgatcgcagcgctaggttctccagcgcagcaagacggagaaacaagaaccatccctccccctaccgctgctactcatgcacgcgcgcactgcctcctggtgccgccgcgtatgatccagacatgaatagggcgcacagcagcagctccaagctcatcaacgagaagctcgtggaacaccggatctccactgcgaagcactgcccccactgcggcgagaaaatcgacagcaaaccggattgggtggggctgccggcaggcgtcaagttcgatccaactgaccaggagctgatcgagcacctcgaggcgaaagtgaaggatgaaggctcgagatctcaccctctcatcgacgagttcatacccacaatagatggggaggacggcatatgttacacccaccccgagaaacttccaggtgtgacgagggatggcctaagcaagcacttcttccaccggccgtccaaggcctacacgacgggcacgaggaagaggaggaagatacagacggagtgcgacgtccacaagggggagacgaggtggcacaagaccggcaagacgcggccggtgatggtgaacggccggcagaaggggtgcaagaagatattggtgctgtacaccaacttcggcaagcaccgcaagccggagaagacgaactgggtcatgcaccagtaccacctcggcgacctagaagaggagaaggagggggagctggtggtgtgcaagatcttctaccagacgcaacccaggcagtgcagctggtcctccgaccggggcgccgccgccactgccttggcagcaacggcggcagcggcggcggcgcaggagcagcataggagggatagtggcagtggcagctgctcgtctagggaccacgaggtgtcagccacatcgttcccagccggatacacagtcaccacggccgtcgagatgcagcagcatatgaagcagcctgcggaccatttcagcttcgcgcctttcaggaaaaccttcgaccaggaggttggtataggtggtgatcaggtgccatctaatcagcttggacgttcagagccgcatcatgccggcctggggcagcagccacacggcccggtgctcgcgacgaagacggctgtgcctgctacagctttcctgatcagtaggccatcgaaccctgtctcgactatagtgccacctgcaatgcagcacgcatcagttgttctcgatcatgatcagttccatgtgccagcaatccttctccatcaccatgacaaatttcagccacaacaaaagcttgaccgcagatctgccggcttggaagaactgataatgggctgcacgtcgtccacaagcacaaaaggagatgcttccattgctcacccccaagagacagaatggccttacacgtactggccacctgacaaccaagatcatcatgggtagtagcaacagggacctggtaaatagtggcgatgtgaatgctgaaggaacactaaccgcaaccactttcactggaatggtttttgtctgcttgaatatgcagcgttgctttcttggagaatgtacacctacaatagtggggaaagaacagagaaaaaaaacgtatctctgtagatctccctcaataaagaaatgaggataaaactagttaacagtgtgagctctccaagacagaagagacaaaatggccaacgaaaagagaagggggaaagaccgatgggaggaaaggtactgtgtgtgctgacattgaagggatcatgtgtggacagtttagatgtattagaacaccttaatcaagtataactataatcagtttacggtttatcacagttttttattcgtgctacctgttagtggcattgtttgcatgtacattaacccttttaatttcttttagtttctaaattgatgctgattttcctttggttagttcatgctaatatgcatcacgaagaaataaagttagtaagaagctcataattccttcctttttttagcac

SEQ ID NO: 29117 - DNA, 2625 bp, Zea Mays
gtgatatatgtttgcatatcgcacacttttgccaacgttaaaaatggaagtgagacagatgctatgtgctatatgctgtagtcgtagaccaagcacacagatggtggattgtcatccgtggattgagttacaattactagtgttgaagcaaaactcatctttttgtgtgttattttatatcatcagaatcagcggcctgcagttagaagtgcacccttgtccgggatctaattgatgacattcatgtgaactcctattcataagattatcaacgaagttccttattatccagaaaaaaaaaggcatgccagattttttttccctctatccaccaaaactccacacatgtcaccgggacagccagacggagacgtggcaagattctctttggcagtattgcttgctcgtggcttctatcatctgccatgcgcctgtgccacaactttggcatgcgcatattattttttatgtgctctaccctctatatacccaccagcttgtagtactaccagtattcgagctgttggggtccatcaagtgttgtactgctccatttgccttgggtaggaagcaagctctgggattcacccctctatctgtccagctccagcatcacgcactctcatggcaaaaaggaccatcatttgagcacaagggcctcctccatatgcccatcgcagcaagacggagaaacaagaaccatccctccccctaccgctgctactcatgcacgcgcgcactgcctcctggtgccgccgcgtatgatccagacatgaatagggcgcacagcagcagctccaagctcatcaacgagaagctcgtggaacaccggatctccactgcgaagcactgcccccactgcggcgagaaaatcgacagcaaaccggattgggtggggctgccggcaggcgtcaagttcgatccaactgaccaggagctgatcgagcacctcgaggcgaaagtgaaggatgaaggctcgagatctcaccctctcatcgacgagttcatacccacaatagatggggaggacggcatatgttacacccaccccgagaaacttccaggtgtgacgagggatggcctaagcaagcacttcttccaccggccgtccaaggcctacacgacgggcacgaggaagaggaggaagatacagacggagtgcgacgtccacaagggggagacgaggtggcacaagaccggcaagacgcggccggtgatggtgaacggccggcagaaggggtgcaagaagatattggtgctgtacaccaacttcggcaagcaccgcaagccggagaagacgaactgggtcatgcaccagtaccacctcggcgacctagaagaggagaaggagggggagctggtggtgtgcaagatcttctaccagacgcaacccaggcagtgcagctggtcctccgaccggggcgccgccgccactgccttggcagcaacggcggcagcggcggcggcgcaggagcagcataggagggatagtggcagtggcagctgctcgtctagggaccacgaggtgtcagccacatcgttcccagccggatacacagtcaccacggccgtcgagatgcagcagcatatgaagcagcctgcggaccatttcagcttcgcgcctttcaggaaaaccttcgaccaggaggttggtataggtggtgatcaggtgccatctaatcagcttggacgttcagagccgcatcatgccggcctggggcagcagccacacggcccggtgctcgcgacgaagacggctgtgcctgctacagctttcctgatcagtaggccatcgaaccctgtctcgactatagtgccacctgcaatgcagcacgcatcagttgttctcgatcatgatcagttccatgtgccagcaatccttctccatcaccatgacaaatttcagccacaacaaaagcttgaccgcagatctgccggcttggaagaactgataatgggctgcacgtcgtccacaagcacaaaaggagatgcttccattgctcacccccaagagacagaatggccttacacgtactggccacctgacaaccaagatcatcatgggtagtagcaacagggacctggtaaatagtggcgatgtgaatgctgaaggaacactaaccgcaaccactttcactggaatggtttttgtctgcttgaatatgcagcgttgctttcttggagaatgtacacctacaatagtggggaaagaacagagaaaaaaaacgtatctctgtagatctccctcaataaagaaatgaggataaaactagttaacagtgtgagctctccaagacagaagagacaaaatggccaacgaaaagagaagggggaaagaccgatgggaggaaaggtactgtgtgtgctgacattgaagggatcatgtgtggacagtttagatgtattagaacaccttaatcaagtataactataatcagtttacggtttatcacagttttttattcgtgctacctgttagtggcattgtttgcatgtacattaacccttttaatttcttttagtttctaaattgatgctgattttcctttggttagttcatgctaatatgcatcacgaagaaataaagttagtaagaagctcataattccttcctttttttagcac

SEQ ID NO: 29118 - DNA, 2620 bp, Zea Mays
gtgatatatgtttgcatatcgcacacttttgccaacgttaaaaatggaagtgagacagatgctatgtgctatatgctgtagtcgtagaccaagcacacagatggtggattgtcatccgtggattgagttacaattactagtgttgaagcaaaactcatctttttgtgtgttattttatatcatcagaatcagcggcctgcagttagaagtgcacccttgtccgggatctaattgatgacattcatgtgaactcctattcataagattatcaacgaagttccttattatccagaaaaaaaaaggcatgccagattttttttccctctatccaccaaaactccacacatgtcaccgggacagccagacggagacgtggcaagattctctttggcagtattgcttgctcgtggcttctatcatctgccatgcgcctgtgccacaactttggcatgcgcatattattttttatgtgctctaccctctatatacccaccagcttgtagtactaccagtattcgagctgttggggtccatcaagtgttgtactgctccatttgccttgggtaggaagcaagctctgggattcacccctctatctgtccagctccagcatcacgcactctcatggcaaaaaggaccatcatttgagcacaagggcctcctccatatgcccatcaagacggagaaacaagaaccatccctccccctaccgctgctactcatgcacgcgcgcactgcctcctggtgccgccgcgtatgatccagacatgaatagggcgcacagcagcagctccaagctcatcaacgagaagctcgtggaacaccggatctccactgcgaagcactgcccccactgcggcgagaaaatcgacagcaaaccggattgggtggggctgccggcaggcgtcaagttcgatccaactgaccaggagctgatcgagcacctcgaggcgaaagtgaaggatgaaggctcgagatctcaccctctcatcgacgagttcatacccacaatagatggggaggacggcatatgttacacccaccccgagaaacttccaggtgtgacgagggatggcctaagcaagcacttcttccaccggccgtccaaggcctacacgacgggcacgaggaagaggaggaagatacagacggagtgcgacgtccacaagggggagacgaggtggcacaagaccggcaagacgcggccggtgatggtgaacggccggcagaaggggtgcaagaagatattggtgctgtacaccaacttcggcaagcaccgcaagccggagaagacgaactgggtcatgcaccagtaccacctcggcgacctagaagaggagaaggagggggagctggtggtgtgcaagatcttctaccagacgcaacccaggcagtgcagctggtcctccgaccggggcgccgccgccactgccttggcagcaacggcggcagcggcggcggcgcaggagcagcataggagggatagtggcagtggcagctgctcgtctagggaccacgaggtgtcagccacatcgttcccagccggatacacagtcaccacggccgtcgagatgcagcagcatatgaagcagcctgcggaccatttcagcttcgcgcctttcaggaaaaccttcgaccaggaggttggtataggtggtgatcaggtgccatctaatcagcttggacgttcagagccgcatcatgccggcctggggcagcagccacacggcccggtgctcgcgacgaagacggctgtgcctgctacagctttcctgatcagtaggccatcgaaccctgtctcgactatagtgccacctgcaatgcagcacgcatcagttgttctcgatcatgatcagttccatgtgccagcaatccttctccatcaccatgacaaatttcagccacaacaaaagcttgaccgcagatctgccggcttggaagaactgataatgggctgcacgtcgtccacaagcacaaaaggagatgcttccattgctcacccccaagagacagaatggccttacacgtactggccacctgacaaccaagatcatcatgggtagtagcaacagggacctggtaaatagtggcgatgtgaatgctgaaggaacactaaccgcaaccactttcactggaatggtttttgtctgcttgaatatgcagcgttgctttcttggagaatgtacacctacaatagtggggaaagaacagagaaaaaaaacgtatctctgtagatctccctcaataaagaaatgaggataaaactagttaacagtgtgagctctccaagacagaagagacaaaatggccaacgaaaagagaagggggaaagaccgatgggaggaaaggtactgtgtgtgctgacattgaagggatcatgtgtggacagtttagatgtattagaacaccttaatcaagtataactataatcagtttacggtttatcacagttttttattcgtgctacctgttagtggcattgtttgcatgtacattaacccttttaatttcttttagtttctaaattgatgctgattttcctttggttagttcatgctaatatgcatcacgaagaaataaagttagtaagaagctcataattccttcctttttttagcac

SEQ ID NO: 29119 - DNA, 2146 bp, Zea Mays
agagaggggccctttaacttttcctcaaggccgggctataggggtgtgtgggcttcagttaaagtaggcaggaattctgctcgcttgtattaaaccggtgaaagcagctgcctgcctgcctcgattttttttatatgtgccccctctctccctcactgctctcgctctctcctttgcactgctcctccgacttgctcttcgcaagacggagaaacaagaaccatccctccccctaccgctgctactcatgcacgcgcgcactgcctcctggtgccgccgcgtatgatccagacatgaatagggcgcacagcagcagctccaagctcatcaacgagaagctcgtggaacaccggatctccactgcgaagcactgcccccactgcggcgagaaaatcgacagcaaaccggattgggtggggctgccggcaggcgtcaagttcgatccaactgaccaggagctgatcgagcacctcgaggcgaaagtgaaggatgaaggctcgagatctcaccctctcatcgacgagttcatacccacaatagatggggaggacggcatatgttacacccaccccgagaaacttccaggtgtgacgagggatggcctaagcaagcacttcttccaccggccgtccaaggcctacacgacgggcacgaggaagaggaggaagatacagacggagtgcgacgtccacaagggggagacgaggtggcacaagaccggcaagacgcggccggtgatggtgaacggccggcagaaggggtgcaagaagatattggtgctgtacaccaacttcggcaagcaccgcaagccggagaagacgaactgggtcatgcaccagtaccacctcggcgacctagaagaggagaaggagggggagctggtggtgtgcaagatcttctaccagacgcaacccaggcagtgcagctggtcctccgaccggggcgccgccgccactgccttggcagcaacggcggcagcggcggcggcgcaggagcagcataggagggatagtggcagtggcagctgctcgtctagggaccacgaggtgtcagccacatcgttcccagccggatacacagtcaccacggccgtcgagatgcagcagcatatgaagcagcctgcggaccatttcagcttcgcgcctttcaggaaaaccttcgaccaggaggttggtataggtggtgatcaggtgccatctaatcagcttggacgttcagagccgcatcatgccggcctggggcagcagccacacggcccggtgctcgcgacgaagacggctgtgcctgctacagctttcctgatcagtaggccatcgaaccctgtctcgactatagtgccacctgcaatgcagcacgcatcagttgttctcgatcatgatcagttccatgtgccagcaatccttctccatcaccatgacaaatttcagccacaacaaaagcttgaccgcagatctgccggcttggaagaactgataatgggctgcacgtcgtccacaagcacaaaaggagatgcttccattgctcacccccaagagacagaatggccttacacgtactggccacctgacaaccaagatcatcatgggtagtagcaacagggacctggtaaatagtggcgatgtgaatgctgaaggaacactaaccgcaaccactttcactggaatggtttttgtctgcttgaatatgcagcgttgctttcttggagaatgtacacctacaatagtggggaaagaacagagaaaaaaaacgtatctctgtagatctccctcaataaagaaatgaggataaaactagttaacagtgtgagctctccaagacagaagagacaaaatggccaacgaaaagagaagggggaaagaccgatgggaggaaaggtactgtgtgtgctgacattgaagggatcatgtgtggacagtttagatgtattagaacaccttaatcaagtataactataatcagtttacggtttatcacagttttttattcgtgctacctgttagtggcattgtttgcatgtacattaacccttttaatttcttttagtttctaaattgatgctgattttcctttggttagttcatgctaatatgcatcacgaagaaataaagttagtaagaagctcataattccttcctttttttagcac

SEQ ID NO: 29120 - DNA, 2104 bp, Zea Mays
gtgggcttcagttaaagtaggcaggaattctgctcgcttgtattaaaccggtgaaagcagctgcctgcctgcctcgattttttttatatgtgccccctctctccctcactgctctcgctctctcctttgcactgctcctccgacttgctcttcgcgcagcaagacggagaaacaagaaccatccctccccctaccgctgctactcatgcacgcgcgcactgcctcctggtgccgccgcgtatgatccagacatgaatagggcgcacagcagcagctccaagctcatcaacgagaagctcgtggaacaccggatctccactgcgaagcactgcccccactgcggcgagaaaatcgacagcaaaccggattgggtggggctgccggcaggcgtcaagttcgatccaactgaccaggagctgatcgagcacctcgaggcgaaagtgaaggatgaaggctcgagatctcaccctctcatcgacgagttcatacccacaatagatggggaggacggcatatgttacacccaccccgagaaacttccaggtgtgacgagggatggcctaagcaagcacttcttccaccggccgtccaaggcctacacgacgggcacgaggaagaggaggaagatacagacggagtgcgacgtccacaagggggagacgaggtggcacaagaccggcaagacgcggccggtgatggtgaacggccggcagaaggggtgcaagaagatattggtgctgtacaccaacttcggcaagcaccgcaagccggagaagacgaactgggtcatgcaccagtaccacctcggcgacctagaagaggagaaggagggggagctggtggtgtgcaagatcttctaccagacgcaacccaggcagtgcagctggtcctccgaccggggcgccgccgccactgccttggcagcaacggcggcagcggcggcggcgcaggagcagcataggagggatagtggcagtggcagctgctcgtctagggaccacgaggtgtcagccacatcgttcccagccggatacacagtcaccacggccgtcgagatgcagcagcatatgaagcagcctgcggaccatttcagcttcgcgcctttcaggaaaaccttcgaccaggaggttggtataggtggtgatcaggtgccatctaatcagcttggacgttcagagccgcatcatgccggcctggggcagcagccacacggcccggtgctcgcgacgaagacggctgtgcctgctacagctttcctgatcagtaggccatcgaaccctgtctcgactatagtgccacctgcaatgcagcacgcatcagttgttctcgatcatgatcagttccatgtgccagcaatccttctccatcaccatgacaaatttcagccacaacaaaagcttgaccgcagatctgccggcttggaagaactgataatgggctgcacgtcgtccacaagcacaaaaggagatgcttccattgctcacccccaagagacagaatggccttacacgtactggccacctgacaaccaagatcatcatgggtagtagcaacagggacctggtaaatagtggcgatgtgaatgctgaaggaacactaaccgcaaccactttcactggaatggtttttgtctgcttgaatatgcagcgttgctttcttggagaatgtacacctacaatagtggggaaagaacagagaaaaaaaacgtatctctgtagatctccctcaataaagaaatgaggataaaactagttaacagtgtgagctctccaagacagaagagacaaaatggccaacgaaaagagaagggggaaagaccgatgggaggaaaggtactgtgtgtgctgacattgaagggatcatgtgtggacagtttagatgtattagaacaccttaatcaagtataactataatcagtttacggtttatcacagttttttattcgtgctacctgttagtggcattgtttgcatgtacattaacccttttaatttcttttagtttctaaattgatgctgattttcctttggttagttcatgctaatatgcatcacgaagaaataaagttagtaagaagctcataattccttcctttttttagcac

SEQ ID NO: 29121 - DNA, 2088 bp, Zea Mays
ttttttttatatgtgccccctctctccctcactgctctcgctctctcctttgcactgctcctccgacttgctcttcgcgcagcaagacggagaaacaagaaccatccctccccctaccgctgctactcatgcacgcgcgcactgcctcctggtgccgccgcgtatgatccagacatgaatagggcgcacagcagcagctccaagctcatcaacgagaagctcgtggaacaccggatctccactgcgaagcactgcccccactgcggcgagaaaatcgacagcaaaccggattgggtggggctgccggcaggcgtcaagttcgatccaactgaccaggagctgatcgagcacctcgaggcgaaagtgaaggatgaaggctcgagatctcaccctctcatcgacgagttcatacccacaatagatggggaggacggcatatgttacacccaccccgagaaacttccaggtgtgacgagggatggcctaagcaagcacttcttccaccggccgtccaaggcctacacgacgggcacgaggaagaggaggaagatacagacggagtgcgacgtccacaagggggagacgaggtggcacaagaccggcaagacgcggccggtgatggtgaacggccggcagaaggggtgcaagaagatattggtgctgtacaccaacttcggcaagcaccgcaagccggagaagacgaactgggtcatgcaccagtaccacctcggcgacctagaagaggagaaggagggggagctggtggtgtgcaagatcttctaccagacgcaacccaggcagtgcagctggtcctccgaccggggcgccgccgccactgccttggcagcaacggcggcagcggcggcggcgcaggagcagcataggagggatagtggcagtggcagctgctcgtctagggaccacgaggtgtcagccacatcgttcccagccggatacacagtcaccacggccgtcgagatgcagcagcatatgaagcagcctgcggaccatttcagcttcgcgcctttcaggaaaaccttcgaccaggaggttggtataggtggtgatcaggtgccatctaatcagcttggacgttcagagccgcatcatgccggcctggggcagcagccacacggcccggtgctcgcgacgaagacggctgtgcctgctacagctttcctgatcagtaggccatcgaaccctgtctcgactatagtgccacctgcaatgcagcacgcatcagttgttctcgatcatgatcagttccatgtgccagcaatccttctccatcaccatgacaaatttcagaacactgctttagttattgttccatttcaacattattataacaaagaacatgcaccaacagccacaacaaaagcttgaccgcagatctgccggcttggaagaactgataatgggctgcacgtcgtccacaagcacaaaaggagatgcttccattgctcacccccaagagacagaatggccttacacgtactggccacctgacaaccaagatcatcatgggtagtagcaacagggacctggtaaatagtggcgatgtgaatgctgaaggaacactaaccgcaaccactttcactggaatggtttttgtctgcttgaatatgcagcgttgctttcttggagaatgtacacctacaatagtggggaaagaacagagaaaaaaaacgtatctctgtagatctccctcaataaagaaatgaggataaaactagttaacagtgtgagctctccaagacagaagagacaaaatggccaacgaaaagagaagggggaaagaccgatgggaggaaaggtactgtgtgtgctgacattgaagggatcatgtgtggacagtttagatgtattagaacaccttaatcaagtataactataatcagtttacggtttatcacagttttttattcgtgctacctgttagtggcattgtttgcatgtacattaacccttttaatttcttttagtttctaaattgatgctgattttcctttggttagttcatgctaatatgcatcacgaagaaataaagttagtaagaagctcataattccttcctttttttagcac

SEQ ID NO: 29122 - DNA, 2007 bp, Zea Mays
ttttttttatatgtgccccctctctccctcactgctctcgctctctcctttgcactgctcctccgacttgctcttcgcgcagcaagacggagaaacaagaaccatccctccccctaccgctgctactcatgcacgcgcgcactgcctcctggtgccgccgcgtatgatccagacatgaatagggcgcacagcagcagctccaagctcatcaacgagaagctcgtggaacaccggatctccactgcgaagcactgcccccactgcggcgagaaaatcgacagcaaaccgaaggattgggtggggctgccggcaggcgtcaagttcgatccaactgaccaggagctgatcgagcacctcgaggcgaaagtgaaggatgaaggctcgagatctcaccctctcatcgacgagttcatacccacaatagatggggaggacggcatatgttacacccaccccgagaaacttccaggtgtgacgagggatggcctaagcaagcacttcttccaccggccgtccaaggcctacacgacgggcacgaggaagaggaggaagatacagacggagtgcgacgtccacaagggggagacgaggtggcacaagaccggcaagacgcggccggtgatggtgaacggccggcagaaggggtgcaagaagatattggtgctgtacaccaacttcggcaagcaccgcaagccggagaagacgaactgggtcatgcaccagtaccacctcggcgacctagaagaggagaaggagggggagctggtggtgtgcaagatcttctaccagacgcaacccaggcagtgcagctggtcctccgaccggggcgccgccgccactgccttggcagcaacggcggcagcggcggcggcgcaggagcagcataggagggatagtggcagtggcagctgctcgtctagggaccacgaggtgtcagccacatcgttcccagccggatacacagtcaccacggccgtcgagatgcagcagcatatgaagcagcctgcggaccatttcagcttcgcgcctttcaggaaaaccttcgaccaggaggttggtataggtggtgatcaggtgccatctaatcagcttggacgttcagagccgcatcatgccggcctggggcagcagccacacggcccggtgctcgcgacgaagacggctgtgcctgctacagctttcctgatcagtaggccatcgaaccctgtctcgactatagtgccacctgcaatgcagcacgcatcagttgttctcgatcatgatcagttccatgtgccagcaatccttctccatcaccatgacaaatttcagatctgccggcttggaagaactgataatgggctgcacgtcgtccacaagcacaaaaggagatgcttccattgctcacccccaagagacagaatggccttacacgtactggccacctgacaaccaagatcatcatgggtagtagcaacagggacctggtaaatagtggcgatgtgaatgctgaaggaacactaaccgcaaccactttcactggaatggtttttgtctgcttgaatatgcagcgttgctttcttggagaatgtacacctacaatagtggggaaagaacagagaaaaaaaacgtatctctgtagatctccctcaataaagaaatgaggataaaactagttaacagtgtgagctctccaagacagaagagacaaaatggccaacgaaaagagaagggggaaagaccgatgggaggaaaggtactgtgtgtgctgacattgaagggatcatgtgtggacagtttagatgtattagaacaccttaatcaagtataactataatcagtttacggtttatcacagttttttattcgtgctacctgttagtggcattgtttgcatgtacattaacccttttaatttcttttagtttctaaattgatgctgattttcctttggttagttcatgctaatatgcatcacgaagaaataaagttagtaagaagctcataattccttcctttttttagcac

SEQ ID NO: 29123 - DNA, 1846 bp, Zea Mays
ttttttttatatgtgccccctctctccctcactgctctcgctctctcctttgcactgctcctccgacttgctcttcggtttgcttctcttgccttggttcccttgctttgttgtttcgatccgaatccatctcactcatgcacgcgcgcactgcctcctggtgccgccgcgtatgatccagacatgaatagggcgcacagcagcagctccaagctcatcaacgagaagctcgtggaacaccggatctccactgcgaagcactgcccccactgcggcgagaaaatcgacagcaaaccggtgtgacgagggatggcctaagcaagcacttcttccaccggccgtccaaggcctacacgacgggcacgaggaagaggaggaagatacagacggagtgcgacgtccacaagggggagacgaggtggcacaagaccggcaagacgcggccggtgatggtgaacggccggcagaaggggtgcaagaagatattggtgctgtacaccaacttcggcaagcaccgcaagccggagaagacgaactgggtcatgcaccagtaccacctcggcgacctagaagaggagaaggagggggagctggtggtgtgcaagatcttctaccagacgcaacccaggcagtgcagctggtcctccgaccggggcgccgccgccactgccttggcagcaacggcggcagcggcggcggcgcaggagcagcataggagggatagtggcagtggcagctgctcgtctagggaccacgaggtgtcagccacatcgttcccagccggatacacagtcaccacggccgtcgagatgcagcagcatatgaagcagcctgcggaccatttcagcttcgcgcctttcaggaaaaccttcgaccaggaggttggtataggtggtgatcaggtgccatctaatcagcttggacgttcagagccgcatcatgccggcctggggcagcagccacacggcccggtgctcgcgacgaagacggctgtgcctgctacagctttcctgatcagtaggccatcgaaccctgtctcgactatagtgccacctgcaatgcagcacgcatcagttgttctcgatcatgatcagttccatgtgccagcaatccttctccatcaccatgacaaatttcagcttgaccgcagatctgccggcttggaagaactgataatgggctgcacgtcgtccacaagcacaaaaggagatgcttccattgctcacccccaagagacagaatggccttacacgtactggccacctgacaaccaagatcatcatgggtagtagcaacagggacctggtaaatagtggcgatgtgaatgctgaaggaacactaaccgcaaccactttcactggaatggtttttgtctgcttgaatatgcagcgttgctttcttggagaatgtacacctacaatagtggggaaagaacagagaaaaaaaacgtatctctgtagatctccctcaataaagaaatgaggataaaactagttaacagtgtgagctctccaagacagaagagacaaaatggccaacgaaaagagaagggggaaagaccgatgggaggaaaggtactgtgtgtgctgacattgaagggatcatgtgtggacagtttagatgtattagaacaccttaatcaagtataactataatcagtttacggtttatcacagttttttattcgtgctacctgttagtggcattgtttgcatgtacattaacccttttaatttcttttagtttctaaattgatgctgattttcctttggttagttcatgctaatatgcatcacgaagaaataaagttagtaagaagctcataattccttcctttttttagcac

SEQ ID NO: 29124 - DNA, 2036 bp, Zea Mays
ttttttttatatgtgccccctctctccctcactgctctcgctctctcctttgcactgctcctccgacttgctcttcggtttgcttctcttgccttggttcccttgctttgttgtttcgatccgaatccatctcactcatgcacgcgcgcactgcctcctggtgccgccgcgtatgatccagacatgaatagggcgcacagcagcagctccaagctcatcaacgagaagctcgtggaacaccggatctccactgcgaagcactgcccccactgcggcgagaaaatcgacagcaaaccggattgggtggggctgccggcaggcgtcaagttcgatccaactgaccaggagctgatcgagcacctcgaggcgaaagtgaaggatgaaggctcgagatctcaccctctcatcgacgagttcatacccacaatagatggggaggacggcatatgttacacccaccccgagaaacttccaggtgtgacgagggatggcctaagcaagcacttcttccaccggccgtccaaggcctacacgacgggcacgaggaagaggaggaagatacagacggagtgcgacgtccacaagggggagacgaggtggcacaagaccggcaagacgcggccggtgatggtgaacggccggcagaaggggtgcaagaagatattggtgctgtacaccaacttcggcaagcaccgcaagccggagaagacgaactgggtcatgcaccagtaccacctcggcgacctagaagaggagaaggagggggagctggtggtgtgcaagatcttctaccagacgcaacccaggcagtgcagctggtcctccgaccggggcgccgccgccactgccttggcagcaacggcggcagcggcggcggcgcaggagcagcataggagggatagtggcagtggcagctgctcgtctagggaccacgaggtgtcagccacatcgttcccagccggatacacagtcaccacggccgtcgagatgcagcagcatatgaagcagcctgcggaccatttcagcttcgcgcctttcaggaaaaccttcgaccaggaggttggtataggtggtgatcaggtgccatctaatcagcttggacgttcagagccgcatcatgccggcctggggcagcagccacacggcccggtgctcgcgacgaagacggctgtgcctgctacagctttcctgatcagtaggccatcgaaccctgtctcgactatagtgccacctgcaatgcagcacgcatcagttgttctcgatcatgatcagttccatgtgccagcaatccttctccatcaccatgacaaatttcagccacaacaaaagcttgaccgcagatctgccggcttggaagaactgataatgggctgcacgtcgtccacaagcacaaaaggagatgcttccattgctcacccccaagagacagaatggccttacacgtactggccacctgacaaccaagatcatcatgggtagtagcaacagggacctggtaaatagtggcgatgtgaatgctgaaggaacactaaccgcaaccactttcactggaatggtttttgtctgcttgaatatgcagcgttgctttcttggagaatgtacacctacaatagtggggaaagaacagagaaaaaaaacgtatctctgtagatctccctcaataaagaaatgaggataaaactagttaacagtgtgagctctccaagacagaagagacaaaatggccaacgaaaagagaagggggaaagaccgatgggaggaaaggtactgtgtgtgctgacattgaagggatcatgtgtggacagtttagatgtattagaacaccttaatcaagtataactataatcagtttacggtttatcacagttttttattcgtgctacctgttagtggcattgtttgcatgtacattaacccttttaatttcttttagtttctaaattgatgctgattttcctttggttagttcatgctaatatgcatcacgaagaaataaagttagtaagaagctcataattccttcctttttttagcac

SEQ ID NO: 29125 - DNA, 1980 bp, Zea Mays
ttttttttatatgtgccccctctctccctcactgctctcgctctctcctttgcactgctcctccgacttgctcttcgactcatgcacgcgcgcactgcctcctggtgccgccgcgtatgatccagacatgaatagggcgcacagcagcagctccaagctcatcaacgagaagctcgtggaacaccggatctccactgcgaagcactgcccccactgcggcgagaaaatcgacagcaaaccggattgggtggggctgccggcaggcgtcaagttcgatccaactgaccaggagctgatcgagcacctcgaggcgaaagtgaaggatgaaggctcgagatctcaccctctcatcgacgagttcatacccacaatagatggggaggacggcatatgttacacccaccccgagaaacttccaggtgtgacgagggatggcctaagcaagcacttcttccaccggccgtccaaggcctacacgacgggcacgaggaagaggaggaagatacagacggagtgcgacgtccacaagggggagacgaggtggcacaagaccggcaagacgcggccggtgatggtgaacggccggcagaaggggtgcaagaagatattggtgctgtacaccaacttcggcaagcaccgcaagccggagaagacgaactgggtcatgcaccagtaccacctcggcgacctagaagaggagaaggagggggagctggtggtgtgcaagatcttctaccagacgcaacccaggcagtgcagctggtcctccgaccggggcgccgccgccactgccttggcagcaacggcggcagcggcggcggcgcaggagcagcataggagggatagtggcagtggcagctgctcgtctagggaccacgaggtgtcagccacatcgttcccagccggatacacagtcaccacggccgtcgagatgcagcagcatatgaagcagcctgcggaccatttcagcttcgcgcctttcaggaaaaccttcgaccaggaggttggtataggtggtgatcaggtgccatctaatcagcttggacgttcagagccgcatcatgccggcctggggcagcagccacacggcccggtgctcgcgacgaagacggctgtgcctgctacagctttcctgatcagtaggccatcgaaccctgtctcgactatagtgccacctgcaatgcagcacgcatcagttgttctcgatcatgatcagttccatgtgccagcaatccttctccatcaccatgacaaatttcagccacaacaaaagcttgaccgcagatctgccggcttggaagaactgataatgggctgcacgtcgtccacaagcacaaaaggagatgcttccattgctcacccccaagagacagaatggccttacacgtactggccacctgacaaccaagatcatcatgggtagtagcaacagggacctggtaaatagtggcgatgtgaatgctgaaggaacactaaccgcaaccactttcactggaatggtttttgtctgcttgaatatgcagcgttgctttcttggagaatgtacacctacaatagtggggaaagaacagagaaaaaaaacgtatctctgtagatctccctcaataaagaaatgaggataaaactagttaacagtgtgagctctccaagacagaagagacaaaatggccaacgaaaagagaagggggaaagaccgatgggaggaaaggtactgtgtgtgctgacattgaagggatcatgtgtggacagtttagatgtattagaacaccttaatcaagtataactataatcagtttacggtttatcacagttttttattcgtgctacctgttagtggcattgtttgcatgtacattaacccttttaatttcttttagtttctaaattgatgctgattttcctttggttagttcatgctaatatgcatcacgaagaaataaagttagtaagaagctcataattccttcctttttttagcac

SEQ ID NO: 29126 - DNA, 2431 bp, Zea Mays
ccccggagtctctgcccagcgggcccggcagtcccacaagatcacagcacatacgcttcctccattccactcggccgcgaccgcgaccgcgacggcgagcgaggggccgaggtgggacgccgcgccgcttctgcagaaagaaaaaggccaggtgaggtgctcgacgcgggagcgggaccggagtagcgccagcgtcccattcccggccaacctccctgttcatctccatgccgacctgactcggtatgataagatccatgtgatccagagcctgatccgaacacgatccctttctcccctttccctgcgtagtgcggagctccagtgaaggaaccaaacagcgcaacacacgaacacaccaggcggcaggctccaccccgtccttttcctgccttttccccccgtcgagttaatccatccagtcgccaaaagctttgctaaatttcacgtgtctcgcctcgagtcgtccctaatccgacgatgccttgttctactcctaaaaaaacccaaatatcctgactttctcttgctgctagcctcccttttcccttctcccttaatcgcactgttggaagctcttcgctgtcacccccacccacctccggcgctcttttttagcattttccttgggctctggactccaaaatcccagccttttgtttgcttctctgtctcctgctgattggtgtccccgggtccaggactcttgatttgctcctcgcgggggttcggtcccatggcggcagctgcgctggcaatggcagagcaggtggtggccgagctccgagtgaggtgtgagacgccgccgtcgatgctgcgcgaggtggccgtggagatggcccgcgagatgggcgcggggctggagaaggacggcgggagcagggtcaagatgctcctctcctacgtcgataagctccccacagggagagaggaaggattattctatggattggacctaggaggaacgaatttccgcgtcttgaaagtgcaactaggtgggaatgcgaagcatgtcgttgaccgtgactccagagaagtcggcattccgccacatctgatgtcagggagctcctcggagctttttggtttcattgcttctgaattggccaagtttgttgacgatgatgagaagtgcgctaacatttcgaatggcaagaagcgagaaatagggttcacgttttcgttcccagtgaagcagcgttctgtagcttccggtacgcttgtcaagtggacaaaggcattttccattaatgatgctgtaggcgaagatgtggtggctgaactgcaaacagccatggagaagcaaggtctggacatgcatgtagctgcattgattaatgatgctgttgggacgctggcgggagcaaggtactatgacaaagatgttgtcgctggtgtaatatttggcactggcacaaacgcagcatatgttgagaaggcaaatgctattccaaaatgggagggtgagctgccccattcaggagacatggtcatcaacatggaatggggtaacttcttctcatctcatctccccatcactgaatatgatcaagaattagataaggagagcttaaatccaggagaacagatttacgagaagttaacgtcaggaatgtatttaggtgaaattgtaaggagggtgctccttaaaatatcattgcagtccgccatttttggtgatattgaccacactaagcttcaaacccatttccttctgcggactccacatatttcagcaatgcaccatgacgaaacatctgatctgaagattgtggccgaaaattttgaagaaaacctagaggcacatccttggaggctcgtaagctggtcgttgaaatctgtgacattgtggcgacaagagcagcccggctggctgctgcggggcttgcagggatcctcatgaagatcgggagagatcacagcgtcgaggaccaacggtcagtcatcgccatcgacggaggactgttcgagcactacaccaaattccgccggtgcttggagaccacactgggtgagctgctaggagacgaggcgtccaaggcggtggccatcaagcatgccgacgacggttcaggaataggtgctgccctgattgcagcttcacagtctcagtacaaaaacgacttagtggccgtcaagcatgcagatgacggttcaggagtcaagtatgcagaagacaagcgtgcagatgacggatcagaaataggtgctgccctgattgctgcctcgcaatctcagtagagagatgtccgagtggtatagaggtagcaagtagctatgatttgtttccaacgtcttaactgtccagcgtctgcagtttagcatgctagagctggatgcgatctgtaaccaaaaccaggcttggccaactggctgttcataattccaataacagcagggttgcagatgtctcctaaccccctacgatctt

SEQ ID NO: 29127 - DNA, 1328 bp, Zea Mays
ctatttatttgacgtcctagcaactccaaaagactagggtttgattgttgactctcgtaaaggctcccttcagccattcaagaaaccttgggcgcatgagcacgagcccttgaaaaccttgtatgatgctgttcagtccatcaaacctacagttctgatcgggacatctggagttggaagaacattcacaaaagaaatcattgaggccatgtcttccttcaacgagaggcctatcatcttttcactgtcaaacccaacctcgcattctgaatgcactgctgaacaagcatatacatggagtcagggccgttcaatctttgccagtggcagtccatttgcccccgtggagtacgaaggaaagacttttgtgcctgggcagtcgaacaatgcctacattttccctggactcggcctcggtcttgtgatctctggagccgtccgtgtccacgaggacatgcttctcgccgcctcgaaagcgctagctgatcaggccacacaggacaacttcgagaagggctccatcttcccacccttcaccagcatcagaaagatctctgcgcacatcgctgcagccgtggctgcaaaagcctacgagctcggtctggcgacccgtctgcctccccccagcgacctggtgaaatatgcagagaactgcatgtacactcccgtctaccgcaactaccggtagtgctgcggggatcaattttgcagtaataaaaaatctatcaacgcggatggtactctgttgtttatagtccctgctgctaaccacccttgttgctggtgctgctggagaggcattgtacctgtccatgcatatatgatatatatatgttgtaacgttgtgaaagcaaacaatcttgggtaccaatgtttgttattctttcgctcgattatgatggtctgttatagtggctggacgagtcagatctccgtgatagggaatcaagatgaccaaatctaagccaaaccaaataactctgcaaaccatctagccttcagcacaaaccaagtgttgggggttggggtgggggggggggggagaagacacagagtttaacgtggaaaaacctcccccgatgtggagaagaaaaaaaaaccacggaaaaacagggtacaaaggagtctatttatataggcaaaggagataaagatagagtcaaatagtcttatccaacaaatctccccttgacgctaaatctataaaactgtttccccaaacaccactagtgcgctaagcttcacgaacacctatcaagtcaaggcaatgcttgaacttggtattagataatggctttgtaagcatgtctgcaggattttcatcagta

SEQ ID NO: 29128 - DNA, 3037 bp, Zea Mays
ctaaactcccaaccttcgcctctcctcccgttgtcagccgccgtgcctgttctctctgcctttctaaaagtgcggcgactggttgggctgccgccgactgccggggccttcgccgacctcttcgccggcgaagaggtcccatcaggagaaggagtagatcgtcgacccagaaccctcgctgatggcgactttcgcgaaacctgagaacgcgctgaagagagccgaagaattaatccatgttggtcaaaagcagtcagccctgcaggctttacatgatctcattacctcgaaaaggtacaggtcatggcagaagcctctcgaaaagatcatgatgaagtatgtagaactctgtgttgacctgaggaaaggcagatttgcaaaagatggtcttattcagtataggattgtctgccagcaagtaaacgtgtcatccttggaggatgtcataaagcacttcatgcagctttcaaatgagaaagctgaacaagctaagagtcaggtcgaagcactggaagatgctctggatgtcgaagatcttgaagcagacaagcgtcccgaggacctcatgctcagttttgtcagtggggagaaaggaaaggaccgatcagataaagaggttgtaactccatggtttaagttcctctgggagacatacaggactgttctagagatactaaggaacaattcaaagcttgaagcgttatatgctatgactgctcatagggcttttcaattctgtaaacagtataagagaacaactgaattccgtaggttgtgtgagatcatcagaaatcatcttgctaatctcaacaaatatcgcgatcaaagagatcgtcctgatctgactgcacctgaaagtttacaactgtatcttgatacacgtgttgagcagcttaaagttgctacagaactctccctttggcaggaagccttccgatcggtggaagatatccatggtttgatgaccatggtgaagaaaatgccaaaaccatctatcttggtggtctattatgcaaagttgactgagatcttctggatatcggacagccacttatatcatgcgtatgcgtggctcaagcttttcaacttgcagaagagctacaataaaaacttgtctcagaaggatctacagttaatagcatcttctgttttacttgctgcactatccgtgtcaccttatgacaaaaaatatggtgcatttgagacagagaatgagaaagagcgcaacatgcgtctgtccaaccttgttaacttttcgcttgataacaagcgtgaaaacagggaaatgccttcaagaccatatcttctatcagagttggcctccaaaggagtcctttcatgtgcttcccaagaagtgcgagatttgtacaaccttttggaacatgagtttctacctctggatcttgcatcaaaagtgcagccacttcttttgaagatttcaaagattggagggaagctttcatcagcttcttctgttcctgaggtcaagttatctcagtacatttcagcattggagaagctgacaacattgagagtgctacaaggaagtccatcattgaaaaacgtaaagaagagcttgagcgtcaaatattggagaaggaaaaagaagaagaaaaaaagagaatgagcagtcaaaagaaaactgtggatgaggaaagggtgaggcttctcaatgaacagaggcagagggagcaggaccggattcgtagagagatagaggaaaaaaataaagcagaagcaaaaaagatgctagaagatttgaataaggcagggaaaaaacatgtcgttgttgaaggggagcttactaaggaggccatcatggaattggcacggaatgaacagttaaaggagcgccacgaaatggagaaaaaactgcagaagtttgcaaaaacaatggattatctggaaagggcaaaaaggcaggaagaggcaccactgattgagcaagcttttcaaaaacgtcttgaggaagagaagatccttcacgagcaagagcagcttcgggagattgaactcagcaagcaacaccatgccagcgacttgcaagagaaaaatagactttcacggatgttggagcacaagaatgctttacaggagagaatcatccaagaacgtgcagctgagtttggccgtctgaagaaagagagagatgaacggatgaatcggttgatatcttcaagaaagcatgaaagggagacagtaaggaagttgatgttttatctgaacctggaggaacagcggattgaaatgcttcgtgaggaagaggaagctagaaaacgtgaagcggaagagaggaggaagagagaggaggctgaaaggaaagctaaacttgatgccatcgctgaaaagcagcgattgagagagatagagctggaggagaaggcaaaggcaacaagggagaagctcttaaagggatccgaggctgtgcgcgctccagattctgcacctgttgcacagccacctcgagagtcagcagcagcgcctgcagctgctgcggcggcggctgctcctgctcctgctcctagtaaatatattcccaagtttaaacgcggtggtgatagcagcagcatcccttctggcagccgcgatgaagatcgctggggttcacgtggtccgctcaggcaagatggtcctcctgcacgactggatgcaccctcatcacggcaagatactgatcgctggcgtggatcaagatttccctctaactcaacgtcctcttcatcaacctggagccgttcacggaactgatcctatgctgcaggacttttttctagcccatgtgtcgacctccgtgcacaatgtctaatcgtacctttccaggcactgcactccatgcatattgtcgctgttttgtacttttgtagtaatactctacaatccatgattattgtccctgtttgttagtaatgctgttttatctgtgcatgaaacactctatacctacatatagccaagaattgcaggactgtatgcatgtaaaacttgcaagattatcaatttttatgagctataaaattaatatctgtgggcaccaaga

SEQ ID NO: 29129 - DNA, 1764 bp, Zea Mays
gaattgtactgttatacctgcagccatgttatctattttttgaatgcctccaaaggagtcctttcatgtgcttcccaagaagtgcgagatttgtacaaccttttggaacatgagtttctacctctggatcttgcatcaaaagtgcagccacttcttttgaagatttcaaagattggagggaagctttcatcagcttcttctgttcctgaggtcaagttatctcagtacatttcagcattggagaagctgacaacattgagagtgctacaaggaagtccatcattgaaaaacgtaaagaagagcttgagcgtcaaatattggagaaggaaaaagaagaagaaaaaaagagaatgagcagtcaaaagaaaactgtggatgaggaaagggtgaggcttctcaatgaacagaggcagagggagcaggaccggattcgtagagagatagaggaaaaaaataaagcagaagcaaaaaagatgctagaagatttgaataaggcagggaaaaaacatgtcgttgttgaaggggagcttactaaggaggccatcatggaattggcacggaatgaacagttaaaggagcgccacgaaatggagaaaaaactgcagaagtttgcaaaaacaatggattatctggaaagggcaaaaaggcaggaagaggcaccactgattgagcaagcttttcaaaaacgtcttgaggaagagaagatccttcacgagcaagagcagcttcgggagattgaactcagcaagcaacaccatgccagcgacttgcaagagaaaaatagactttcacggatgttggagcacaagaatgctttacaggagagaatcatccaagaacgtgcagctgagtttggccgtctgaagaaagagagagatgaacggatgaatcggttgatatcttcaagaaagcatgaaagggagacagtaaggaagttgatgttttatctgaacctggaggaacagcggattgaaatgcttcgtgaggaagaggaagctagaaaacgtgaagcggaagagaggaggaagagagaggaggctgaaaggaaagctaaacttgatgccatcgctgaaaagcagcgattgagagagatagagctggaggagaaggcaaaggcaacaagggagaagctcttaaagggatccgaggctgtgcgcgctccagattctgcacctgttgcacagccacctcgagagtcagcagcagcgcctgcagctgctgcggcggcggctgctcctgctcctgctcctagtaaatatattcccaagtttaaacgcggtggtgatagcagcagcatcccttctggcagccgcgatgaagatcgctggggttcacgtggtccgctcaggcaagatggtcctcctgcacgactggatgcaccctcatcacggcaagatactgatcgctggcgtggatcaagatttccctctaactcaacgtcctcttcatcaacctggagccgttcacggaactgatcctatgctgcaggacttttttctagcccatgtgtcgacctccgtgcacaatgtctaatcgtacctttccaggcactgcactccatgcatattgtcgctgttttgtacttttgtagtaatactctacaatccatgattattgtccctgtttgttagtaatgctgttttatctgtgcatgaaacactctatacctacatatagccaagaattgcaggactgtatgcatgtaaaacttgcaagattatcaatttttatgagctataaaattaatatctgtgggcaccaaga

SEQ ID NO: 29130 - DNA, 63 bp, Zea Mays
tgcaatcttctggtggatgaattatttccacagggcagctatcagcttcacaattcagctttg

SEQ ID NO: 29131 - DNA, 1924 bp, Zea Mays
cggatgcgggcgatcagggctggcggcggcggcgccaatcgcccccaggggcgccattccctttgtcaggcgctttagattggagagacagctagcttcttctcaagttcccaaggaacaacaaatcaatttaatgaaagatcttgagaggaaggaaactgaatacatgcgacttaaaaggcacaaaatttgtgttgatgattttgagctgctcactattattgggagaggtgcttttggagaggttcgattgtgtcgagagaggacctcaggcaacatttatgcaatgaaaaaactcaagaagtctgatatggttgtcaggggccaagtggaacatgttagagctgaaagaaacttgttggccgaagttgctagtcatcactgcattgtgaagctttactattctttccaagacactgagtatctttaccttattatggagtacctccctggtggtgatatcatgacccttctcatgagagaggataccttgactgaacatgtggcacgattctacgttgctgagactattcttgctatcgaatccatccataaacataactacatccacagagatattaagcctgataatttgcttctagataagaatggtcacatgaagctgtcagattttgggctgtgtaagccaattgattgttcaaagctctcaactttgaatgaagatgaacccatgagtgatgacaacttgagggaatcaatggatattgatagttctttgtctgatacagcaaatggtagaagatggagaagtcaacacgaacagcttcagcactggcagatgaacaggagaaaactggcattctcaactgttggaacaccggattatattgctccagaggttcttctaaagaagggatatggaatggaatgcgattggtggtctctgggcgcgatcatgtatgagatgctagttgggtatccaccattttatgctgatgatccaataactacatgcagaaagattgtgcactggagaaaccatttgaagtttcctgaggatgcaaagttgtcaaatgaagcaagagatctcattagccgattattatgtgatgttgaccacaggatcggcagtgcaggggcagatcaaataaaggcacatccttggttccgaggagttgcatgggataaactttatgaaatggaagcagcatttaagcctcaagtaaatgatgaactggacacacagaatttcatgaaattcgaggaactcatgaatcttgtttctccaacttcattattctctgtggcagttggaaaatcctccagccaaaacaggctctggaccttcaaggaagaagtacaaagcagtagagcactagagcgcactagtattactgctgtaagtgctgtttgtcctcggcaaatttctgaactaaatcagcatgcaaacgcctggatgatgtggctccagctggataacctgctcatttttagccaggtttctgctttctcaatcgtgggcaagcggtttgtagaaatccaccagagtttctagttgtaaaatagtattccacggactttaacaaaggtcccatgtactaagggctcatcatcagacaccgggacagtttttttctggagaaattgcaccttgcggctggctgcccaggttggtagagcaaattgcggccttctcttgtggcagttcccggtccgctaacatttgatcagggaagggaaataagatggtgttgttgcggcaggaattctcatgggggggagttagtgttgttgtttgatatgtatcaggaattttcacatttgtagtagggtttctgttagcatattttagaaacatcctttttgcagagttgctatttctcattgatgtatggaaaacaacataatttggagatcgaagctcgatctaacttttatgctgcatatctgatctagattacat

SEQ ID NO: 29132 - DNA, 2124 bp, Zea Mays
gcgtgcgcgctgcgacaagcacatcatcgccccccttccccgcggccccaccaaatagagaggcccagacaccgaggggaaaaaggagagagagtacacaggtgacagccgctgcaccgagggcacagagggacagctagacagggactgccagcggccgccgaggcagtggggtccaccctcaccatggagcgcgtcgccgccgcgaagaagttcatcgagagccactaccgctcgcagatgaagaacatccaagagcgcaaggagaggcgctttagattggagagacagctagcttcttctcaagttcccaaggaacaacaaatcaatttaatgaaagatcttgagaggaaggaaactgaatacatgcgacttaaaaggcacaaaatttgtgttgatgattttgagctgctcactattattgggagaggtgcttttggagaggttcgattgtgtcgagagaggacctcaggcaacatttatgcaatgaaaaaactcaagaagtctgatatggttgtcaggggccaagtggaacatgttagagctgaaagaaacttgttggccgaagttgctagtcatcactgcattgtgaagctttactattctttccaagacactgagtatctttaccttattatggagtacctccctggtggtgatatcatgacccttctcatgagagaggataccttgactgaacatgtggcacgattctacgttgctgagactattcttgctatcgaatccatccataaacataactacatccacagagatattaagcctgataatttgcttctagataagaatggtcacatgaagctgtcagattttgggctgtgtaagccaattgattgttcaaagctctcaactttgaatgaagatgaacccatgagtgatgacaacttgagggaatcaatggatattgatagttctttgtctgatacagcaaatggtagaagatggagaagtcaacacgaacagcttcagcactggcagatgaacaggagaaaactggcattctcaactgttggaacaccggattatattgctccagaggttcttctaaagaagggatatggaatggaatgcgattggtggtctctgggcgcgatcatgtatgagatgctagttgggtatccaccattttatgctgatgatccaataactacatgcagaaagattgtgcactggagaaaccatttgaagtttcctgaggatgcaaagttgtcaaatgaagcaagagatctcattagccgattattatgtgatgttgaccacaggatcggcagtgcaggggcagatcaaataaaggcacatccttggttccgaggagttgcatgggataaactttatgaaatggaagcagcatttaagcctcaagtaaatgatgaactggacacacagaatttcatgaaattcgaggaactcatgaatcttgtttctccaacttcattattctctgtggcagttggaaaatcctccagccaaaacaggctctggaccttcaaggaagaagtacaaagcagtagagcactagagcgcactagtattactgctgtaagtgctgtttgtcctcggcaaatttctgaactaaatcagcatgcaaacgcctggatgatgtggctccagctggataacctgctcatttttagccaggtttctgctttctcaatcgtgggcaagcggtttgtagaaatccaccagagtttctagttgtaaaatagtattccacggactttaacaaaggtcccatgtactaagggctcatcatcagacaccgggacagtttttttctggagaaattgcaccttgcggctggctgcccaggttggtagagcaaattgcggccttctcttgtggcagttcccggtccgctaacatttgatcagggaagggaaataagatggtgttgttgcggcaggaattctcatgggggggagttagtgttgttgtttgatatgtatcaggaattttcacatttgtagtagggtttctgttagcatattttagaaacatcctttttgcagagttgctatttctcattgatgtatggaaaacaacataatttggagatcgaagctcgatctaacttttatgctgcatatctgatctagattacat

SEQ ID NO: 29133 - DNA, 2362 bp, Zea Mays
acatcatcgccccccttccccgcggccccaccaaatagagaggcccagacaccgaggggaaaaaggagagagagtacacaggtgacagccgctgcaccgagggcacagagggacagctagacagggactgccagcggcgtaggcggtgtgggggatggagcgcgagatggcggacgcgcccgccgcggcgatccccgccgccgagccgctcgcggcggtggcggaggaaggggagggggaggcggccgccgaggcagtggggtccaccctcaccatggagcgcgtcgccgccgcgaagaagttcatcgagagccactaccgctcgcagatgaagaacatccaagagcgcaaggagaggcgctttagattggagagacagctagcttcttctcaagttcccaaggaacaacaaatcaatttaatgaaagatcttgagaggaaggaaactgaatacatgcgacttaaaaggcacaaaatttgtgttgatgattttgagctgctcactattattgggagaggtgcttttggagaggttcgattgtgtcgagagaggacctcaggcaacatttatgcaatgaaaaaactcaagaagtctgatatggttgtcaggggccaagtggaacatgttagagctgaaagaaacttgttggccgaagttgctagtcatcactgcattgtgaagctttactattctttccaagacactgagtatctttaccttattatggagtacctccctggtggtgatatcatgacccttctcatgagagaggataccttgactgaacatgtggcacgattctacgttgctgagactattcttgctatcgaatccatccataaacataactacatccacagagatattaagcctgataatttgcttctagataagaatggtcacatgaagctgtcagattttgggctgtcaaatggtagaagatggagaagtcaacacgaacagcttcagcactggcagatgaacaggagaaaactggcattctcaactgttggaacaccggattatattgctccagaggttcttctaaagaagggatatggaatggaatgcgattggtggtctctgggcgcgatcatgtatgagatgctagttgggtatccaccattttatgctgatgatccaataactacatgcagaaagggaagcttattgtcttatcatcaaaataaggctaagtcagcacagaaagctgctttatccctctttttagctgatattattgtgcactggagaaaccatttgaagtttcctgaggatgcaaagttgtcaaatgaagcaagagatctcattagccgattattatgtgatgttgaccacaggatcggcagtgcaggggcagatcaaataaaggcacatccttggttccgaggagttgcatgggataaactttatgaaatggaagcagcatttaagcctcaagtaaatgatgaactggacacacagaatttcatgaaattcgaggaactcatgaatcttgtttctccaacttcattattctctgtggcagttggaaaatcctccagccaaaacaggctctggaccttcaaggaagacgatgctgaactccaaagatctgagctttgtggggtatacgtacaaaaacttcgatgcggtgaaagcaataaaaatttcagatctgcaaaggaattcatctctaacaaggccttccattggttcaatattcggtccaccaggcatggattctcccatggaaccaaacgggaggggcacacatatgcacacagtttcatctggtgatccaatgattccctaacctgcagtgctgtttgtcctcggcaaatttctgaactaaatcagcatgcaaacgcctggatgatgtggctccagctggataacctgctcatttttagccaggtttctgctttctcaatcgtgggcaagcggtttgtagaaatccaccagagtttctagttgtaaaatagtattccacggactttaacaaaggtcccatgtactaagggctcatcatcagacaccgggacagtttttttctggagaaattgcaccttgcggctggctgcccaggttggtagagcaaattgcggccttctcttgtggcagttcccggtccgctaacatttgatcagggaagggaaataagatggtgttgttgcggcaggaattctcatgggggggagttagtgttgttgtttgatatgtatcaggaattttcacatttgtagtagggtttctgttagcatattttagaaacatcctttttgcagagttgctatttctcattgatgtatggaaaacaacataatttggagatcgaagctcgatctaacttttatgctgcatatctgatctagattacat

SEQ ID NO: 29134 - DNA, 2169 bp, Zea Mays
acatcatcgccccccttccccgcggccccaccaaatagagaggcccagacaccgaggggaaaaaggagagagagtacacaggtgacagccgctgcaccgagggcacagagggacagctagacagggactgccagcggcgtaggcggtgtgggggatggagcgcgagatggcggacgcgcccgccgcggcgatccccgccgccgagccgctcgcggcggtggcggaggaaggggagggggaggcggccgccgaggcagtggggtccaccctcaccatggagcgcgtcgccgccgcgaagaagttcatcgagagccactaccgctcgcagatgaagaacatccaagagcgcaaggagaggcgctttagattggagagacagctagcttcttctcaagttcccaaggaacaacaaatcaatttaatgaaagatcttgagaggaaggaaactgaatacatgcgacttaaaaggcacaaaatttgtgttgatgattttgagctgctcactattattgggagaggtgcttttggagaggttcgattgtgtcgagagaggacctcaggcaacatttatgcaatgaaaaaactcaagaagtctgatatggttgtcaggggccaagtggaacatgttagagctgaaagaaacttgttggccgaagttgctagtcatcactgcattgtgaagctttactattctttccaagacactgagtatctttaccttattatggagtacctccctggtggtgatatcatgacccttctcatgagagaggataccttgactgaacatgtggcacgattctacgttgctgagactattcttgctatcgaatccatccataaacataactacatccacagagatattaagcctgataatttgcttctagataagaatggtcacatgaagctgtcagattttgggctgtgtaagccaattgattgttcaaagctctcaactttgaatgaagatgaacccatgagtgatgacaacttgagggaatcaatggatattgatagttctttgtctgatacagcaaatggtagaagatggagaagtcaacacgaacagcttcagcactggcagatgaacaggagaaaactggcattctcaactgttggaacaccggattatattgctccagaggttcttctaaagaagggatatggaatggaatgcgattggtggtctctgggcgcgatcatgtatgagatgctagttgggtatccaccattttatgctgatgatccaataactacatgcagaaagattgtgcactggagaaaccatttgaagtttcctgaggatgcaaagttgtcaaatgaagcaagagatctcattagccgattattatgtgatgttgaccacaggatcggcagtgcaggggcagatcaaataaaggcacatccttggttccgaggagttgcatgggataaactttatgaaatggaagcagcatttaagcctcaagtaaatgatgaactggacacacagaatttcatgaaattcgaggaattggaaaatcctccagccaaaacaggctctggaccttcaaggaagaagtacaaagcagtagagcactagagcgcactagtattactgctgtaagtgctgtttgtcctcggcaaatttctgaactaaatcagcatgcaaacgcctggatgatgtggctccagctggataacctgctcatttttagccaggtttctgctttctcaatcgtgggcaagcggtttgtagaaatccaccagagtttctagttgtaaaatagtattccacggactttaacaaaggtcccatgtactaagggctcatcatcagacaccgggacagtttttttctggagaaattgcaccttgcggctggctgcccaggttggtagagcaaattgcggccttctcttgtggcagttcccggtccgctaacatttgatcagggaagggaaataagatggtgttgttgcggcaggaattctcatgggggggagttagtgttgttgtttgatatgtatcaggaattttcacatttgtagtagggtttctgttagcatattttagaaacatcctttttgcagagttgctatttctcattgatgtatggaaaacaacataatttggagatcgaagctcgatctaacttttatgctgcatatctgatctagattacat

SEQ ID NO: 29135 - DNA, 2349 bp, Zea Mays
acatcatcgccccccttccccgcggccccaccaaatagagaggcccagacaccgaggggaaaaaggagagagagtacacaggtgacagccgctgcaccgagggcacagagggacagctagacagggactgccagcggcgtaggcggtgtgggggatggagcgcgagatggcggacgcgcccgccgcggcgatccccgccgccgagccgctcgcggcggtggcggaggaaggggagggggaggcggccgccgaggcagtggggtccaccctcaccatggagcgcgtcgccgccgcgaagaagttcatcgagagccactaccgctcgcagatgaagaacatccaagagcgcaaggagaggcgctttagattggagagacagctagcttcttctcaagttcccaaggaacaacaaatcaatttaatgaaagatcttgagaggaaggaaactgaatacatgcgacttaaaaggcacaaaatttgtgttgatgattttgagctgctcactattattgggagaggtgcttttggagaggttcgattgtgtcgagagaggacctcaggcaacatttatgcaatgaaaaaactcaagaagtctgatatggttgtcaggggccaagtggaacatgttagagctgaaagaaacttgttggccgaagttgctagtcatcactgcattgtgaagctttactattctttccaagacactgagtatctttaccttattatggagtacctccctggtggtgatatcatgacccttctcatgagagaggataccttgactgaacatgtggcacgattctacgttgctgagactattcttgctatcgaatccatccataaacataactacatccacagagatattaagcctgataatttgcttctagataagaatggtcacatgaagctgtcagattttgggctgtgtaagccaattgattgttcaaagctctcaactttgaatgaagatgaacccatgagtgatgacaacttgagggaatcaatggatattgatagttctttgtctgatacagcaaatggtagaagatggagaagtcaacacgaacagcttcagcactggcagatgaacaggagaaaactggcattctcaactgttggaacaccggattatattgctccagaggttcttctaaagaagggatatggaatggaatgcgattggtggtctctgggcgcgatcatgtatgagatgctagttgggtatccaccattttatgctgatgatccaataactacatgcagaaagattgtgcactggagaaaccatttgaagtttcctgaggatgcaaagttgtcaaatgaagcaagagatctcattagccgattattatgtgatgttgaccacaggatcggcagtgcaggggcagatcaaataaaggcacatccttggttccgaggagttgcatgggataaactttatgaaatggaagcagcatttaagcctcaagtaaatgatgaactggacacacagaatttcatgaaattcgaggaattggaaaatcctccagccaaaacaggctctggaccttcaaggaagacgatgctgaactccaaagatctgagctttgtggggtatacgtacaaaaacttcgatgcggtgaaagcaataaaaatttcagatctgcaaaggaattcatctctaacaaggccttccattggttcaatattcggtccaccaggcatggattctcccatggaaccaaacgggaggggcacacatatgcacacagtttcatctggtgatccaatgattccctaacctgcagtgctgtttgtcctcggcaaatttctgaactaaatcagcatgcaaacgcctggatgatgtggctccagctggataacctgctcatttttagccaggtttctgctttctcaatcgtgggcaagcggtttgtagaaatccaccagagtttctagttgtaaaatagtattccacggactttaacaaaggtcccatgtactaagggctcatcatcagacaccgggacagtttttttctggagaaattgcaccttgcggctggctgcccaggttggtagagcaaattgcggccttctcttgtggcagttcccggtccgctaacatttgatcagggaagggaaataagatggtgttgttgcggcaggaattctcatgggggggagttagtgttgttgtttgatatgtatcaggaattttcacatttgtagtagggtttctgttagcatattttagaaacatcctttttgcagagttgctatttctcattgatgtatggaaaacaacataatttggagatcgaagctcgatctaacttttatgctgcatatctgatctagattacat

SEQ ID NO: 29136 - DNA, 2427 bp, Zea Mays
acatcatcgccccccttccccgcggccccaccaaatagagaggcccagacaccgaggggaaaaaggagagagagtacacaggtgacagccgctgcaccgagggcacagagggacagctagacagggactgccagcggcgtaggcggtgtgggggatggagcgcgagatggcggacgcgcccgccgcggcgatccccgccgccgagccgctcgcggcggtggcggaggaaggggagggggaggcggccgccgaggcagtggggtccaccctcaccatggagcgcgtcgccgccgcgaagaagttcatcgagagccactaccgctcgcagatgaagaacatccaagagcgcaaggagaggcgctttagattggagagacagctagcttcttctcaagttcccaaggaacaacaaatcaatttaatgaaagatcttgagaggaaggaaactgaatacatgcgacttaaaaggcacaaaatttgtgttgatgattttgagctgctcactattattgggagaggtgcttttggagaggttcgattgtgtcgagagaggacctcaggcaacatttatgcaatgaaaaaactcaagaagtctgatatggttgtcaggggccaagtggaacatgttagagctgaaagaaacttgttggccgaagttgctagtcatcactgcattgtgaagctttactattctttccaagacactgagtatctttaccttattatggagtacctccctggtggtgatatcatgacccttctcatgagagaggataccttgactgaacatgtggcacgattctacgttgctgagactattcttgctatcgaatccatccataaacataactacatccacagagatattaagcctgataatttgcttctagataagaatggtcacatgaagctgtcagattttgggctgtgtaagccaattgattgttcaaagctctcaactttgaatgaagatgaacccatgagtgatgacaacttgagggaatcaatggatattgatagttctttgtctgatacagcaaatggtagaagatggagaagtcaacacgaacagcttcagcactggcagatgaacaggagaaaactggcattctcaactgttggaacaccggattatattgctccagaggttcttctaaagaagggatatggaatggaatgcgattggtggtctctgggcgcgatcatgtatgagatgctagttgggtatccaccattttatgctgatgatccaataactacatgcagaaagggaagcttattgtcttatcatcaaaataaggctaagtcagcacagaaagctgctttatccctctttttagctgatattattgtgcactggagaaaccatttgaagtttcctgaggatgcaaagttgtcaaatgaagcaagagatctcattagccgattattatgtgatgttgaccacaggatcggcagtgcaggggcagatcaaataaaggcacatccttggttccgaggagttgcatgggataaactttatgaaatggaagcagcatttaagcctcaagtaaatgatgaactggacacacagaatttcatgaaattcgaggaattggaaaatcctccagccaaaacaggctctggaccttcaaggaagacgatgctgaactccaaagatctgagctttgtggggtatacgtacaaaaacttcgatgcggtgaaagcaataaaaatttcagatctgcaaaggaattcatctctaacaaggccttccattggttcaatattcggtccaccaggcatggattctcccatggaaccaaacgggaggggcacacatatgcacacagtttcatctggtgatccaatgattccctaacctgcagtgctgtttgtcctcggcaaatttctgaactaaatcagcatgcaaacgcctggatgatgtggctccagctggataacctgctcatttttagccaggtttctgctttctcaatcgtgggcaagcggtttgtagaaatccaccagagtttctagttgtaaaatagtattccacggactttaacaaaggtcccatgtactaagggctcatcatcagacaccgggacagtttttttctggagaaattgcaccttgcggctggctgcccaggttggtagagcaaattgcggccttctcttgtggcagttcccggtccgctaacatttgatcagggaagggaaataagatggtgttgttgcggcaggaattctcatgggggggagttagtgttgttgtttgatatgtatcaggaattttcacatttgtagtagggtttctgttagcatattttagaaacatcctttttgcagagttgctatttctcattgatgtatggaaaacaacataatttggagatcgaagctcgatctaacttttatgctgcatatctgatctagattacat

SEQ ID NO: 29137 - DNA, 1560 bp, Zea Mays
  misc_feature (1)..(2): n is a, c, g, or t
nnaagcttcagccggtgctggcaatgatggaaggctgagtatagaacacaccagatctatggccccaagctctttgaccccctgctctgcgctttctattcatgtaataaataagaacggcaatgaggatgctttgcctgtctgccttgaagcgaggcctgtagaacgtggtgctggagatatgattggtgttggtgcgctttcaacaaaagaaactgagataaagtgtataaaaggtacaaaaactctttggtcagatcgtatctctggaaaggttactgtcttggctggcaatgcaaatttctgggctgttggttgcgaagatggtttcctgcaggtttacacaagatgtggagtgcgagcaatgccagcaatgatgatgggatctgcagctgtttttattgattgtgacgactcctggaaattgcttcttgtcacaaggagaggtctaatgtacatatggaacctttatgacagggcctgcattttgcatgactccttagcttctttggttgcatctccagatgagtcatctgcaaaagatgctggtacagtaaaggttatatctgccacattctcaagatgtggatcacccttagttgtccttgccagccgtcatgcttttctttatgacatgagcctgaagtgctggttaaggattgctgatgattgttttccagcatcaaattttgctagctcgtttagtttcccacaaggtggggagctaggcaagttgcagattgacataggcaagttcatggcgagaaagcctatttggagcagggttacagatgatgggttgcagacacgtgcccatctggagaaccaacttgcctcttctttggctttgaagtctgcacaggagtaccgtcaatgcctcctatcttatgtacgatttttagcaagagaagcagatgaatctcgtttacgtgaagtttgtgagagcttcctaggtcctccgatgggcatggttggttcggcatcacctactgatcccaaaaatctagcgtgggaccctgatgttcttaagcacaaacttcttaaagaagatatacttccttcgatggcgtcgaaccggaaagtgcagcggctgctcaacgagttcatggacctcctgttagaatatgaaacggatgtcacactgataccgcaacctggaacagaaggcaatggcaatggcaatgacaaggtgatgacctcgtagctacccttgacatgctcagtacagttgctggagagtggagactcaccttccgggtaggtgtgtaggattagtttggcgcggatatggagtgtccaattggagaggtgcttatgtgaatcaattagttgtgcatgtagctggtagactatttattaaggtgaccctgacccccggcaaaaagggaaagggaaggggaaaaaactgtaacgctgagtgtaacagtagaaatggaagcgaggttcgcctggtgattattgtgtcagtgtcagcagtctgtaaaaggacggatgaactcgtgtcctttttcattccaaggcagtattggccttgatagttttttagttgaggctgtgttt

SEQ ID NO: 29138 - DNA, 1961 bp, Zea Mays
ggcacctcgagattcgagcgctgctcccgtactacttactactcgagagtcgagactgctttgttttttttgttgatggaaaagaaccagaagggtagtactcgagagcacgaatcgccacgtccgccagaggatgagcttgagcagctccaactccaacgcgtgacaaaacaaacagaaccgtcacaaaaataaataaaccaaacggggcctaaataaaaagtcgtcgacaaaaatttggcagccataggccatagcccccgctgccccccgggcgcagatcttttctgggcttctggctcccctctcccgccgatcacgccgcctcacctcgccgggcggcgtgatggcgacttccggggccggcgaccacgggcagggccagggccaggggcacggccgcttcgcgtcgtccctgacggcgcgctactcggactgggtgctggagacgctggacgagctcccagggagcttcctgctcacggaccccgccctgccgggccaccccatcgtgtacgcttcccggggcctcgccgcgctcaccggctacgcgccgcgcgacgtgctgggccgcaacgcgcgcctcttccagggcgccgccaccgaccgcgccaccgtcgccggcgtccgcgaggccgtccgcgcgcaccgcccgcaccaggccgccatcctcaactaccgccgcgacggcgccccgcactgggtcctcctccacctcgcccccctattccacgcccgcgacggcaccctgctccacttcctcgccgtccaggtgcccatcgcccccgccgccgtcgcgcgcggggcgacgtgccacacgacggggcatctgctagccgcgtgccgtgacgaggccagcagggtcgcggaggatttcccctgcgccacccacgcgggcaaggtgtttgtcgatatggacaagagagggctggagaccgaggaaccacgtgtacctagcgatagtgagaaagatatggcaataagtacggctaacagcattgtctctgcgctgaacagctacagcaagctaactggtctagtggtcagcaggaagagatgtgactcgattggcatcccagcactcagttcgtcgttaaaactctctctcggactgactcccgcttgcctaacatgccaattatttatgctagtgatgcttttacatcattaacaggttactcaagagaagaaatattgggctgtaactgcaaagtcttaaatgggccaggcactagcttggaggttttagaggagataaatcagcatatttgttctgagcaggcatgcacggtggatctactgagttacaggaaagatggaagttcattctgtgatcatctacatgtatctcctatccgagatgcttcgggcaaggttcgcttacatctttctcaggtggcctttcatatctgggttcaccttgacatgggtgcaaagcacgattttagtgggctgacccccgagaaatggctgcttggcgctgttggtgcggtgagggttgctgtgagaggcttgtcggcgtcaggtagcctgttgagaccatcccaatagcagttttagtctcctcgccatttcatgaccacggcgaccggccttccacgatgtacattgctgcttgctattctgtgtaaagcaactgcttagcatgacaaagtaaatgagttcgttttgaaggaaaatccatggtaaatacaagatgttgctgtgactatataaccaggtggggtgaagtaaagaaaaaggaaatagaagctgctgttaggatttatgggcttggcccaattaagaatttctaataattccaggaaaatctcaaaagcccatataagtggatggcaaagggataggtggaaccaatagcatcatattgctagctcttgtggagtagagctagcttaaatatggaagccacactcactcaccaagtcatggatgagaggagagagtgtggagagccacac

SEQ ID NO: 29139 - DNA, 1958 bp, Zea Mays
ggcacctcgagattcgagcgctgctcccgtactacttactactcgagagtcgagactgctttgttttttttgttgatggaaaagaaccagaagggtagtactcgagagcacgaatcgccacgtccgccagaggatgagcttgagcagctccaactccaacgcgtgacaaaacaaacagaaccgtcacaaaaataaataaaccaaacggggcctaaataaaaagtcgtcgacaaaaatttggcagccataggccatagcccccgctgccccccgggcgcagatcttttctgggcttctggctcccctctcccgccgatcacgccgcctcacctcgccgggcggcgtgatggcgacttccggggccggcgaccacgggcagggccagggccaggggcacggccgcttcgcgtcgtccctgacggcgcgctactcggactgggtgctggagacgctggacgagctcccagggagcttcctgctcacggaccccgccctgccgggccaccccatcgtgtacgcttcccggggcctcgccgcgctcaccggctacgcgccgcgcgacgtgctgggccgcaacgcgcgcctcttccagggcgccgccaccgaccgcgccaccgtcgccggcgtccgcgaggccgtccgcgcgcaccgcccgcaccaggccgccatcctcaactaccgccgcgacggcgccccgcactgggtcctcctccacctcgcccccctattccacgcccgcgacggcaccctgctccacttcctcgccgtccaggtgcccatcgcccccgccgccgtcgcgcgcggggcgacgtgccacacgacggggcatctgctagccgcgtgccgtgacgaggccagcagggtcgcggaggatttcccctgcgccacccacgcgggcaaggtgtttgtcgatatggacaagagagggctggagaccgaggaaccacgtgtacctagcgatagtgagaaagatatggcaataagtacggctaacagcattgtctctgcgctgaacagctacagcaagctaactggtctagtggtcagcaggaagagatgtgactcgattggcatcccagcactcagttcgtcgttaaaactctctctcggactgactcccgcttgcctaacatgccaattatttatgctagtgatgcttttacatcattaacaggttactcaagagaagaaatattgggctgtaactgcaaagtcttaaatgggccaggcactagcttggaggttttagaggaggtgcgggccaggattatatagcttgcatgcacggtggatctactgagttacaggaaagatggaagttcattctgtgatcatctacatgtatctcctatccgagatgcttcgggcaaggttcgcttacatctttctcaggtggcctttcatatctgggttcaccttgacatgggtgcaaagcacgattttagtgggctgacccccgagaaatggctgcttggcgctgttggtgcggtgagggttgctgtgagaggcttgtcggcgtcaggtagcctgttgagaccatcccaatagcagttttagtctcctcgccatttcatgaccacggcgaccggccttccacgatgtacattgctgcttgctattctgtgtaaagcaactgcttagcatgacaaagtaaatgagttcgttttgaaggaaaatccatggtaaatacaagatgttgctgtgactatataaccaggtggggtgaagtaaagaaaaaggaaatagaagctgctgttaggatttatgggcttggcccaattaagaatttctaataattccaggaaaatctcaaaagcccatataagtggatggcaaagggataggtggaaccaatagcatcatattgctagctcttgtggagtagagctagcttaaatatggaagccacactcactcaccaagtcatggatgagaggagagagtgtggagagccacac

SEQ ID NO: 29140 - DNA, 1868 bp, Zea Mays
ggcacctcgagattcgagcgctgctcccgtactacttactactcgagagtcgagactgctttgttttttttgttgatggaaaagaaccagaagggtagtactcgagagcacgaatcgccacgtccgccagaggatgagcttgagcagctccaactccaacgcgtgacaaaacaaacagaaccgtcacaaaaataaataaaccaaacggggcctaaataaaaagtcgtcgacaaaaatttggcagccataggccatagcccccgctgccccccgggcgcagatcttttctgggcttctggctcccctctcccgccgatcacgccgcctcacctcgccgggcggcgtgatggcgacttccggggccggcgaccacgggcagggccagggccaggggcacggccgcttcgcgtcgtccctgacggcgcgctactcggactgggtgctggagacgctggacgagctcccagggagcttcctgctcacggaccccgccctgccgggccaccccatcgtgtacgcttcccggggcctcgccgcgctcaccggctacgcgccgcgcgacgtgctgggccgcaacgcgcgcctcttccagggcgccgccaccgaccgcgccaccgtcgccggcgtccgcgaggccgtccgcgcgcaccgcccgcaccaggccgccatcctcaactaccgccgcgacggcgccccgcactgggtcctcctccacctcgcccccctattccacgcccgcgacggcaccctgctccacttcctcgccgtccaggtgcccatcgcccccgccgccgtcgcgcgcggggcgacgtgccacacgacggggcatctgctagccgcgtgccgtgacgaggccagcagggtcgcggaggatttcccctgcgccacccacgcgggcaaggtgtttgtcgatatggacaagagagggctggagaccgaggaaccacgtgtacctagcgatagtgagaaagatatggcaataagaagagatgtgactcgattggcatcccagcactcagttcgtcgttaaaactctctctcggactgactcccgcttgcctaacatgccaattatttatgctagtgatgcttttacatcattaacaggttactcaagagaagaaatattgggctgtaactgcaaagtcttaaatgggccaggcactagcttggaggttttagaggagataaatcagcatatttgttctgagcaggcatgcacggtggatctactgagttacagatggaagttcattctgtgatcatctacatgtatctcctatccgagatgcttcgggcaaggtggcctttcatatctgggttcaccttgacatgggtgcaaagcacgattttagtgggctgacccccgagaaatggctgcttggcgctgttggtgcggtgagggttgctgtgagaggcttgtcggcgtcaggtagcctgttgagaccatcccaatagcagttttagtctcctcgccatttcatgaccacggcgaccggccttccacgatgtacattgctgcttgctattctgtgtaaagcaactgcttagcatgacaaagtaaatgagttcgttttgaaggaaaatccatggtaaatacaagatgttgctgtgactatataaccaggtggggtgaagtaaagaaaaaggaaatagaagctgctgttaggatttatgggcttggcccaattaagaatttctaataattccaggaaaatctcaaaagcccatataagtggatggcaaagggataggtggaaccaatagcatcatattgctagctcttgtggagtagagctagcttaaatatggaagccacactcactcaccaagtcatggatgagaggagagagtgtggagagccacac

SEQ ID NO: 29141 - DNA, 2271 bp, Zea Mays
ggcacctcgagattcgagcgctgctcccgtactacttactactcgagagtcgagactgctttgttttttttgttgatggaaaagaaccagaagggtagtactcgagagcacgaatcgccacgtccgccagaggatgagcttgagcagctccaactccaacgcgtgacaaaacaaacagaaccgtcacaaaaataaataaaccaaacggggcctaaataaaaagtcgtcgacaaaaatttggcagccataggccatagcccccgctgccccccgggcgcagatcttttctgggcttctggctcccctctcccgccgatcacgccgcctcacctcgccgggcggcgtgatggcgacttccggggccggcgaccacgggcagggccagggccaggggcacggccgcttcgcgtcgtccctgacggcgcgctactcggactgggtgctggagacgctggacgagctcccagggagcttcctgctcacggaccccgccctgccgggccaccccatcgtgtacgcttcccggggcctcgccgcgctcaccggctacgcgccgcgcgacgtgctgggccgcaacgcgcgcctcttccagggcgccgccaccgaccgcgccaccgtcgccggcgtccgcgaggccgtccgcgcgcaccgcccgcaccaggccgccatcctcaactaccgccgcgacggcgccccgcactgggtcctcctccacctcgcccccctattccacgcccgcgacggcaccctgctccacttcctcgccgtccaggtgcccatcgcccccgccgccgtcgcgcgcggggcgacgtgccacacgacggggcatctgctagccgcgtgccgtgacgaggccagcagggtcgcggaggatttcccctgcgccacccacgcgggcaaggtgtttgtcgatatggacaagagagtttgctgttgcagggctggagaccgaggaaccacgtgtacctagcgatagtgagaaagatatggcaataagtacggctaacagcattgtctctgcgctgaacagctacagcaagctaactggtctagtggtcagcaggaagagatgtgactcgattggcatcccagcactcagttcgtcgttaaaactctctctcggtagaatcaaacagagctttgtattgactgactcccgcttgcctaacatgccaattatttatgctagtgatgcttttacatcattaacaggttactcaagagaagaaatattgggctgtaactgcaaagtcttaaatgggccaggcactagcttggaggttttagaggaggtgcgggccaggattatatagcttgtatgaccacattctccataatatagcttaccttttaaaatttatattcaaaattggacgtacagataaatcagcatatttgttctgagcaggcatgcacggtggatctactgagttacagatggaagttcattctgtgatcatctacatgtatctcctatccgagatgcttcgggcaaggttcgcttacatctttctcaggtcttccctgaaagaaactgtctctcaaatgcattaaacaatcactacacaattgctatgtttgtgtgctatgaagctctaaactacggaacagaatagatttgcagtttgctatcagtcagatattccgctcttgtacaaccatcatggggattttttttttcccgactgacttcatacctacgcaggtggcctttcatatctgggttcaccttgacatgggtgcaaagcacgattttagtgggctgacccccgagaaatggctgcttggcgctgttggtgcggtgagggttgctgtgagaggcttgtcggcgtcaggtagcctgttgagaccatcccaatagcagttttagtctcctcgccatttcatgaccacggcgaccggccttccacgatgtacattgctgcttgctattctgtgtaaagcaactgcttagcatgacaaagtaaatgagttcgttttgaaggaaaatccatggtaaatacaagatgttgctgtgactatataaccaggtggggtgaagtaaagaaaaaggaaatagaagctgctgttaggatttatgggcttggcccaattaagaatttctaataattccaggaaaatctcaaaagcccatataagtggatggcaaagggataggtggaaccaatagcatcatattgctagctcttgtggagtagagctagcttaaatatggaagccacactcactcaccaagtcatggatgagaggagagagtgtggagagccacac

SEQ ID NO: 29142 - DNA, 1974 bp, Zea Mays
ggcacctcgagattcgagcgctgctcccgtactacttactactcgagagtcgagactgctttgttttttttgttgatggaaaagaaccagaagggtagtactcgagagcacgaatcgccacgtccgccagaggatgagcttgagcagctccaactccaacgcgtgacaaaacaaacagaaccgtcacaaaaataaataaaccaaacggggcctaaataaaaagtcgtcgacaaaaatttggcagccataggccatagcccccgctgccccccgggcgcagatcttttctgggcttctggctcccctctcccgccgatcacgccgcctcacctcgccgggcggcgtgatggcgacttccggggccggcgaccacgggcagggccagggccaggggcacggccgcttcgcgtcgtccctgacggcgcgctactcggactgggtgctggagacgctggacgagctcccagggagcttcctgctcacggaccccgccctgccgggccaccccatcgtgtacgcttcccggggcctcgccgcgctcaccggctacgcgccgcgcgacgtgctgggccgcaacgcgcgcctcttccagggcgccgccaccgaccgcgccaccgtcgccggcgtccgcgaggccgtccgcgcgcaccgcccgcaccaggccgccatcctcaactaccgccgcgacggcgccccgcactgggtcctcctccacctcgcccccctattccacgcccgcgacggcaccctgctccacttcctcgccgtccaggtgcccatcgcccccgccgccgtcgcgcgcggggcgacgtgccacacgacggggcatctgctagccgcgtgccgtgacgaggccagcagggtcgcggaggatttcccctgcgccacccacgcgggcaaggtgtttgtcgatatggacaagagagtttgctgttgcagggctggagaccgaggaaccacgtgtacctagcgatagtgagaaagatatggcaataagtacggctaacagcattgtctctgcgctgaacagctacagcaagctaactggtctagtggtcagcaggaagagatgtgactcgattggcatcccagcactcagttcgtcgttaaaactctctctcggactgactcccgcttgcctaacatgccaattatttatgctagtgatgcttttacatcattaacaggttactcaagagaagaaatattgggctgtaactgcaaagtcttaaatgggccaggcactagcttggaggttttagaggagataaatcagcatatttgttctgagcaggcatgcacggtggatctactgagttacaggaaagatggaagttcattctgtgatcatctacatgtatctcctatccgagatgcttcgggcaaggttcgcttacatctttctcaggtggcctttcatatctgggttcaccttgacatgggtgcaaagcacgattttagtgggctgacccccgagaaatggctgcttggcgctgttggtgcggtgagggttgctgtgagaggcttgtcggcgtcaggtagcctgttgagaccatcccaatagcagttttagtctcctcgccatttcatgaccacggcgaccggccttccacgatgtacattgctgcttgctattctgtgtaaagcaactgcttagcatgacaaagtaaatgagttcgttttgaaggaaaatccatggtaaatacaagatgttgctgtgactatataaccaggtggggtgaagtaaagaaaaaggaaatagaagctgctgttaggatttatgggcttggcccaattaagaatttctaataattccaggaaaatctcaaaagcccatataagtggatggcaaagggataggtggaaccaatagcatcatattgctagctcttgtggagtagagctagcttaaatatggaagccacactcactcaccaagtcatggatgagaggagagagtgtggagagccacac

SEQ ID NO: 29143 - DNA, 2345 bp, Zea Mays
ggagccgccgccctgtcacccagaagaaccgagcagacacagaggtactctcttcattctgcttgtattctggaatgacgaaaatgaaattaaaaaattttgtgtggtaaacaccatctcttcctccattctgcttgtattatgtaatgacgagaatgaaattaaaaaaatttgtgtggtaaacaccacggttacacaatgagttagcccttgttatgatatcattcttttagtttagcagttttctgttaatatggaagatttattgttgtccctgcttttgtaaattttgtacgtttttggatgatgtccctatattggttctttttaatgaagttgtatattagtctgatggatagcttattgcagaaaatgggcctttttgcaattgtgagggcgtcgaggcggtttactaggaggttcagtacagtcagttgtgactcctataccttaatcggccgcagcatgaatattggcatccctgctcgacactgtaccccgctggaggattggttcaaagcaaggcctgtcatggaacttattccaacacaaagattgataacaactatgctggctgacagaaagtatcagatgttagatgacaacaggcatgtgctttggacaggactaattcagatagagtttgcaaaatcaagaaagatttcactgaagggccttcttagttatgataacttaggagttattaatggactgaacatgctgtgcttgaaaaatttatctttgtccacaagttctccttcagaagattcttcaagctctcctttacaagagtctctctttgaagattttatggagatggttctgcagaaggagttgtcatgtagtatctcaagtctacctgagtatcgggattcgctttttgagaccttgaaaaatcctgcccataagttgcatgatgccatataccattcagcatttctctcagatgaagagttctctaatctatgcattcacattcaccgtctcgttcgtcatgagatgttgatgaggaatcaaggaactgaatcatgttcaatctgtgcacatctaaatgtggcatattatgaccaagatgttatctttacttgccagggtcacttcatgttatccaattttcttggggtacattccaaattggttaaagggaagccaattgctgggcagtatcatagcaatccttctttgaacatattgccatatcgaccccactcagttctgcatccgatagggtcagctttggtggatactatgcgaattggttgcatgcattccattgaaaacaagttgatcaacgatatttgtaaggcaagcttcaaaggtgttaaggaccctttacttgacacgtacaccaggaaggaagtcattcgcctacttcgctatacattcccaaattatgctcaatatgctcttgaaggtttcaagactgaaggtctgcttcataagcttgggctgaaccgcttaaagcccataccttctattctaaatatttgaacctcaggtacatatcttttgaattttctcctcagtaccagagagttggtgggcagccagttgaacacgctggttttctgggcaaccaatagcttccagcttccttttgatcgtgcgcatccaatcgtctgcatcgagagggttgcttgatccggcgaacgtgggaggtttgagtctcaggaagtcccccattctgtcttgcggtcttccaccatttggccgttgatttttcagatttcgagtgaggacctcgatgagtcgggtctgattggctagaacttgggctaggtctaagggtaggggtggaggtgcggggaggtgggtttcactttcctctctaacgacttccccttcagctcttcgggggaaacctgctccaatccctgaggcggtaggcgtggttttatccgaagccatctgccagggaagagagtcactatcatgcacatgcaaattgttctcaaccaagttattttattcatcacaccatcacattacaagcataagactactacaggggaagactacacgagggcgttcttcgaggtgctagcgagttccttgtctaaggtgtccccaaatgccttgagaagatcatcgaggctggctagggatacatcttcttcgtcggaccagtcatcgattctggggggaggtagggctagaggggccttcttcttctctgtctgtcatccttggttagtggtcttcttctggatcttctttttgggggcgagtgcctttagcttcttgtcaaagtctatcttcaaggtccgataggcctcacgggtgttggcttcctcgccttccactatgctgagactctcctggagggataccttctcttgcgtaag

SEQ ID NO: 29144 - DNA, 3096 bp, Zea Mays
ccataccatgtatgaaattttttattctttcacatttgagaattccttgatatgaatcagcgatgacatttaatatctatgggccaattgtgcttgtattgatctgccaaaattatacttaagggttatgtgttcaaaagtgatgtagcttgtattgatctgccttgtattttactcaccagtttatatatcttgtgtgatctgccaattatgcttgtattttactcactagtttatatatcttgtgcgatacaatgctttttattttactcaccagtttatatatcttgtgtgatctgccaattatgcttgtattgatctgccttgtatttttaatatatttgttctgccttgtatttgtgttttataattatctgtagtccatatatatttctaaagtccatataatctgtagatattagataatgggctcaaggaatgagattatggagtgtagaaggaagaaaattctgaaattcatggaaatggaggaggaagaggatgaggaactattttttatcatcattcctagcatactcgaaggacttaatgaagaaaaaagggcagtacatacttctgaatatactggtgctaagaagattagagaaattttagaaggccacgagaattggtgtatgagcgagtttcgcatggagccacgaatatttaaggcaatagctaattatctaggcgggagaggcttttgcgcgatacacgcggagtcacaattgaggaacaattaggaatatttatgttcatgatatcacacaatgctagtaatgggaggctacagaagacatttcagcatagtggcgaaacaatccatagacatgtgaaggccgtcttcaatataattcctaccctcacatgtagatttgtcaaacttcctacttccttggaacctcatcctaagattgcctcggactcccgattttggccattctttcagaattgtataggtgctattgacggtactcacgtccctatcacaatttcagaagagaaagccccaccatataggaatagaaaaggaacattatcccagaatgtgatggtagcgtgtgacttcaacttgaacttcacttttatctcatgcggctgggaaggatccgcatcagatgctggggtgcttaaatccgctattagcaaaggttttcatgtcccagagggcaagttttaccttgtcgacggtggatacgcaaacacaccatcatttcttgctccatatcgtggtgtgagataccaccttgcagaacggcgtcgtcgagcggcgcaaccagacgattataaggagcttttcaaccatcgtcatgctattcttagaaaccatattgagcgggctattggggtattaaagaagagatttcagattctcatagtgggtactcatcatcccactgagtctcaaagtaaaatcccagctgcagcagctgtgtttcataacataattagaagattaaatggagatgatatgtggctagaacaacaaccaagtcatattcaaccagcagattttattgatttgcccgatggagatgacaactatcagaatgatgtagagtcaatgaatttacaaagcagccagggaaatattcttagagatcaaattgcaatgcaaatgtgggaccaatacatccaagatcgggcatgaaagctgaactgttgatcaattatggcaagagcttcttggaatatgaattatgagaagagtcttgttgacatcttgcatgagcataataatccaagatttaggggtcaaaatggttggattccggagggctggcgtagtataactcaaatgttcaatgagaaatttcctctagctcaattttcgaaagcgcaaatccaagagaaagaaaaagagctcaaagcaaattacaagttaataaaggaagcccggaaacaaagtggggctggatggaatgacagccttggcatgataaatgcattgccaccaatatgggacagaataattaaaaaccatccaaagatgaagaagttccaatcaaagccatttcctctctacaaccaattggaattgctatatcaaggaagctgtgcaaccggagatctaaattttacatccacgcaacaactagcaccggttcagcaggtttcaaaccctcaagatgatgctgtaaatgaagctgtaagctcttttaggaatgatgaccttgagctcgattccggtttaaatccatcctcctcaaatgttcaaaggcacgcagtttcaagtactcatgctgatcttggcacaaatgaccggacaccggcatcttcggattgtagagaggatagtcatggaaggaagtgcaagcaaaaccaaatcgctggggttcttgaggattttttgcaattcaagaaggaacaaagtaacaagtttattagtgaggtcaatcaaccatcaaatgaaagaagcaaagaagagtattccattggaaagtgtgttgctattttggagtcaatggaagatctaagtgaagaagaaatggcaaaagcattaggagtgtttaagtgtgaagaaaaccgggagatctttatgactaccaagagggcacgtgttaggttgttgtggcttagggatgagattaacaaacaggtgctatctccacgagtgagtggtgtatgaggattcctgtacttggaagtgtgtagaaatattgatgtgagatgctaaagctactgaagtaagaagtgcaattgttaagaaaactgaagtaatgagattgttaagaatattgagatctcttgtgcttgatctaatgtaataggacctattagcttctatatttggatgacattgtctttgtataatttgagcacttggtactttctatagtctggaatgatctaataatttagcacttggtactttctatacctggatggcatgtctctatgctgtggtggtgttgaactgaagttgagcatgcataatggagaaccaggagaatcagattgtggtgttgtattgttgttgctataatttttcatttgtgagcttttgtcaacagtggatcgataaacttgtaaaaccaatgtgatattaagtgctgttgaaaactttatttgaagcaacaaaatgttggatgaaaa

SEQ ID NO: 29145 - DNA, 1613 bp, Zea Mays
cttcaattggcagcagcagtatagttttatactaaccttttcgatccacacaaatatttcggcataaatcaaatttaaaataaaaaagatcttaaacatttcgtgtccctttgtttcctccccagctgagcctgcgcctgtactctgatgggccagcccactaaccgttcagcggcagagcccgttatttcgccacttcagcgccccacacttgcgccgcagcagtagaaggtagaacaccttcttgacccgaattcaatccgtgcgcacgcaccctccgccggcgacggctcacgcatcgctcggcgcccgccccgcgtccccgaggcgacgaccggcagagcgcgctctcgcggcgctacccgacacctgcgacgaaacgccccgagtccactagtcgaggagtgcgtcgacgcaggggctcgggaacgcggtgtcgccatcgcggagccctagcgagatcgtcgggaaggtccgaaggcgagcacgtgtttgtgtaacctttctccccttcttccctttgccggccggcccttcagcggcgacaagtgcccaccaggcggtggtttacgttgagctgaggagtgaggaagatgtctggaaattcggcgtcgacaacacttctaggaggaaatttgacaaggaagagtacttggagagagctcgacagagggagcagagggagaaggatgaagctcggaaaggcaaggaaaggggtcctcctgtgcaaagacagcctttgaaacacagggactatgaagttgatcttgattctcgtcttggcaagactcaggtggtgaccccgattgcaccattgaatcagcaggctggatactactgttctgtatgtgaatgtgttgtcaaagattcagccaactatttggatcatataaatggcaagaagcatcagagagcactgggcatgtctatgcgtgttgaaagggcatcacttgaacaggtccagaaaaggtttgaggcacttaagaaaaggaaggatccaagtgcctttactgaagaagatttggatgagagaataatgaaacaacagcaagatgaggaggaacggaagcgtcagcgcaaagaaaagaagaaagagaagaaaagagaacaggcaacccaacatgaacctgaggacgttgatcctgacatcgctgccatgatgggttttggtgggtttggttcctcgaagaagtgacagctctgtgttggccgcatccctttggtgaccttctgccctgaagatattgctcaaccccataaacacctgtgccatgaaaaatcgtttttgccagaatcctgataagatttgaacgaagtgcactggatgcaaggatactacgttttggcactgggatactgagctgcgtgtatgggagttgattatcaaaaggaatatctaagggtgttttggataaacctgtttatttgctacttcgggtgttcctgccatagaaacagctgatggtcgtgattgtttgttgtgacttgtgggaatgcagatgtgcgaagtggaacaaaccaaaagaattgccgtctcattttctagaggaataaacttgtgtattgcagttaacagctcccttgattctgaatattaatttccagaacccctg

SEQ ID NO: 29146 - DNA, 1530 bp, Zea Mays
cttcaattggcagcagcagtatagttttatactaaccttttcgatccacacaaatatttcggcataaatcaaatttaaaataaaaaagatcttaaacatttcgtgtccctttgtttcctccccagctgagcctgcgcctgtactctgatgggccagcccactaaccgttcagcggcagagcccgttatttcgccacttcagcgccccacacttgcgccgcagcagtagaaggtagaacaccttcttgacccgaattcaatccgtgcgcacgcaccctccgccggcgacggctcacgcatcgctcggcgcccgccccgcgtccccgaggcgacgaccggcagagcgcgctctcgcggcgctacccgacacctgcgacgaaacgccccgagtccactagtcgaggagtgcgtcgacgcaggggctcgggaacgcggtgtcgccatcgcggagccctagcgagatcgtcgggaaggcggtggtttacgttgagctgaggagtgaggaagatgtctggaaatccagtcggcgtcgacaacacttctaggaggaaatttgacaaggaagagtacttggagagagctcgacagagggagcagagggagaaggatgaagctcggaaaggcaaggaaaggggtcctcctgtgcaaagacagcctttgaaacacagggactatgaagttgatcttgattctcgtcttggcaagactcaggtggtgaccccgattgcaccattgaatcagcaggctggatactactgttctgtatgtgaatgtgttgtcaaagattcagccaactatttggatcatataaatggcaagaagcatcagagagcactgggcatgtctatgcgtgttgaaagggcatcacttgaacaggtccagaaaaggtttgaggcacttaagaaaaggaaggatccaagtgcctttactgaagaagatttggatgagagaataatgaaacaacagcaagatgaggaggaacggaagcgtcagcgcaaagaaaagaagaaagagaagaaaagagaacaggcaacccaacatgaacctgaggacgttgatcctgacatcgctgccatgatgggttttggtgggtttggttcctcgaagaagtgacagctctgtgttggccgcatccctttggtgaccttctgccctgaagatattgctcaaccccataaacacctgtgccatgaaaaatcgtttttgccagaatcctgataagatttgaacgaagtgcactggatgcaaggatactacgttttggcactgggatactgagctgcgtgtatgggagttgattatcaaaaggaatatctaagggtgttttggataaacctgtttatttgctacttcgggtgttcctgccatagaaacagctgatggtcgtgattgtttgttgtgacttgtgggaatgcagatgtgcgaagtggaacaaaccaaaagaattgccgtctcattttctagaggaataaacttgtgtattgcagttaacagctcccttgattctgaatattaatttccagaacccctg

SEQ ID NO: 29147 - DNA, 2918 bp, Zea Mays
agaacagtatctatgttttacgtaccctaacactgctggtgctcttcacttgggtttaatccaaagtccaaaaccacatcacacccttctaatcccaatcgcggcacgactcacgagctcctcgcgccgctgcagtgggctctgcgcctttcctctcgccggagtcctaaaaaaaccctagggactagggagcgtgcggctgctgctgctgcggccggacgaggggatgggcacagggggagacggggacaaggcggggccggcgctgccgctggaggcgcttttggcgctcgggctcgaccagcgcaccgccgagaacgcgctcgtcaacgccaaggtcaccgccaacctcgccgccgtcatagctgaggctggtataaaggaatgtgacaagtcaattggtaatcttctatatgcagttgccaccaagtacccaactaatgcacttgttcatcgccctgtccttattagctatgtcttgtcaacaaagataaagagccctgcacagctagatgctgccctctcatttcttactaatactggtcctgattctctagatgtggacaagtttgaagaagcatgtggtgtaggcgtggttgtttctattgaggaaattaaatctactgttactgacattcttgaggagaatatggaagctataaaggagcagcgttggtatgctatgtggacaggttaggaagagacacccctggggtgatgctaaggcagtaaaggaggaaattgacaagaggcttgcagaaatcctaggtccaaagacagaagctgacagtataaaaccagtgaaaaagaagaaggaaaaaacagcaaaagttgaggagaaaaaagttgcagttgccactactgccccaccatctgaggaggaattgaacccgtatactatatttccccaaccagaggaaaactttaaggttcatacagaaatatttttcagtgatgggaacatatggagagcacataacacaaaggaaattttggaaaaacatctcaaggcaactggaggaaaagtgatgacccgttttccaccagaacctaatggatatcttcatattggtcatgccaaggctatgtttatcgattttggtctggctaaggagcgaaatggccattgctaccttaggtttgacgacacaaatccggaagctgaaaagaaagaatacatagatcacattcaagaaattgtccattggatgggatgggaaccctacaaagtaacatacacgagtgattatttccaacctttgtatgagcatgctgttgagttaattcggaaagggctagcctatgtggatcatcagactgcagaagaaattaaggagtacagggaaaagaagatgaatagtccatggagggataggccaattgaagagtcattgaatttatttgaagacatgaggcgtgggttgattgcggagggtgcagcaactctccgaatgaagcaggatatgcaaaatgagaacaaaaatatgtctgacttaatagcatatagaataaaattcacccctcatccacatgctggtgataattggtgtatctatccgagctatgactatgctcattgcatggtggattctcttgaaaacatcacgcattcgctgtgcacacttgagtttgacatacgccgcccttcatactactggctacttgttgccttgggtctttatcaaccatatgtgtgggaatattcgaggctaaacatatcaaatactgtgatgtctaaaagaaagttgaatcgacttgtgacagagaactgggtagatgggtgggatgatccccgcttgttgacactggctggactccggcggcggggagtatcatcaaccgcaataaattcctttatccgtggaatcgggataacaagaagtgacaacagcttaattcgtgttgatcgtctagaataccacatcagggaagagcttaacaaaacagcccctcgaaccatggttgttttgcgtcctctaaaggtggtaataactaacttggaagaaggaaaagtactagaccttgatgggaaaatgtggccagatgcttctgatactgatgcttcctctcactataagcttccgttctcaagaactgtctacattgagaaaactgattttcgccttaaggactcaaaagactactatgggctggcccctggtaaatctgtcatgctaaggtatgcgttccccataaaatgcacagacgttatctatggtgatactcctgatgatattgttgaaattcgagcagaatatgatcctttgaagacttctaaacttaagggtgttctgcactgggttgctgagccagcacctggtgtcgaaccattgaaggtggaagtaagactattcgagaaattgttcatgtcagagaatcctgctgaattggaggattggcttggtgatcttaacccgcactcgaaagaggtgataaaggacgcttatgctgtaccatcgcttgccactgcagttctgggcgacaagttccagtttgagcggcttggttacttcgccgtggacacggactccactcctgagaagctcgtgttcaacagaactgtcaccctccgtgattcattcggtaaagctggaccaaagtgacttccagtgtaatgtaggtagggcgtgggtgctcggttgcataggcgcacctgagctatacttttttttgaagaagaaaatgatcttgtaatacagaacagcctaaaggcctcaatctttgtaaaatttacatgtgactgcagtgcagcttgtttgcttcgaaggaatcagattttgtatggtagtgttactgtgttagtgcgccggtacccagtctggtttgatgatgtcaagagctactcatgcgaagttctgtttcttcctgcttcctaaaaagagttgatattgtttttttttggcacatccggccttgtt

SEQ ID NO: 29148 - DNA, 2667 bp, Zea Mays
cgagctcctcgcgccgctgcagtgggctctgcgcctttcctctcgccggagtcctaaaaaaaccctagggactagggagcgtgcggctgctgctgctgcggccggacgaggggatgggcacagggggagacggggacaaggcggggccggcgctgccgctggaggcgcttttggcgctcgggctcgaccagcgcaccgccgagaacgcgctcgtcaacgccaaggtcaccgccaacctcgccgccgtcatagctgaggctggtataaaggaatgtgacaagtcaattggtaatcttctatatgcagttgccaccaagtacccaactaatgcacttgttcatcgccctgtccttattagctatgtcttgtcaacaaagataaagagccctgcacagctagatgctgccctctcatttcttactaatactggtcctgattctctagatgtggacaagtttgaagaagcatgtggtgtagttggtatgctatgtggacaggttaggaagagacacccctggggtgatgctaaggcagtaaaggaggaaattgacaagaggcttgcagaaatcctaggtccaaagacagaagctgacagtataaaaccagtgaaaaagaagaaggaaaaaacagcaaaagttgaggagaaaaaagttgcagttgccactactgccccaccatctgaggaggaattgaacccgtatactatatttccccaaccagaggaaaactttaaggttcatacagaaatatttttcagtgatgggaacatatggagagcacataacacaaaggaaattttggaaaaacatctcaaggcaactggaggaaaagtgatgacccgttttccaccagaacctaatggatatcttcatattggtcatgccaaggtttgacgacacaaatccggaagctgaaaagaaagaatacatagatcacattcaagaaattgtccattggatgggatgggaaccctacaaagtaacatacacgagtgattatttccaacctttgtatgagcatgctgttgagttaattcggaaagggctagcctatgtggatcatcagactgcagaagaaattaaggagtacagggaaaagaagatgaatagtccatggagggataggccaattgaagagtcattgaatttatttgaagacatgaggcgtgggttgattgcggagggtgcagcaactctccgaatgaagcaggatatgcaaaatgagaacaaaaatatgtctgacttaatagcatatagaataaaattcacccctcatccacatgctggtgataattggtgtatctatccgagctatgactatgctcattgcatggtggattctcttgaaaacatcacgcattcgctgtgcacacttgagtttgacatacgccgcccttcatactactggctacttgttgccttgggtctttatcaaccatatgtgtgggaatattcgaggctaaacatatcaaatactgtgatgtctaaaagaaagttgaatcgacttgtgacagagaactgggtagatgggtgggatgatccccgcttgttgacactggctggactccggcggcggggagtatcatcaaccgcaataaattcctttatccgtggaatcgggataacaagaagtgacaacagcttaattcgtgttgatcgtctagaataccacatcagggaagagcttaacaaaacagcccctcgaaccatggttgttttgcgtcctctaaaggtggtaataactaacttggaagaaggaaaagtactagaccttgatgggaaaatgtggccagatgcttctgatactgatgcttcctctcactataagcttccgttctcaagaactgtctacattgagaaaactgattttcgccttaaggactcaaaagactactatgggctggcccctggtaaatctgtcatgctaaggtatgcgttccccataaaatgcacagacgttatctatggtgatactcctgatgatattgttgaaattcgagcagaatatgatcctttgaagacttctaaacttaagggtgttctgcactgggttgctgagccagcacctggtgtcgaaccattgaaggtggaagtaagactattcgagaaattgttcatgtcagagaatcctgctgaattggaggattggcttggtgatcttaacccgcactcgaaagaggtgataaaggacgcttatgctgtaccatcgcttgccactgcagttctgggcgacaagttccagtttgagcggcttggttacttcgccgtggacacggactccactcctgagaagctcgtgttcaacagaactgtcaccctccgtgattcattcggtaaagctggaccaaagtgacttccagtgtaatgtaggtagggcgtgggtgctcggttgcataggcgcacctgagctatacttttttttgaagaagaaaatgatcttgtaatacagaacagcctaaaggcctcaatctttgtaaaatttacatgtgactgcagtgcagcttgtttgcttcgaaggaatcagattttgtatggtagtgttactgtgttagtgcgccggtacccagtctggtttgatgatgtcaagagctactcatgcgaagttctgtttcttcctgcttcctaaaaagagttgatattgtttttttttggcacatccggccttgtt

SEQ ID NO: 29149 - DNA, 2603 bp, Zea Mays
atgggcacagggggagacggggacaaggcggggccggcgctgccgctggaggcgcttttggcgctcgggctcgaccagcgcaccgccgagaacgcgctcgtcaacgccaaggtcaccgccaacctcgccgccgtcatagctgaggctggtataaaggaatgtgacaagtcaattggtaatcttctatatgcagttgccaccaagtacccaactaatgcacttgttcatcgccctgtccttattagctatgtcttgtcaacaaagataaagagccctgcacagctagatgctgccctctcatttcttactaatactggtcctgattctctagatgtggacaagtttgaagaagcatgtggtgtagttggtatgctatgtggacaggttaggaagagacacccctggggtgatgctaaggcagtaaaggaggaaattgacaagaggcttgcagaaatcctaggtccaaagacagaagctgacagtataaaaccagtgaaaaagaagaaggaaaaaacagcaaaagttgaggagaaaaaagttgcagttgccactactgccccaccatctgaggaggaattgaacccgtatactatatttccccaaccagaggaaaactttaaggttcatacagaaatatttttcagtgatgggaacatatggagagcacataacacaaaggaaattttggaaaaacatctcaaggcaactggaggaaaagtgatgacccgttttccaccagaacctaatggatatcttcatattggtcatgccaaggctatgtttatcgattttggtctggctaaggagcgaaatggccattgctaccttaggtttgacgacacaaatccggaagctgaaaagaaagaatacatagatcacattcaagaaattgtccattggatgggatgggaaccctacaaagtaacatacacgagtgattatttccaacctttgtatgagcatgctgttgagttaattcggaaagggctagcctatgtggatcatcagaagaaattaaggagtacagggaaaagaagatgaatagtccatggagggataggccaattgaagagtcattgaatttatttgaagacatgaggcgtgggttgattgcggagggtgcagcaactctccgaatgaagcaggatatgcaaaatgagaacaaaaatatgtctgacttaatagcatatagaataaaattcacccctcatccacatgctggtgataattggtgtatctatccgagctatgactatgctcattgcatggtggattctcttgaaaacatcacgcattcgctgtgcacacttgagtttgacatacgccgcccttcatactactggctacttgttgccttgggtctttatcaaccatatgtgtgggaatattcgaggctaaacatatcaaatactgtgatgtctaaaagaaagttgaatcgacttgtgacagagaactgggtagatgggtgggatgatccccgcttgttgacactggctggactccggcggcggggagtatcatcaaccgcaataaattcctttatccgtggaatcgggataacaagaagtgacaacagcttaattcgtgttgatcgtctagaataccacatcagggaagagcttaacaaaacagcccctcgaaccatggttgttttgcgtcctctaaaggtggtaataactaacttggaagaaggaaaagtactagaccttgatgggaaaatgtggccagatgcttctgatactgatgcttcctctcactataagcttccgttctcaagaactgtctacattgagaaaactgattttcgccttaaggactcaaaagactactatgggctggcccctggtaaatctgtcatgctaaggtatgcgttccccataaaatgcacagacgttatctatggtgatactcctgatgatattgttgaaattcgagcagaatatgatcctttgaagacttctaaacttaagggtgttctgcactgggttgctgagccagcacctggtgtcgaaccattgaaggtggaagtaagactattcgagaaattgttcatgtcagagaatcctgctgaattggaggattggcttggtgatcttaacccgcactcgaaagaggtgataaaggacgcttatgctgtaccatcgcttgccactgcagttctgggcgacaagttccagtttgagcggcttggttacttcgccgtggacacggactccactcctgagaagctcgtgttcaacagaactgtcaccctccgtgattcattcggtaaagctggaccaaagtgacttccagtgtaatgtaggtagggcgtgggtgctcggttgcataggcgcacctgagctatacttttttttgaagaagaaaatgatcttgtaatacagaacagcctaaaggcctcaatctttgtaaaatttacatgtgactgcagtgcagcttgtttgcttcgaaggaatcagattttgtatggtagtgttactgtgttagtgcgccggtacccagtctggtttgatgatgtcaagagctactcatgcgaagttctgtttcttcctgcttcctaaaaagagttgatattgtttttttttggcacatccggccttgtt

SEQ ID NO: 29150 - DNA, 299 bp, Zea Mays
agcagttgagtttgtataaccaataaaagatgcaaaaataacatattaacatttcagttcactgtaaggttttgacaatagttcactgtaaataactcatgcaaactagcttcacagcggttctgttcttgctgtttgaatgaacatcgaaacatctggggttctctttcagcaaagatacggaaccaaaatacctgatcttttatttgcactgaaatctccttctgctgctccaatttatcatccacgttctgaatgcgctgtgataagtgctttttatagcctgcacaagttgtggc

SEQ ID NO: 29151 - DNA, 252 bp, Zea Mays
tattatatacatgcctgcaggccgtgcttcgggggacgacgaccccgttcccatcaggcatcagctgagctgagctggtccatggagagggattactcgtccatgggcagcgagatgcccgggaagaaggcgaggaagccctacaccatcaccaagccccacgagcggtggagcaccgaggagcacgcccgcttcgtcgatgcgttgctcatgtttggacgcgactggaagaagatcgaggagcatgtcggc

SEQ ID NO: 29152 - DNA, 551 bp, Zea Mays
ccacgacggcggtgccaaatatttgaagcccgcccacggcggtgtcatgtttgcaaaattctctccattcgccggttttgcgcatcccctccctccctccatctctctctgcgttcgtggtgctcggccatggcggactaccacttcgtgtacaaggacgttgagggggcgagcacacagtgggacgatatccagcgccgcctcgggaacctgcccccgaagccggagcccttcaagccgccgcccttcgcccccaaggtcgacgccggcgagcagcccaagtccaaggaatggctcgacgagcgcgaggccgaagagctcgaggaactcgaggacgaccttgatgacgaccgcttcctcgagcagtacaggaagatgaggcttgccgagctgagggaggccgcaaaagccgcgcgatttggtagtatagttcccatcactggctcggacttcgtgcgggaggtgtctcaggcaccatcagaagtttgggttgtggtcttcctctacaaggatggtcggttttgggtaccactgtcatacctcattttttg

SEQ ID NO: 29153 - DNA, 1267 bp, Zea Mays
ccacgacggcggtgccaaatatttgaagcccgcccacggcggtgtcatgtttgcaaaattctctccattcgccggttttgcgcatcccctccctccctccatctctctctgcgttcgtggtgctcggccatggcggactaccacttcgtgtacaaggacgttgagggggcgagcacacagtgggacgatatccagcgccgcctcgggaacctgcccccgaagccggagcccttcaagccgccgcccttcgcccccaaggtcgacgccggcgagcagcccaagtccaaggaatggctcgacgagcgcgaggccgaagagctcgaggaactcgaggacgaccttgatgacgaccgcttcctcgagcagtacaggaagatgaggcttgccgagctgagggaggccgcaaaagccgcgcgatttggtagtatagttcccatcactggctcggacttcgtgcgggaggtgtctcaggcaccatcagaagtttgggttgtggtcttcctctacaaggatgggatacctgaatgtggattgcttcagaattgtttggaggaattggctacaagatacccagcgacaaagtttgttaaaattatctccacggactgcatccccaactacccagataggaatgttcctacaatactggtgtataacaacagtgctgtcaaagggacttatgttggtttgcagaagtttggtggaaagagatgcacacctgaatccattcatctcgggacaatgtcatagaaggtgttcgcaggaagttcatagagaaggttgtagcccagcatgaagagcgggaagaagaggatagtgactaagcgtatattgtttgtgtttgttttcctcagctggcagatccaatttggttccaacgttcactgatcttatgtgattttgtgggtgaaatttgccagggttttctgattacctggttgtgcgggtgaagcttttaacagtttatggatcatattgcgttacagttagagatgtctgtgggtcagcaaaatcttggtgttagtaaccttttgagctgtaacataacttctttatcttatttaagagatcaaagatgattagtgcacttatatagttgcatgagaaaagatccacccatacctttgaatccacagtatttcactatcatgaagatttctcaacacaaaacatcactactgaaatgatctaatttgtgtatatgtatgtttatgataatttgtgaattagtaaaagtgcaacttgtgatgtatatatcgataagaaa

SEQ ID NO: 29154 - DNA, 8246 bp, Zea Mays
attttgggtcacggcctccctcgaaaccctaggccacaagcaaaactctgctcctcgcttaaacccgcgagcctccggacccggatgttgttccggttccgcccggccccctcgtagccatcgcctccttttagcgccgccatcccacctcgccggcggccatggcgaccccgtcttatgcggcggtgaagtgcctcaacacgtcctcgtccagccgcaagcgtttctcgtttaagagcttctcgcagcgggtggaggagatcgacatcgatgtgtaccgcagcctccacacactgaaggcggagccatccagcggatcgtccttcttcctcgacgcaattgtggagtggagggagcttaatactgcagaagacttcatctcattttatgaggagatgataccattggtacaaacacttcctcaaattgtcttgcaccgggacaagctcttttccgcacttctacaaagggtaaacatgagtgcaagattgtccctggagccaatactcatgttgattgcagctttctccagggatattctagaagattttttgccttttttaggaagacatgctagtgcacttttatctcttcttaacgacggaggtgatcgcgaccctgaaatcttggagcaggtcttcacatcctggtcgtatataatgatgtacttgcaaaagtatctagtgaaagatactgtccaaattcttaggatcacagcagcgttgagatatttcccgaaggactatgttagagaatttatggcagaatctgtttcatttttgctgaggaatgcacctaataatcagctaacgcaaggtctactgaaagttctacttgaggctgctaaacaaccatcacctgcacggatagacggggtggtctctttgctgtggcatgtcatgaaaggaacttccacaaagctacactcaaaagctgggcaggtcttgaagttcttgttgagcaagtcaattgtttccactctccgtgataaatttcctgatgataaggtgaagatgattaaacttgttgaggatgttccaaccattttgggcaatttgtccatcatatcacctttctatgccccagtgttcaaacttaaaaatccgagggtgattgtctttataaagaaacttttggtaaaaggtccccaagttgcacaacattttgaaagtcaaatattaagtgcaatggataatttcattgtaagttcacccgaggatgtcatatttatccttttaaatttctttaaaggatcaaagaagcaaatatttctttgtagcactgatggaaatcatctggattcagtggagaaaacttgcaagttctttgaatcaaaattttctttgtggatagagttattagatgatacagccggcactggtaatcgatctagtaaccaggtcagtgagaaggaagctgctatactgtggggatcttttttctgctaccctaacatgaaaggtgtacatcaagatagtttgtcactgctgaggaagttaatcatcaactttgatcggttgcttgaagtgggagaagggaacatgaatggtcttccaatgactacctggagaggtctacttggtgcagcattgtcatcgtaccacaaactactgttggtcaacaccagcagaaattcagaatttagttttttcttatcgcttgccaagagtcacagtacatgcccacaagtactgtctgctgtagctgaatatttggattccctgcaaggagtatcatccatggaagtgacaaaagaatttgatccacaaaatctcttggagctgttctccatctttgctttcaatttgagcagtccaaccaaggatgttcggattttaacattgaggattctatcatattttgtgaagatggatcaacgtctaatcacagatgaggagcgaccacacaagaggcagagaacagaagtttctggagaggaagctgttgctaaatacgctaatgttgtggatattcttttgattattgagtcaatgccaatttcagtatctactagccgtaaaattgctatcttcatttctcggatacaaatgagtttatcttccaagatggttcatgatgattacatacctcctctcttacatggtattattggcatattgtacaatagatttagtgatctatggccacaaacactggattgccttgctgttctcattagaaaacacaaggagcttgtttggggtcagtttgttccgttcattgcaattcaccaatcaaaaggactgactgtgaaaaatcaggagaagctggaagctgcaacccaaccacagtctatttttgactgcttcaacttgtatcttgctatggactttgattgcacaccagctgtgaccgtggctaccttattgcttcaatcgctccaaaggattcctgatgttgctgaatcccgctctcgacaacttataccgctatttctcaactttatgggctatgatgatagcagcatctttagtgctgattcatatatgcctgaaaaatgtaaaggcaaacaatggaaagcgattctaaaagaatggttaaacttattgaggttaatgcacaatgcaagatcgttatatcagggcaattttctccaggaagtactaactaaaagggttcttgatgacagtgatcctgaaatacaagcaaaagcattggattgccttttgaactggaaggatgaattcttgatcccgtacagtcagaaccttaaaaatctgattgatgtaaagactcttcgtgaagagctgaccacatgggcagtttcacatgactccttgtcaattctgaaagaccatagaagtcgtgtggttcctctggttatccgcgtgttggcaccgaaagtaaggaaactgaagctactaggttctcgaaagcacacaggtgccagtcatcgaaaggcaattcttcgtttccttttgcagtttgattcaaatgaacttgagctttttttttctttacttctgaggtccttgatccctggcagcctccagcttaaaatgtttggttctcagccagacaaccttcttggaagtttctctgacattgttggaacttcaacagaaatttgtgtagagaattttacatggaaaaaggcaaatggtttcattcatctggttgaagaaatttttggtacttttgatatgccacatataagcccatttcttaatgttttattaatcattgtcgctcgcttgctggagagttgcatgaggaatcttagaaatgagagtgatgggaaatatccttgcaaccaaacaaatgaccatggtaatggttgttccataaattctgaagtgggcaattctgtgaacgtggatgaatgctttaaagaaatgcatctagaaggccatatggagcaacctcactctatcacgcagacaagtgtatccatcaagcagttgaaggatttgaggtcttcatgtattagagttgtctcgtcagcccttagtcactatgaaagccatgagtttggagaaaacttctggggtgtttttttttcttctgtgaaacctctgatagactgctttacacaagaggcttccagtagtgagaaaccaagttcattatttgcttgttttatggctatgagccggagcccaaaattagcaccactgttggggtcaaataatcttgtaccagctattttttctattttgactgtgaagacagcgtcaggatccatcaccacctatgcacttgagttcattgagaatctgttgaggttggatattgatttgcagcagcaagatgaacatttagtgaagaaagttcttcttcaacatatggatgttcttatccatagtctccatgattttgttaatcatcgcaaagagctcaacaggagatctggtacatggcttgggcaacgtgaacttaggctgttcaaattattgctaaattacatcacagatccctcagctgctgataacttcatagaccttattcttccatttttcagcaagaaagatttgaactccgacgattgtttggaagcactatgtgttgtgaggggaataattcaaaatctgagatgcaaagtatctgaaaaagttctaaatgcactgaacccattacttgcaattgttggattggaactgcgactatgtatctgtgatatttatgctgggttgtcattgaatgatccttcgatgttgtttctggctgggttaataggagatctgaatgcagtttcagcttcagaacttggtgaactagattatgacacaagacttaacacctatgataaggttaggccacaattgtttcttggcttgacagaagagcatgtgggcgccatattatctcattgtgtgtatgatatgtcatctgaagaattaattttgcggcaaagtgcatctagggctctgcagtcgttcctggacttttccgcctcagttatgaataatgatgtgtccaaatactctattgatgataaatttagagagaataataccagaagcatttgcacgatgggctgtattcagaagatattggaaaaaacttatctgcacaatatgggagtagcaatgactaaagatgtatcaattcaaaaggaatggattattttacttagggagatggtctccaattttaatcatttagcatccttaagctcatttaggcctctctgtaaggtggatatagaagaggattttttccacaacataactcatttacaggctggtaaaagatcaaaagcactgttgctttttagacagggaatcaaggaaaacaacttttcagaggatatcactatgaaagtctttgttccactatttttcaatatgttttctgacgtaaaagctgggaaaggcgaacaagtcagagatatatgtttggatacactatctgctgttgctgccaaagtgcagtgggaacactatagaacaatattgaagagatgcttccgagaattaaaccttagacctgataagcagaagatcatattgaggctgatttgttccatattagatgcattccatttcatgaaacctgcaaatgatgcctcaggaaattctgatgctttgagtgaagatattgattcttcccttacattctctttggtcacagtctcttctgataagcaacagtacatgcaaaaggtagtgtttccacaggttcaaaagttgttaggatcagatccagagaaagtcaacgtcaacataaacctggtagcactgaaaatacttaagttgctaccggtggattattttgagtcccaactttcaagcatcattcatcgaatctgtaacttcctcaagaatcgtcttgaaagcatacgtgatgaagctaggtctgctttagctgcttctgttaaggaactggggattgggtatttgcagtttgtggtcaagatattaagagctatacttaaaagaggttttgagttacatgttctgggctacacacttcattatttgttgtcaaaaaacattactgctgatatgtatggtaggcttgactactgtttagaagatttgttggcagtggttgacagtgatttacttggagatgttgcagaacaaaaggaagttgaaaaacttgcctccaaaatgaaagagacaaagaagagaatgtcgtttgagactcttaagctgattgctcaaagtattacattcaagaccgatttactgaagaagataatctcacctgtttctttacatcttcagaagcaacttactccaaagttgaaaaccagacttgagatgatgctacacaacatagccttagggattgagtgcaactcatctactgaaacatcaaacttgtttatcttcgtatattgtcttattgaggatactattacaggaagcagatctgaatgcaaagagaatacacaatctagtcctgatcaagacagtactgtaagaaagaccttcctgggactaggtgagagtggatcacagaattcttatatacttaccaagtttgcacttgacttacttcgtaatcgtctgaagagcatcaagcttgacaaggaagatgaacaactcgtgaagatgttggatccttttgttgaccttctgcgaaagtgtatgagttcgaaacatgcaagtgtcctctcagccacatttagatgttttgccttgttggtgaaacttccgttgccatctctgagggacaatgcaattactataaaaaatgtacttatggagattttacagagagctggaaactccaatggtcatttagtcacatcttgttttaagctacttgctgatctacttagaggattcaggatttcactttcagataatgagcttcagatgcttgttcatacccctatgtttgtagatcttcagacaaacccttcccctgttgccttatcgcttctcaaaacaatagtcaggctaaaattggtttctcacgaaatttatgatatagttgttaagataggagagttgatggtaacaacattaactgaatctatacagcagcaatgcattcaaattatgctacaattttttctgaactatccactttctgagaagcgcttacagcaacatattgactttttcctggcaaacttaagttatgaacatccttcaggaagagaagcagtgcttgaaatgctccatgacattcttaccagatttccccagaggattattgatgagcagggtcaaaccttttttcttcatcttgtagttgctctagccaatgaacagcatcagaatgtgtcttcaatgatccttagagctattcaaaagctgttaggacgcattggtggtcagggaaagagttacatttatgagtattcactttcgtggtacactggtgagaagaaaagtttgtggagtgcttcagctcaggttattggtttacttgttggcgatcacacattacaaatgggcaagcaccttaaaagtattctggctgttgttaagaaaataatggaatcatctattattgcttctggagctatacaattaggcttatctgatgaagctgccctgccattgtggaaagagacttactactctgttgccatgatggagaggttacttcttcgctttccggagttgtattttgagaaaaacatggaggacatatggataatattatgcaagttgttgatccatcctcattcgatgttgcgtagtatttcaagctctctggtagcatcatattttgctacagtggagaagaggaaacatgaacagaaattggatgccccatcatggttgcttgttcaaccgagcaggctattcataatagctgtttccttgttgaaacaattgaggagtgagctgagtgatactacggcaaataatctgattgtacagaatgttgcatactcagtctgcaacttgcatatgttgattaggcaatcgacctccacacatcagttttggtctagcattagttctgatcgtggtgctttccttgagggttttgaattgcttggttcaagaaaagcaaaaaatatatttctcctttgtacttcaacatctagtgatgtatctggatctagcctcgacaccaacgaagagcctacatctttgttagtttcgtcaatcctaaagaagatgggaagaattgcaatgcaaatgcaggatacacagataaagaacgtgttcaattgcttcaatatgatttcatcagctcttggtcctgatgaatcactaacctatgctgatcacctcttggccccattgtataaagtttctgaaggatttgctgggaaagttgttagtgatgaagtgaagcaactggcccagggggtccagaacaagttacgtgacctgattggttccgagaaatttgttgaagtctacaagagcgttcggatgggcctgaaacagaagcgggacggtagaaagcaggcacagaagattgttgcagccgtggacccagaacgcaatgccaagcgaaagcagcgaatggcagccaagcaccgggaacacaagaggcgaaagataatggcgatgaagattggcaggtggatgagatagcttggtatttaggctctgcggaattcggtgaatcatataattgtagaggataatttttcgtgctacaagtgctggcataaaattatgtttctgttttatatgctgtctcactgacttactgcccgacgtaattttattgttgagttaccgaaccataccgtaagtaaaaattaagaggcataagcaatgaagacatagaattgattgaattatatttttttggggtggatggataagtaacaatatattattaaatgtgcaattaagagttttctggctgaggtttgc

SEQ ID NO: 29155 - DNA, 8099 bp, Zea Mays
ctcgaaaccctaggccacaagcaaaactctgctcctcgcttaaacccgcgagcctccggacccggatgttgttccggttccgcccggccccctcgtagccatcgcctccttttagcgccgccatcccacctcgccggcggccatggcgaccccgtcttatgcggcggtgaagtgcctcaacacgtcctcgtccagccgcaagcgtttctcgtttaagagcttctcgcagcgggtggaggagatcgacatcgatgtgtaccgcagcctccacacactgaaggcggagccatccagcggatcgtccttcttcctcgacgcaattgtggagtggagggagcttaatactgcagaagacttcatctcattttatgaggagatgataccattggtacaaacacttcctcaaattgtcttgcaccgggacaagctcttttccgcacttctacaaagggtaaacatgagtgcaagattgtccctggagccaatactcatgttgattgcagctttctccagggatattctagaagattttttgccttttttaggaagacatgctagtgcacttttatctcttcttaacgacggaggtgatcgcgaccctgaaatcttggagcaggtcttcacatcctggtcgtatataatgatgtacttgcaaaagtatctagtgaaagatactgtccaaattcttaggatcacagcagcgttgagatatttcccgaaggactatgttagagaatttatggcagaatctgtttcatttttgctgaggaatgcacctaataatcagctaacgcaaggtctactgaaagttctacttgaggctgctaaacaaccatcacctgcacggatagacggggtggtctctttgctgtggcatgtcatgaaaggaacttccacaaagctacactcaaaagctgggcaggtcttgaagttcttgttgagcaagtcaattgtttccactctccgtgataaatttcctgatgataaggtgaagatgattaaacttgttgagttgctggttagtagatatgtgttccctggtagcaacataacaggatcttcttcaattgaggttcttggaagtattcttgactttatgctttctgttctggatgttccaaccattttgggcaatttgtccatcatatcacctttctatgccccagtgttcaaacttaaaaatccgagggtgattgtctttataaagaaacttttggtaaaaggtccccaagttgcacaacattttgaaagtcaaatattaagtgcaatggataatttcattgtaagttcacccgaggatgtcatatttatccttttaaatttctttaaaggatcaaagaagcaaatatttctttgtagcactgatggaaatcatctggattcagtggagaaaacttgcaagttctttgaatcaaaattttctttgtggatagagttattagatgatacagccggcactggtaatcgatctagtaaccagttggtttttctaaatggcataaattcaaaggatttacatgcagggaacatgaatggtcttccaatgactacctggagaggtctacttggtgcagcattgtcatcgtaccacaaactactgttggtcaacaccagcagaaattcagaatttagttttttcttatcgcttgccaagagtcacagtacatgcccacaagtactgtctgctgtagctgaatatttggattccctgcaaggagtatcatccatggaagtgacaaaagaatttgatccacaaaatctcttggagctgttctccatctttgctttcaatttgagcagtccaaccaaggatgttcggattttaacattgaggattctatcatattttgtgaagatggatcaacgtctaatcacagatgaggagcgaccacacaagaggcagagaacagaagtttctggagaggaagctgttgctaaatacgctaatgttgtggatattcttttgattattgagtcaatgccaatttcagtatctactagccgtaaaattgctatcttcatttctcggatacaaatgagtttatcttccaagatggttcatgatgattacatacctcctctcttacatggtattattggcatattgtacaatagatttagtgatctatggccacaaacactggattgccttgctgttctcattagaaaacacaaggagcttgtttggggtcagtttgttccgttcattgcaattcaccaatcaaaaggactgactgtgaaaaatcaggagaagctggaagctgcaacccaaccacagtctatttttgactgcttcaacttgtatcttgctatggactttgattgcacaccagctgtgaccgtggctaccttattgcttcaatcgctccaaaggattcctgatgttgctgaatcccgctctcgacaacttataccgctatttctcaactttatgggctatgatgatagcagcatctttagtgctgattcatatatgcctgaaaaatgtaaaggcaaacaatggaaagcgattctaaaagaatggttaaacttattgaggttaatgcacaatgcaagatcgttatatcagggcaattttctccaggaagtactaactaaaagggttcttgatgacagtgatcctgaaatacaagcaaaagcattggattgccttttgaactggaaggatgaattcttgatcccgtacagtcagaaccttaaaaatctgattgatgtaaagactcttcgtgaagagctgaccacatgggcagtttcacatgactccttgtcaattctgaaagaccatagaagtcgtgtggttcctctggttatccgcgtgttggcaccgaaagtaaggaaactgaagctactaggttctcgaaagcacacaggtgccagtcatcgaaaggcaattcttcgtttccttttgcagtttgattcaaatgaacttgagctttttttttctttacttctgaggtccttgatccctggcagcctccagcttaaaatgtttggttctcagccagacaaccttcttggaagtttctctgacattgttggaacttcaacagaaatttgtgtagagaattttacatggaaaaaggcaaatggtttcattcatctggttgaagaaatttttggtacttttgatatgccacatataagcccatttcttaatgttttattaatcattgtcgctcgcttgctggagagttgcatgaggaatcttagaaatgagagtgatgggaaatatccttgcaaccaaacaaatgaccatggtaatggttgttccataaattctgaagtgggcaattctgtgaacgtggatgaatgctttaaagaaatgcatctagaaggccatatggagacaagtgtatccatcaagcagttgaaggatttgaggtcttcatgtattagagttgtctcgtcagcccttagtcactatgaaagccatgagtttggagaaaacttctggggtgtttttttttcttctgtgaaacctctgatagactgctttacacaagaggcttccagtagtgagaaaccaagttcattatttgcttgttttatggctatgagccggagcccaaaattagcaccactgttggggtcaaataatcttgtaccagctattttttctattttgactgtgaagacagcgtcaggatccatcaccacctatgcacttgagttcattgagaatctgttgaggttggatattgatttgcagcagcaagatgaacatttagtgaagaaagttcttcttcaacatatggatgttcttatccatagtctccatgattttgttaatcatcgcaaagagctcaacaggagatctggtacatggcttgggcaacgtgaacttaggctgttcaaattattgctaaattacatcacagatccctcagctgctgataacttcatagaccttattcttccatttttcagcaagaaagatttgaactccgacgattgtttggaagcactatgtgttgtgaggggaataattcaaaatctgagatgcaaagtatctgaaaaagttctaaatgcactgaacccattacttgcaattgttggattggaactgcgactatgtatctgtgatatttatgctgggttgtcattgaatgatccttcgatgttgtttctggctgggttaataggagatctgaatgcagtttcagcttcagaacttggtgaactagattatgacacaagacttaacacctatgataagggctctgcagtcgttcctggacttttccgcctcagttatgaataatgatgtgtccaaatactctattgatgataaatttagagagaataataccagaagcatttgcacgatgggctgtattcagaagatattggaaaaaacttatctgcacaatatgggagtagcaatgactaaagatgtatcaattcaaaaggaatggattattttacttagggagatggtctccaattttaatcatttagcatccttaagctcatttaggcctctctgtaaggtggatatagaagaggattttttccacaacataactcatttacaggctggtaaaagatcaaaagcactgttgctttttagacagggaatcaaggaaaacaacttttcagaggatatcactatgaaagtctttgttccactatttttcaatatgttttctgacgtaaaagctgggaaaggcgaacaagtcagagatatatgtttggatacactatctgctgttgctgccaaagtgcagtgggaacactatagaacaatattgaagagatgcttccgagaattaaaccttagacctgataagcagaagatcatattgaggctgatttgttccatattagatgcattccatttcatgaaacctgcaaatgatgcctcaggaaattctgatgctttgagtgaagatattgattcttcccttacattctctttggtcacagtctcttctgataagcaacagtacatgcaaaaggtagtgtttccacaggttcaaaagttgttaggatcagatccagagaaagtcaacgtcaacataaacctggtagcactgaaaatacttaagttgctaccggtggattattttgagtcccaactttcaagcatcattcatcgaatctgtaacttcctcaagaatcgtcttgaaagcatacgtgatgaagctaggtctgctttagctgcttctgttaaggaactggggattgggtatttgcagtttgtggtcaagatattaagagctatacttaaaagaggttttgagttacatgttctgggctacacacttcattatttgttgtcaaaaaacattactgctgatatgtatggtaggcttgactactgtttagaagatttgttggcagtggttgacagtgatttacttggagatgttgcagaacaaaaggaagttgaaaaacttgcctccaaaatgaaagagacaaagaagagaatgtcgtttgagactcttaagctgattgctcaaagtattacattcaagaccgatttactgaagaagataatctcacctgtttctttacatcttcagaagcaacttactccaaagttgaaaaccagacttgagatgatgctacacaacatagccttagggattgagtgcaactcatctactgaaacatcaaacttgtttatcttcgtatattgtcttattgaggatactattacaggaagcagatctgaatgcaaagagaatacacaatctagtcctgatcaagacagtactgtaagaaagaccttcctgggactaggtgagagtggatcacagaattcttatatacttaccaagtttgcacttgacttacttcgtaatcgtctgaagagcatcaagcttgacaaggaagatgaacaactcgtgaagatgttggatccttttgttgaccttctgcgaaagtgtatgagttcgaaacatgcaagtgtcctctcagccacatttagatgttttgccttgttggtgaaacttccgttgccatctctgagggacaatgcaattactataaaaaatgtacttatggagattttacagagagctggaaactccaatggtcatttagtcacatcttgttttaagctacttgctgatctacttagaggattcaggatttcactttcagataatgagcttcagatgcttgttcatacccctatgtttgtagatcttcagacaaacccttcccctgttgccttatcgcttctcaaaacaatagtcaggctaaaattggtttctcacgaaatttatgatatagttgttaagataggagagttgatggtaacaacattaactgaatctatacagcagcaatgcattcaaattatgctacaattttttctgaactatccactttctgagaagcgcttacagcaacatattgactttttcctggcaaacttaagttatgaacatccttcaggaagagaagcagtgcttgaaatgctccatgacattcttaccagatttccccagaggattattgatgagcagggtcaaaccttttttcttcatcttgtagttgctctagccaatgaacagcatcagaatgtgtcttcaatgatccttagagctattcaaaagctgttaggacgcattggtggtcagggaaagagttacatttatgagtattcactttcgtggtacactggtgagaagaaaagtttgtggagtgcttcagctcaggttattggtttacttgttggcgatcacacattacaaatgggcaagcaccttaaaagtattctggctgttgttaagaaaataatggaatcatctattattgcttctggagctatacaattaggcttatctgatgaagctgccctgccattgtggaaagagacttactactctgttgccatgatggagaggttacttcttcgctttccggagttgtattttgagaaaaacatggaggacatatggataatattatgcaagttgttgatccatcctcattcgatgttgcgtagtatttcaagctctctggtagcatcatattttgctacagtggagaagaggaaacatgaacagaaattggatgccccatcatggttgcttgttcaaccgagcaggctattcataatagctgtttccttgttgaaacaattgaggagtgagctgagtgatactacggcaaataatctgattgtacagaatgttgcatactcagtctgcaacttgcatatgttgattaggcaatcgacctccacacatcagttttggtctagcattagttctgatcgtggtgctttccttgagggttttgaattgcttggttcaagaaaagcaaaaaatatatttctcctttgtacttcaacatctagtgatgtatctggatctagcctcgacaccaacgaagagcctacatctttgttagtttcgtcaatcctaaagaagatgggaagaattgcaatgcaaatgcaggatacacagataaagaacgtgttcaattgcttcaatatgatttcatcagctcttggtcctgatgaatcactaacctatgctgatcacctcttggccccattgtataaagtttctgaaggatttgctgggaaagttgttagtgatgaagtgaagcaactggcccagggggtccagaacaagttacgtgacctgattggttccgagaaatttgttgaagtctacaagagcgttcggatgggcctgaaacagaagcgggacggtagaaagcaggcacagaagattgttgcagccgtggacccagaacgcaatgccaagcgaaagcagcgaatggcagccaagcaccgggaacacaagaggcgaaagataatggcgatgaagattggcaggtggatgagatagcttggtatttaggctctgcggaattcggtgaatcatataattgtagaggataatttttcgtgctacaagtgctggcataaaattatgtttctgttttatatgctgtctcactgacttactgcccgacgtaattttattgttgagttaccgaaccataccgtaagtaaaaattaagaggcataagcaatgaagacatagaattgattgaattatatttttttggggtggatggataagtaacaatatattattaaatgtgcaattaagagttttctggctgaggtttgc

SEQ ID NO: 29156 - DNA, 8204 bp, Zea Mays
cgaaaccctaggccacaagcaaaactctgctcctcgcttaaacccgcgagcctccggacccggatgttgttccggttccgcccggccccctcgtagccatcgcctccttttagcgccgccatcccacctcgccggcggccatggcgaccccgtcttatgcggcggtgaagtgcctcaacacgtcctcgtccagccgcaagcgtttctcgtttaagagcttctcgcagcgggtggaggagatcgacatcgatgtgtaccgcagcctccacacactgaaggcggagccatccagcggatcgtccttcttcctcgacgcaattgtggagtggagggagcttaatactgcagaagacttcatctcattttatgaggagatgataccattggtacaaacacttcctcaaattgtcttgcaccgggacaagctcttttccgcacttctacaaagggtaaacatgagtgcaagattgtccctggagccaatactcatgttgattgcagctttctccagggatattctagaagattttttgccttttttaggaagacatgctagtgcacttttatctcttcttaacgacggaggtgatcgcgaccctgaaatcttggagcaggtcttcacatcctggtcgtatataatgatgtacttgcaaaagtatctagtgaaagatactgtccaaattcttaggatcacagcagcgttgagatatttcccgaaggactatgttagagaatttatggcagaatctgtttcatttttgctgaggaatgcacctaataatcagctaacgcaaggtctactgaaagttctacttgaggctgctaaacaaccatcacctgcacggatagacggggtggtctctttgctgtggcatgtcatgaaaggaacttccacaaagctacactcaaaagctgggcaggtcttgaagttcttgttgagcaagtcaattgtttccactctccgtgataaatttcctgatgataaggtgaagatgattaaacttgttgaggatgttccaaccattttgggcaatttgtccatcatatcacctttctatgccccagtgttcaaacttaaaaatccgagggtgattgtctttataaagaaacttttggtaaaaggtccccaagttgcacaacattttgaaagtcaaatattaagtgcaatggataatttcattgtaagttcacccgaggatgtcatatttatccttttaaatttctttaaaggatcaaagaagcaaatatttctttgtagcactgatggaaatcatctggattcagtggagaaaacttgcaagttctttgaatcaaaattttctttgtggatagagttattagatgatacagccggcactggtaatcgatctagtaaccaggtcagtgagaaggaagctgctatactgtggggatcttttttctgctaccctaacatgaaaggtgtacatcaagatagtttgtcactgctgaggaagttaatcatcaactttgatcggttgcttgaagtgggagaagggaacatgaatggtcttccaatgactacctggagaggtctacttggtgcagcattgtcatcgtaccacaaactactgttggtcaacaccagcagaaattcagaatttagttttttcttatcgcttgccaagagtcacagtacatgcccacaagtactgtctgctgtagctgaatatttggattccctgcaaggagtatcatccatggaagtgacaaaagaatttgatccacaaaatctcttggagctgttctccatctttgctttcaatttgagcagtccaaccaaggatgttcggattttaacattgaggattctatcatattttgtgaagatggatcaacgtctaatcacagatgaggagcgaccacacaagaggcagagaacagaagtttctggagaggaagctgttgctaaatacgctaatgttgtggatattcttttgattattgagtcaatgccaatttcagtatctactagccgtaaaattgctatcttcatttctcggatacaaatgagtttatcttccaagatggttcatgatgattacatacctcctctcttacatggtattattggcatattgtacaatagatttagtgatctatggccacaaacactggattgccttgctgttctcattagaaaacacaaggagcttgtttggggtcagtttgttccgttcattgcaattcaccaatcaaaaggactgactgtgaaaaatcaggagaagctggaagctgcaacccaaccacagtctatttttgactgcttcaacttgtatcttgctatggactttgattgcacaccagctgtgaccgtggctaccttattgcttcaatcgctccaaaggattcctgatgttgctgaatcccgctctcgacaacttataccgctatttctcaactttatgggctatgatgatagcagcatctttagtgctgattcatatatgcctgaaaaatgtaaaggcaaacaatggaaagcgattctaaaagaatggttaaacttattgaggttaatgcacaatgcaagatcgttatatcagggcaattttctccaggaagtactaactaaaagggttcttgatgacagtgatcctgaaatacaagcaaaagcattggattgccttttgaactggaaggatgaattcttgatcccgtacagtcagaaccttaaaaatctgattgatgtaaagactcttcgtgaagagctgaccacatgggcagtttcacatgactccttgtcaattctgaaagaccatagaagtcgtgtggttcctctggttatccgcgtgttggcaccgaaagtaaggaaactgaagctactaggttctcgaaagcacacaggtgccagtcatcgaaaggcaattcttcgtttccttttgcagtttgattcaaatgaacttgagctttttttttctttacttctgaggtccttgatccctggcagcctccagcttaaaatgtttggttctcagccagacaaccttcttggaagtttctctgacattgttggaacttcaacagaaatttgtgtagagaattttacatggaaaaaggcaaatggtttcattcatctggttgaagaaatttttggtacttttgatatgccacatataagcccatttcttaatgttttattaatcattgtcgctcgcttgctggagagttgcatgaggaatcttagaaatgagagtgatgggaaatatccttgcaaccaaacaaatgaccatggtaatggttgttccataaattctgaagtgggcaattctgtgaacgtggatgaatgctttaaagaaatgcatctagaaggccatatggagacaagtgtatccatcaagcagttgaaggatttgaggtcttcatgtattagagttgtctcgtcagcccttagtcactatgaaagccatgagtttggagaaaacttctggggtgtttttttttcttctgtgaaacctctgatagactgctttacacaagaggcttccagtagtgagaaaccaagttcattatttgcttgttttatggctatgagccggagcccaaaattagcaccactgttggggtcaaataatcttgtaccagctattttttctattttgactgtgaagacagcgtcaggatccatcaccacctatgcacttgagttcattgagaatctgttgaggttggatattgatttgcagcagcaagatgaacatttagtgaagaaagttcttcttcaacatatggatgttcttatccatagtctccatgattttgttaatcatcgcaaagagctcaacaggagatctggtacatggcttgggcaacgtgaacttaggctgttcaaattattgctaaattacatcacagatccctcagctgctgataacttcatagaccttattcttccatttttcagcaagaaagatttgaactccgacgattgtttggaagcactatgtgttgtgaggggaataattcaaaatctgagatgcaaagtatctgaaaaagttctaaatgcactgaacccattacttgcaattgttggattggaactgcgactatgtatctgtgatatttatgctgggttgtcattgaatgatccttcgatgttgtttctggctgggttaataggagatctgaatgcagtttcagcttcagaacttggtgaactagattatgacacaagacttaacacctatgataaggttaggccacaattgtttcttggcttgacagaagagcatgtgggcgccatattatctcattgtgtgtatgatatgtcatctgaagaattaattttgcggcaaagtgcatctagggctctgcagtcgttcctggacttttccgcctcagttatgaataatgatgtgtccaaatactctattgatgataaatttagagagaataataccagaagcatttgcacgatgggctgtattcagaagatattggaaaaaacttatctgcacaatatgggagtagcaatgactaaagatgtatcaattcaaaaggaatggattattttacttagggagatggtctccaattttaatcatttagcatccttaagctcatttaggcctctctgtaaggtggatatagaagaggattttttccacaacataactcatttacaggctggtaaaagatcaaaagcactgttgctttttagacagggaatcaaggaaaacaacttttcagaggatatcactatgaaagtctttgttccactatttttcaatatgttttctgacgtaaaagctgggaaaggcgaacaagtcagagatatatgtttggatacactatctgctgttgctgccaaagtgcagtgggaacactatagaacaatattgaagagatgcttccgagaattaaaccttagacctgataagcagaagatcatattgaggctgatttgttccatattagatgcattccatttcatgaaacctgcaaatgatgcctcaggaaattctgatgctttgagtgaagatattgattcttcccttacattctctttggtcacagtctcttctgataagcaacagtacatgcaaaaggtagtgtttccacaggttcaaaagttgttaggatcagatccagagaaagtcaacgtcaacataaacctggtagcactgaaaatacttaagttgctaccggtggattattttgagtcccaactttcaagcatcattcatcgaatctgtaacttcctcaagaatcgtcttgaaagcatacgtgatgaagctaggtctgctttagctgcttctgttaaggaactggggattgggtatttgcagtttgtggtcaagatattaagagctatacttaaaagaggttttgagttacatgttctgggctacacacttcattatttgttgtcaaaaaacattactgctgatatgtatggtaggcttgactactgtttagaagatttgttggcagtggttgacagtgatttacttggagatgttgcagaacaaaaggaagttgaaaaacttgcctccaaaatgaaagagacaaagaagagaatgtcgtttgagactcttaagctgattgctcaaagtattacattcaagaccgatttactgaagaagataatctcacctgtttctttacatcttcagaagcaacttactccaaagttgaaaaccagacttgagatgatgctacacaacatagccttagggattgagtgcaactcatctactgaaacatcaaacttgtttatcttcgtatattgtcttattgaggatactattacaggaagcagatctgaatgcaaagagaatacacaatctagtcctgatcaagacagtactgtaagaaagaccttcctgggactaggtgagagtggatcacagaattcttatatacttaccaagtttgcacttgacttacttcgtaatcgtctgaagagcatcaagcttgacaaggaagatgaacaactcgtgaagatgttggatccttttgttgaccttctgcgaaagtgtatgagttcgaaacatgcaagtgtcctctcagccacatttagatgttttgccttgttggtgaaacttccgttgccatctctgagggacaatgcaattactataaaaaatgtacttatggagattttacagagagctggaaactccaatggtcatttagtcacatcttgttttaagctacttgctgatctacttagaggattcaggatttcactttcagataatgagcttcagatgcttgttcatacccctatgtttgtagatcttcagacaaacccttcccctgttgccttatcgcttctcaaaacaatagtcaggctaaaattggtttctcacgaaatttatgatatagttgttaagataggagagttgatggtaacaacattaactgaatctatacagcagcaatgcattcaaattatgctacaattttttctgaactatccactttctgagaagcgcttacagcaacatattgactttttcctggcaaacttaagttatgaacatccttcaggaagagaagcagtgcttgaaatgctccatgacattcttaccagatttccccagaggattattgatgagcagggtcaaaccttttttcttcatcttgtagttgctctagccaatgaacagcatcagaatgtgtcttcaatgatccttagagctattcaaaagctgttaggacgcattggtggtcagggaaagagttacatttatgagtattcactttcgtggtacactggtgagaagaaaagtttgtggagtgcttcagctcaggttattggtttacttgttggcgatcacacattacaaatgggcaagcaccttaaaagtattctggctgttgttaagaaaataatggaatcatctattattgcttctggagctatacaattaggcttatctgatgaagctgccctgccattgtggaaagagacttactactctgttgccatgatggagaggttacttcttcgctttccggagttgtattttgagaaaaacatggaggacatatggataatattatgcaagttgttgatccatcctcattcgatgttgcgtagtatttcaagctctctggtagcatcatattttgctacagtggagaagaggaaacatgaacagaaattggatgccccatcatggttgcttgttcaaccgagcaggctattcataatagctgtttccttgttgaaacaattgaggagtgagctgagtgatactacggcaaataatctgattgtacagaatgttgcatactcagtctgcaacttgcatatgttgattaggcaatcgacctccacacatcagttttggtctagcattagttctgatcgtggtgctttccttgagggttttgaattgcttggttcaagaaaagcaaaaaatatatttctcctttgtacttcaacatctagtgatgtatctggatctagcctcgacaccaacgaagagcctacatctttgttagtttcgtcaatcctaaagaagatgggaagaattgcaatgcaaatgcaggatacacagataaagaacgtgttcaattgcttcaatatgatttcatcagctcttggtcctgatgaatcactaacctatgctgatcacctcttggccccattgtataaagtttctgaaggatttgctgggaaagttgttagtgatgaagtgaagcaactggcccagggggtccagaacaagttacgtgacctgattggttccgagaaatttgttgaagtctacaagagcgttcggatgggcctgaaacagaagcgggacggtagaaagcaggcacagaagattgttgcagccgtggacccagaacgcaatgccaagcgaaagcagcgaatggcagccaagcaccgggaacacaagaggcgaaagataatggcgatgaagattggcaggtggatgagatagcttggtatttaggctctgcggaattcggtgaatcatataattgtagaggataatttttcgtgctacaagtgctggcataaaattatgtttctgttttatatgctgtctcactgacttactgcccgacgtaattttattgttgagttaccgaaccataccgtaagtaaaaattaagaggcataagcaatgaagacatagaattgattgaattatatttttttggggtggatggataagtaacaatatattattaaatgtgcaattaagagttttctggctgaggtttgc

SEQ ID NO: 29157 - DNA, 8504 bp, Zea Mays
cgaaaccctaggccacaagcaaaactctgctcctcgcttaaacccgcgagcctccggacccggatgttgttccggttccgcccggccccctcgtagccatcgcctccttttagcgccgccatcccacctcgccggcggccatggcgaccccgtcttatgcggcggtgaagtgcctcaacacgtcctcgtccagccgcaagcgtttctcgtttaagagcttctcgcagcgggtggaggagatcgacatcgatgtgtaccgcagcctccacacactgaaggcggagccatccagcggatcgtccttcttcctcgacgcaattgtggagtggagggagcttaatactgcagaagacttcatctcattttatgaggagatgataccattggtacaaacacttcctcaaattgtcttgcaccgggacaagctcttttccgcacttctacaaagggtaaacatgagtgcaagattgtccctggagccaatactcatgttgattgcagctttctccagggatattctagaagattttttgccttttttaggaagacatgctagtgcacttttatctcttcttaacgacggaggtgatcgcgaccctgaaatcttggagcaggtcttcacatcctggtcgtatataatgatgtacttgcaaaagtatctagtgaaagatactgtccaaattcttaggatcacagcagcgttgagatatttcccgaaggactatgttagagaatttatggcagaatctgtttcatttttgctgaggaatgcacctaataatcagctaacgcaaggtctactgaaagttctacttgaggctgctaaacaaccatcacctgcacggatagacggggtggtctctttgctgtggcatgtcatgaaaggaacttccacaaagctacactcaaaagctgggcaggtcttgaagttcttgttgagcaagtcaattgtttccactctccgtgataaatttcctgatgggtcttctactgttcatgccgtcatgacagggctgattcaaagattatgcgatgaagtggatccaaaagaattaccattgatgtatacttgtttatgtgaagaaatcaactgctgtcttgaggatggctgtttggagcatttgaagtgcttgattgtttttcttgcatttgctttacaaaagaagcaaaacaatgcattcgataaggtgaagatgattaaacttgttgagttgctggttagtagatatgtgttccctggtagcaacataacaggatcttcttcaattgaggttcttggaagtattcttgactttatgctttctgttctggatgttccaaccattttgggcaatttgtccatcatatcacctttctatgccccagtgttcaaacttaaaaatccgagggtgattgtctttataaagaaacttttggtaaaaggtccccaagttgcacaacattttgaaagtcaaatattaagtgcaatggataatttcattgtaagttcacccgaggatgtcatatttatccttttaaatttctttaaaggatcaaagaagcaaatatttctttgtagcactgatggaaatcatctggattcagtggagaaaacttgcaagttctttgaatcaaaattttctttgtggatagagttattagatgatacagccggcactggtaatcgatctagtaaccaggtcagtgagaaggaagctgctatactgtggggatcttttttctgctaccctaacatgaaaggtgtacatcaagatagtttgtcactgctgaggaagttaatcatcaactttgatcggttgcttgaagtgggagaagggaacatgaatggtcttccaatgactacctggagaggtctacttggtgcagcattgtcatcgtaccacaaactactgttggtcaacaccagcagaaattcagaatttagttttttcttatcgcttgccaagagtcacagtacatgcccacaagtactgtctgctgtagctgaatatttggattccctgcaaggagtatcatccatggaagtgacaaaagaatttgatccacaaaatctcttggagctgttctccatctttgctttcaatttgagcagtccaaccaaggatgttcggattttaacattgaggattctatcatattttgtgaagatggatcaacgtctaatcacagatgaggagcgaccacacaagaggcagagaacagaagtttctggagaggaagctgttgctaaatacgctaatgttgtggatattcttttgattattgagtcaatgccaatttcagtatctactagccgtaaaattgctatcttcatttctcggatacaaatgagtttatcttccaagatggttcatgatgattacatacctcctctcttacatggtattattggcatattgtacaatagatttagtgatctatggccacaaacactggattgccttgctgttctcattagaaaacacaaggagcttgtttggggtcagtttgttccgttcattgcaattcaccaatcaaaaggactgactgtgaaaaatcaggagaagctggaagctgcaacccaaccacagtctatttttgactgcttcaacttgtatcttgctatggactttgattgcacaccagctgtgaccgtggctaccttattgcttcaatcgctccaaaggattcctgatgttgctgaatcccgctctcgacaacttataccgctatttctcaactttatgggctatgatgatagcagcatctttagtgctgattcatatatgcctgaaaaatgtaaaggcaaacaatggaaagcgattctaaaagaatggttaaacttattgaggttaatgcacaatgcaagatcgttatatcagggcaattttctccaggaagtactaactaaaagggttcttgatgacagtgatcctgaaatacaagcaaaagcattggattgccttttgaactggaaggatgaattcttgatcccgtacagtcagaaccttaaaaatctgattgatgtaaagactcttcgtgaagagctgaccacatgggcagtttcacatgactccttgtcaattctgaaagaccatagaagtcgtgtggttcctctggttatccgcgtgttggcaccgaaagtaaggaaactgaagctactaggttctcgaaagcacacaggtgccagtcatcgaaaggcaattcttcgtttccttttgcagtttgattcaaatgaacttgagctttttttttctttacttctgaggtccttgatccctggcagcctccagcttaaaatgtttggttctcagccagacaaccttcttggaagtttctctgacattgttggaacttcaacagaaatttgtgtagagaattttacatggaaaaaggcaaatggtttcattcatctggttgaagaaatttttggtacttttgatatgccacatataagcccatttcttaatgttttattaatcattgtcgctcgcttgctggagagttgcatgaggaatcttagaaatgagagtgatgggaaatatccttgcaaccaaacaaatgaccatggtaatggttgttccataaattctgaagtgggcaattctgtgaacgtggatgaatgctttaaagaaatgcatctagaaggccatatggagacaagtgtatccatcaagcagttgaaggatttgaggtcttcatgtattagagttgtctcgtcagcccttagtcactatgaaagccatgagtttggagaaaacttctggggtgtttttttttcttctgtgaaacctctgatagactgctttacacaagaggcttccagtagtgagaaaccaagttcattatttgcttgttttatggctatgagccggagcccaaaattagcaccactgttggggtcaaataatcttgtaccagctattttttctattttgactgtgaagacagcgtcaggatccatcaccacctatgcacttgagttcattgagaatctgttgaggttggatattgatttgcagcagcaagatgaacatttagtgaagaaagttcttcttcaacatatggatgttcttatccatagtctccatgattttgttaatcatcgcaaagagctcaacaggagatctggtacatggcttgggcaacgtgaacttaggctgttcaaattattgctaaattacatcacagatccctcagctgctgataacttcatagaccttattcttccatttttcagcaagaaagatttgaactccgacgattgtttggaagcactatgtgttgtgaggggaataattcaaaatctgagatgcaaagtatctgaaaaagttctaaatgcactgaacccattacttgcaattgttggattggaactgcgactatgtatctgtgatatttatgctgggttgtcattgaatgatccttcgatgttgtttctggctgggttaataggagatctgaatgcagtttcagcttcagaacttggtgaactagattatgacacaagacttaacacctatgataaggttaggccacaattgtttcttggcttgacagaagagcatgtgggcgccatattatctcattgtgtgtatgatatgtcatctgaagaattaattttgcggcaaagtgcatctagggctctgcagtcgttcctggacttttccgcctcagttatgaataatgatgtgtccaaatactctattgatgataaatttagagagaataataccagaagcatttgcacgatgggctgtattcagaagatattggaaaaaacttatctgcacaatatgggagtagcaatgactaaagatgtatcaattcaaaaggaatggattattttacttagggagatggtctccaattttaatcatttagcatccttaagctcatttaggcctctctgtaaggtggatatagaagaggattttttccacaacataactcatttacaggctggtaaaagatcaaaagcactgttgctttttagacagggaatcaaggaaaacaacttttcagaggatatcactatgaaagtctttgttccactatttttcaatatgttttctgacgtaaaagctgggaaaggcgaacaagtcagagatatatgtttggatacactatctgctgttgctgccaaagtgcagtgggaacactatagaacaatattgaagagatgcttccgagaattaaaccttagacctgataagcagaagatcatattgaggctgatttgttccatattagatgcattccatttcatgaaacctgcaaatgatgcctcaggaaattctgatgctttgagtgaagatattgattcttcccttacattctctttggtcacagtctcttctgataagcaacagtacatgcaaaaggtagtgtttccacaggttcaaaagttgttaggatcagatccagagaaagtcaacgtcaacataaacctggtagcactgaaaatacttaagttgctaccggtggattattttgagtcccaactttcaagcatcattcatcgaatctgtaacttcctcaagaatcgtcttgaaagcatacgtgatgaagctaggtctgctttagctgcttctgttaaggaactggggattgggtatttgcagtttgtggtcaagatattaagagctatacttaaaagaggttttgagttacatgttctgggctacacacttcattatttgttgtcaaaaaacattactgctgatatgtatggtaggcttgactactgtttagaagatttgttggcagtggttgacagtgatttacttggagatgttgcagaacaaaaggaagttgaaaaacttgcctccaaaatgaaagagacaaagaagagaatgtcgtttgagactcttaagctgattgctcaaagtattacattcaagaccgatttactgaagaagataatctcacctgtttctttacatcttcagaagcaacttactccaaagttgaaaaccagacttgagatgatgctacacaacatagccttagggattgagtgcaactcatctactgaaacatcaaacttgtttatcttcgtatattgtcttattgaggatactattacaggaagcagatctgaatgcaaagagaatacacaatctagtcctgatcaagacagtactgtaagaaagaccttcctgggactaggtgagagtggatcacagaattcttatatacttaccaagtttgcacttgacttacttcgtaatcgtctgaagagcatcaagcttgacaaggaagatgaacaactcgtgaagatgttggatccttttgttgaccttctgcgaaagtgtatgagttcgaaacatgcaagtgtcctctcagccacatttagatgttttgccttgttggtgaaacttccgttgccatctctgagggacaatgcaattactataaaaaatgtacttatggagattttacagagagctggaaactccaatggtcatttagtcacatcttgttttaagctacttgctgatctacttagaggattcaggatttcactttcagataatgagcttcagatgcttgttcatacccctatgtttgtagatcttcagacaaacccttcccctgttgccttatcgcttctcaaaacaatagtcaggctaaaattggtttctcacgaaatttatgatatagttgttaagataggagagttgatggtaacaacattaactgaatctatacagcagcaatgcattcaaattatgctacaattttttctgaactatccactttctgagaagcgcttacagcaacatattgactttttcctggcaaacttaagttatgaacatccttcaggaagagaagcagtgcttgaaatgctccatgacattcttaccagatttccccagaggattattgatgagcagggtcaaaccttttttcttcatcttgtagttgctctagccaatgaacagcatcagaatgtgtcttcaatgatccttagagctattcaaaagctgttaggacgcattggtggtcagggaaagagttacatttatgagtattcactttcgtggtacactggtgagaagaaaagtttgtggagtgcttcagctcaggttattggtttacttgttggcgatcacacattacaaatgggcaagcaccttaaaagtattctggctgttgttaagaaaataatggaatcatctattattgcttctggagctatacaattaggcttatctgatgaagctgccctgccattgtggaaagagacttactactctgttgccatgatggagaggttacttcttcgctttccggagttgtattttgagaaaaacatggaggacatatggataatattatgcaagttgttgatccatcctcattcgatgttgcgtagtatttcaagctctctggtagcatcatattttgctacagtggagaagaggaaacatgaacagaaattggatgccccatcatggttgcttgttcaaccgagcaggctattcataatagctgtttccttgttgaaacaattgaggagtgagctgagtgatactacggcaaataatctgattgtacagaatgttgcatactcagtctgcaacttgcatatgttgattaggcaatcgacctccacacatcagttttggtctagcattagttctgatcgtggtgctttccttgagggttttgaattgcttggttcaagaaaagcaaaaaatatatttctcctttgtacttcaacatctagtgatgtatctggatctagcctcgacaccaacgaagagcctacatctttgttagtttcgtcaatcctaaagaagatgggaagaattgcaatgcaaatgcaggatacacagataaagaacgtgttcaattgcttcaatatgatttcatcagctcttggtcctgatgaatcactaacctatgctgatcacctcttggccccattgtataaagtttctgaaggatttgctgggaaagttgttagtgatgaagtgaagcaactggcccagggggtccagaacaagttacgtgacctgattggttccgagaaatttgttgaagtctacaagagcgttcggatgggcctgaaacagaagcgggacggtagaaagcaggcacagaagattgttgcagccgtggacccagaacgcaatgccaagcgaaagcagcgaatggcagccaagcaccgggaacacaagaggcgaaagataatggcgatgaagattggcaggtggatgagatagcttggtatttaggctctgcggaattcggtgaatcatataattgtagaggataatttttcgtgctacaagtgctggcataaaattatgtttctgttttatatgctgtctcactgacttactgcccgacgtaattttattgttgagttaccgaaccataccgtaagtaaaaattaagaggcataagcaatgaagacatagaattgattgaattatatttttttggggtggatggataagtaacaatatattattaaatgtgcaattaagagttttctggctgaggtttgc

SEQ ID NO: 29158 - DNA, 8197 bp, Zea Mays
caaaactctgctcctcgcttaaacccgcgagcctccggacccggatgttgttccggttccgcccggccccctcgtagccatcgcctccttttagcgccgccatcccacctcgccggcggccatggcgaccccgtcttatgcggcggtgaagtgcctcaacacgtcctcgtccagccgcaagcgtttctcgtttaagagcttctcgcagcgggtggaggagatcgacatcgatgtgtaccgcagcctccacacactgaaggcggagccatccagcggatcgtccttcttcctcgacgcaattgtggagtggagggagcttaatactgcagaagacttcatctcattttatgaggagatgataccattggtacaaacacttcctcaaattgtcttgcaccgggacaagctcttttccgcacttctacaaagggtaaacatgagtgcaagattgtccctggagccaatactcatgttgattgcagctttctccagggatattctagaagattttttgccttttttaggaagacatgctagtgcacttttatctcttcttaacgacggaggtgatcgcgaccctgaaatcttggagcaggtcttcacatcctggtcgtatataatgatgtacttgcaaaagtatctagtgaaagatactgtccaaattcttaggatcacagcagcgttgagatatttcccgaaggactatgttagagaatttatggcagaatctgtttcatttttgctgaggaatgcacctaataatcagctaacgcaaggtctactgaaagttctacttgaggctgctaaacaaccatcacctgcacggatagacggggtggtctctttgctgtggcatgtcatgaaaggaacttccacaaagctacactcaaaagctgggcaggtcttgaagttcttgttgagcaagtcaattgtttccactctccgtgataaatttcctgatgggtcttctactgttcatgccgtcatgacagggctgattcaaagattatgcgatgaagtggatccaaaagaattaccattgatgtatacttgtttatgtgaagaaatcaactgctgtcttgaggatggctgtttggagcatttgaagtgcttgattgtttttcttgcatttgctttacaaaagaagcaaaacaatgcattcgataaggtgaagatgattaaacttgttgagttgctggttagtagatatgtgttccctggtagcaacataacaggatcttcttcaattgaggttcttggaagtattcttgactttatgctttctgttctggatgttccaaccattttgggcaatttgtccatcatatcacctttctatgccccagtgttcaaacttaaaaatccgagggtgattgtctttataaagaaacttttggtaaaaggtccccaagttgcacaacattttgaaagtcaaatattaagtgcaatggataatttcattgtaagttcacccgaggatgtcatatttatccttttaaatttctttaaaggatcaaagaagcaaatatttctttgtagcactgatggaaatcatctggattcagtggagaaaacttgcaagttctttgaatcaaaattttctttgtggatagagttattagatgatacagccggcactggtaatcgatctagtaaccaggtcagtgagaaggaagctgctatactgtggggatcttttttctgctaccctaacatgaaaggtgtacatcaagatagtttgtcactgctgaggaagttaatcatcaactttgatcggttgcttgaagtgggagaagggaacatgaatggtcttccaatgactacctggagaggtctacttggtgcagcattgtcatcgtaccacaaactactgttggtcaacaccagcagaaattcagaatttagttttttcttatcgcttgccaagagtcacagtacatgcccacaagtactgtctgctgtagctgaatatttggattccctgcaaggagtatcatccatggaagtgacaaaagaatttgatccacaaaatctcttggagctgttctccatctttgctttcaatttgagcagtccaaccaaggatgttcggattttaacattgaggattctatcatattttgtgaagatggatcaacgtctaatcacagatgaggagcgaccacacaagaggcagagaacagaagtttctggagaggaagctgttgctaaatacgctaatgttgtggatattcttttgattattgagtcaatgccaatttcagtatctactagccgtaaaattgctatcttcatttctcggatacaaatgagtttatcttccaagatggttcatgatgattacatacctcctctcttacatggtattattggcatattgtacaatagatttagtgatctatggccacaaacactggattgccttgctgttctcattagaaaacacaaggagcttgtttggggtcagtttgttccgttcattgcaattcaccaatcaaaaggactgactgtgaaaaatcaggagaagctggaagctgcaacccaaccacagtctatttttgactgcttcaacttgtatcttgctatggactttgattgcacaccagctgtgaccgtggctaccttattgcttcaatcgctccaaaggattcctgatgttgctgaatcccgctctcgacaacttataccgctatttctcaactttatgggctatgatgatagcagcatctttagtgctgattcatatatgcctgaaaaatgtaaaggcaaacaatggaaagcgattctaaaagaatggttaaacttattgaggttaatgcacaatgcaagatcgttatatcagggcaattttctccaggaagtactaactaaaagggttcttgatgacagtgatcctgaaatacaagcaaaagcattggattgccttttgaactggaaggatgaattcttgatcccgtacagtcagaaccttaaaaatctgattgatgtaaagactcttcgtgaagagctgaccacatgggcagtttcacatgactccttgtcaattctgaaagaccatagaagtcgtgtggttcctctggttatccgcgtgttggcaccgaaagtaaggaaactgaagctactaggttctcgaaagcacacaggtgccagtcatcgaaaggcaattcttcgtttccttttgcagtttgattcaaatgaacttgagctttttttttctttacttctgaggtccttgatccctggcagcctccagcttaaaatgtttggttctcagccagacaaccttcttggaagtttctctgacattgttggaacttcaacagaaatttgtgtagagaattttacatggaaaaaggcaaatggtttcattcatctggttgaagaaatttttggtacttttgatatgccacatataagcccatttcttaatgttttattaatcattgtcgctcgcttgctggagagttgcatgaggaatcttagaaatgagagtgatgggaaatatccttgcaaccaaacaaatgaccatggtaatggttgttccataaattctgaagtgggcaattctgtgaacgtggatgaatgctttaaagaaatgcatctagaaggccatatggagacagcgtcaggatccatcaccacctatgcacttgagttcattgagaatctgttgaggttggatattgatttgcagcagcaagatgaacatttagtgaagaaagttcttcttcaacatatggatgttcttatccatagtctccatgattttgttaatcatcgcaaagagctcaacaggagatctggtacatggcttgggcaacgtgaacttaggctgttcaaattattgctaaattacatcacagatccctcagctgctgataacttcatagaccttattcttccatttttcagcaagaaagatttgaactccgacgattgtttggaagcactatgtgttgtgaggggaataattcaaaatctgagatgcaaagtatctgaaaaagttctaaatgcactgaacccattacttgcaattgttggattggaactgcgactatgtatctgtgatatttatgctgggttgtcattgaatgatccttcgatgttgtttctggctgggttaataggagatctgaatgcagtttcagcttcagaacttggtgaactagattatgacacaagacttaacacctatgataaggttaggccacaattgtttcttggcttgacagaagagcatgtgggcgccatattatctcattgtgtgtatgatatgtcatctgaagaattaattttgcggcaaagtgcatctagggctctgcagtcgttcctggacttttccgcctcagttatgaataatgatgtgtccaaatactctattgatgataaatttagagagaataataccagaagcatttgcacgatgggctgtattcagaagatattggaaaaaacttatctgcacaatatgggagtagcaatgactaaagatgtatcaattcaaaaggaatggattattttacttagggagatggtctccaattttaatcatttagcatccttaagctcatttaggcctctctgtaaggtggatatagaagaggattttttccacaacataactcatttacaggctggtaaaagatcaaaagcactgttgctttttagacagggaatcaaggaaaacaacttttcagaggatatcactatgaaagtctttgttccactatttttcaatatgttttctgacgtaaaagctgggaaaggcgaacaagtcagagatatatgtttggatacactatctgctgttgctgccaaagtgcagtgggaacactatagaacaatattgaagagatgcttccgagaattaaaccttagacctgataagcagaagatcatattgaggctgatttgttccatattagatgcattccatttcatgaaacctgcaaatgatgcctcaggaaattctgatgctttgagtgaagatattgattcttcccttacattctctttggtcacagtctcttctgataagcaacagtacatgcaaaaggtagtgtttccacaggttcaaaagttgttaggatcagatccagagaaagtcaacgtcaacataaacctggtagcactgaaaatacttaagttgctaccggtggattattttgagtcccaactttcaagcatcattcatcgaatctgtaacttcctcaagaatcgtcttgaaagcatacgtgatgaagctaggtctgctttagctgcttctgttaaggaactggggattgggtatttgcagtttgtggtcaagatattaagagctatacttaaaagaggttttgagttacatgttctgggctacacacttcattatttgttgtcaaaaaacattactgctgatatgtatggtaggcttgactactgtttagaagatttgttggcagtggttgacagtgatttacttggagatgttgcagaacaaaaggaagttgaaaaacttgcctccaaaatgaaagagacaaagaagagaatgtcgtttgagactcttaagctgattgctcaaagtattacattcaagaccgatttactgaagaagataatctcacctgtttctttacatcttcagaagcaacttactccaaagttgaaaaccagacttgagatgatgctacacaacatagccttagggattgagtgcaactcatctactgaaacatcaaacttgtttatcttcgtatattgtcttattgaggatactattacaggaagcagatctgaatgcaaagagaatacacaatctagtcctgatcaagacagtactgtaagaaagaccttcctgggactaggtgagagtggatcacagaattcttatatacttaccaagtttgcacttgacttacttcgtaatcgtctgaagagcatcaagcttgacaaggaagatgaacaactcgtgaagatgttggatccttttgttgaccttctgcgaaagtgtatgagttcgaaacatgcaagtgtcctctcagccacatttagatgttttgccttgttggtgaaacttccgttgccatctctgagggacaatgcaattactataaaaaatgtacttatggagattttacagagagctggaaactccaatggtcatttagtcacatcttgttttaagctacttgctgatctacttagaggattcaggatttcactttcagataatgagcttcagatgcttgttcatacccctatgtttgtagatcttcagacaaacccttcccctgttgccttatcgcttctcaaaacaatagtcaggctaaaattggtttctcacgaaatttatgatatagttgttaagataggagagttgatggtaacaacattaactgaatctatacagcagcaatgcattcaaattatgctacaattttttctgaactatccactttctgagaagcgcttacagcaacatattgactttttcctggcaaacttaagttatgaacatccttcaggaagagaagcagtgcttgaaatgctccatgacattcttaccagatttccccagaggattattgatgagcagggtcaaaccttttttcttcatcttgtagttgctctagccaatgaacagcatcagaatgtgtcttcaatgatccttagagctattcaaaagctgttaggacgcattggtggtcagggaaagagttacatttatgagtattcactttcgtggtacactggtgagaagaaaagtttgtggagtgcttcagctcaggttattggtttacttgttggcgatcacacattacaaatgggcaagcaccttaaaagtattctggctgttgttaagaaaataatggaatcatctattattgcttctggagctatacaattaggcttatctgatgaagctgccctgccattgtggaaagagacttactactctgttgccatgatggagaggttacttcttcgctttccggagttgtattttgagaaaaacatggaggacatatggataatattatgcaagttgttgatccatcctcattcgatgttgcgtagtatttcaagctctctggtagcatcatattttgctacagtggagaagaggaaacatgaacagaaattggatgccccatcatggttgcttgttcaaccgagcaggctattcataatagctgtttccttgttgaaacaattgaggagtgagctgagtgatactacggcaaataatctgattgtacagaatgttgcatactcagtctgcaacttgcatatgttgattaggcaatcgacctccacacatcagttttggtctagcattagttctgatcgtggtgctttccttgagggttttgaattgcttggttcaagaaaagcaaaaaatatatttctcctttgtacttcaacatctagtgatgtatctggatctagcctcgacaccaacgaagagcctacatctttgttagtttcgtcaatcctaaagaagatgggaagaattgcaatgcaaatgcaggatacacagataaagaacgtgttcaattgcttcaatatgatttcatcagctcttggtcctgatgaatcactaacctatgctgatcacctcttggccccattgtataaagtttctgaaggatttgctgggaaagttgttagtgatgaagtgaagcaactggcccagggggtccagaacaagttacgtgacctgattggttccgagaaatttgttgaagtctacaagagcgttcggatgggcctgaaacagaagcgggacggtagaaagcaggcacagaagattgttgcagccgtggacccagaacgcaatgccaagcgaaagcagcgaatggcagccaagcaccgggaacacaagaggcgaaagataatggcgatgaagattggcaggtggatgagatagcttggtatttaggctctgcggaattcggtgaatcatataattgtagaggataatttttcgtgctacaagtgctggcataaaattatgtttctgttttatatgctgtctcactgacttactgcccgacgtaattttattgttgagttaccgaaccataccgtaagtaaaaattaagaggcataagcaatgaagacatagaattgattgaattatatttttttggggtggatggataagtaacaatatattattaaatgtgcaattaagagttttctggctgaggtttgc

SEQ ID NO: 29159 - DNA, 8498 bp, Zea Mays
caaaactctgctcctcgcttaaacccgcgagcctccggacccggatgttgttccggttccgcccggccccctcgtagccatcgcctccttttagcgccgccatcccacctcgccggcggccatggcgaccccgtcttatgcggcggtgaagtgcctcaacacgtcctcgtccagccgcaagcgtttctcgtttaagagcttctcgcagcgggtggaggagatcgacatcgatgtgtaccgcagcctccacacactgaaggcggagccatccagcggatcgtccttcttcctcgacgcaattgtggagtggagggagcttaatactgcagaagacttcatctcattttatgaggagatgataccattggtacaaacacttcctcaaattgtcttgcaccgggacaagctcttttccgcacttctacaaagggtaaacatgagtgcaagattgtccctggagccaatactcatgttgattgcagctttctccagggatattctagaagattttttgccgaagacatgctagtgcacttttatctcttcttaacgacggaggtgatcgcgaccctgaaatcttggagcaggtcttcacatcctggtcgtatataatgatgtacttgcaaaagtatctagtgaaagatactgtccaaattcttaggatcacagcagcgttgagatatttcccgaaggactatgttagagaatttatggcagaatctgtttcatttttgctgaggaatgcacctaataatcagctaacgcaaggtctactgaaagttctacttgaggctgctaaacaaccatcacctgcacggatagacggggtggtctctttgctgtggcatgtcatgaaaggaacttccacaaagctacactcaaaagctgggcaggtcttgaagttcttgttgagcaagtcaattgtttccactctccgtgataaatttcctgatgggtcttctactgttcatgccgtcatgacagggctgattcaaagattatgcgatgaagtggatccaaaagaattaccattgatgtatacttgtttatgtgaagaaatcaactgctgtcttgaggatggctgtttggagcatttgaagtgcttgattgtttttcttgcatttgctttacaaaagaagcaaaacaatgcattcgataaggtgaagatgattaaacttgttgagttgctggttagtagatatgtgttccctggtagcaacataacaggatcttcttcaattgaggttcttggaagtattcttgactttatgctttctgttctggatgttccaaccattttgggcaatttgtccatcatatcacctttctatgccccagtgttcaaacttaaaaatccgagggtgattgtctttataaagaaacttttggtaaaaggtccccaagttgcacaacattttgaaagtcaaatattaagtgcaatggataatttcattgtaagttcacccgaggatgtcatatttatccttttaaatttctttaaaggatcaaagaagcaaatatttctttgtagcactgatggaaatcatctggattcagtggagaaaacttgcaagttctttgaatcaaaattttctttgtggatagagttattagatgatacagccggcactggtaatcgatctagtaaccaggtcagtgagaaggaagctgctatactgtggggatcttttttctgctaccctaacatgaaaggtgtacatcaagatagtttgtcactgctgaggaagttaatcatcaactttgatcggttgcttgaagtgggagaagggaacatgaatggtcttccaatgactacctggagaggtctacttggtgcagcattgtcatcgtaccacaaactactgttggtcaacaccagcagaaattcagaatttagttttttcttatcgcttgccaagagtcacagtacatgcccacaagtactgtctgctgtagctgaatatttggattccctgcaaggagtatcatccatggaagtgacaaaagaatttgatccacaaaatctcttggagctgttctccatctttgctttcaatttgagcagtccaaccaaggatgttcggattttaacattgaggattctatcatattttgtgaagatggatcaacgtctaatcacagatgaggagcgaccacacaagaggcagagaacagaagtttctggagaggaagctgttgctaaatacgctaatgttgtggatattcttttgattattgagtcaatgccaatttcagtatctactagccgtaaaattgctatcttcatttctcggatacaaatgagtttatcttccaagatggttcatgatgattacatacctcctctcttacatggtattattggcatattgtacaatagatttagtgatctatggccacaaacactggattgccttgctgttctcattagaaaacacaaggagcttgtttggggtcagtttgttccgttcattgcaattcaccaatcaaaaggactgactgtgaaaaatcaggagaagctggaagctgcaacccaaccacagtctatttttgactgcttcaacttgtatcttgctatggactttgattgcacaccagctgtgaccgtggctaccttattgcttcaatcgctccaaaggattcctgatgttgctgaatcccgctctcgacaacttataccgctatttctcaactttatgggctatgatgatagcagcatctttagtgctgattcatatatgcctgaaaaatgtaaaggcaaacaatggaaagcgattctaaaagaatggttaaacttattgaggttaatgcacaatgcaagatcgttatatcagggcaattttctccaggaagtactaactaaaagggttcttgatgacagtgatcctgaaatacaagcaaaagcattggattgccttttgaactggaaggatgaattcttgatcccgtacagtcagaaccttaaaaatctgattgatgtaaagactcttcgtgaagagctgaccacatgggcagtttcacatgactccttgtcaattctgaaagaccatagaagtcgtgtggttcctctggttatccgcgtgttggcaccgaaagtaaggaaactgaagctactaggttctcgaaagcacacaggtgccagtcatcgaaaggcaattcttcgtttccttttgcagtttgattcaaatgaacttgagctttttttttctttacttctgaggtccttgatccctggcagcctccagcttaaaatgtttggttctcagccagacaaccttcttggaagtttctctgacattgttggaacttcaacagaaatttgtgtagagaattttacatggaaaaaggcaaatggtttcattcatctggttgaagaaatttttggtacttttgatatgccacatataagcccatttcttaatgttttattaatcattgtcgctcgcttgctggagagttgcatgaggaatcttagaaatgagagtgatgggaaatatccttgcaaccaaacaaatgaccatggtaatggttgttccataaattctgaagtgggcaattctgtgaacgtggatgaatgctttaaagaaatgcatctagaaggccatatggagcaacctcactctatcacgcagacaagtgtatccatcaagcagttgaaggatttgaggtcttcatgtattagagttgtctcgtcagcccttagtcactatgaaagccatgagtttggagaaaacttctggggtgtttttttttcttctgtgaaacctctgatagactgctttacacaagaggcttccagtagtgagaaaccaagttcattatttgcttgttttatggctatgagccggagcccaaaattagcaccactgttggggtcaaataatcttgtaccagctattttttctattttgactgtgaagacagcgtcaggatccatcaccacctatgcacttgagttcattgagaatctgttgaggttggatattgatttgcagcagcaagatgaacatttagtgaagaaagttcttcttcaacatatggatgttcttatccatagtctccatgattttgttaatcatcgcaaagagctcaacaggagatctggtacatggcttgggcaacgtgaacttaggctgttcaaattattgctaaattacatcacagatccctcagctgctgataacttcatagaccttattcttccatttttcagcaagaaagatttgaactccgacgattgtttggaagcactatgtgttgtgaggggaataattcaaaatctgagatgcaaagtatctgaaaaagttctaaatgcactgaacccattacttgcaattgttggattggaactgcgactatgtatctgtgatatttatgctgggttgtcattgaatgatccttcgatgttgtttctggctgggttaataggagatctgaatgcagtttcagcttcagaacttggtgaactagattatgacacaagacttaacacctatgataaggttaggccacaattgtttcttggcttgacagaagagcatgtgggcgccatattatctcattgtgtgtatgatatgtcatctgaagaattaattttgcggcaaagtgcatctagggctctgcagtcgttcctggacttttccgcctcagttatgaataatgatgtgtccaaatactctattgatgataaatttagagagaataataccagaagcatttgcacgatgggctgtattcagaagatattggaaaaaacttatctgcacaatatgggagtagcaatgactaaagatgtatcaattcaaaaggaatggattattttacttagggagatggtctccaattttaatcatttagcatccttaagctcatttaggcctctctgtaaggtggatatagaagaggattttttccacaacataactcatttacaggctggtaaaagatcaaaagcactgttgctttttagacagggaatcaaggaaaacaacttttcagaggatatcactatgaaagtctttgttccactatttttcaatatgttttctgacgtaaaagctgggaaaggcgaacaagtcagagatatatgtttggatacactatctgctgttgctgccaaagtgcagtgggaacactatagaacaatattgaagagatgcttccgagaattaaaccttagacctgataagcagaagatcatattgaggctgatttgttccatattagatgcattccatttcatgaaacctgcaaatgatgcctcaggaaattctgatgctttgagtgaagatattgattcttcccttacattctctttggtcacagtctcttctgataagcaacagtacatgcaaaaggtagtgtttccacaggttcaaaagttgttaggatcagatccagagaaagtcaacgtcaacataaacctggtagcactgaaaatacttaagttgctaccggtggattattttgagtcccaactttcaagcatcattcatcgaatctgtaacttcctcaagaatcgtcttgaaagcatacgtgatgaagctaggtctgctttagctgcttctgttaaggaactggggattgggtatttgcagtttgtggtcaagatattaagagctatacttaaaagaggttttgagttacatgttctgggctacacacttcattatttgttgtcaaaaaacattactgctgatatgtatggtaggcttgactactgtttagaagatttgttggcagtggttgacagtgatttacttggagatgttgcagaacaaaaggaagttgaaaaacttgcctccaaaatgaaagagacaaagaagagaatgtcgtttgagactcttaagctgattgctcaaagtattacattcaagaccgatttactgaagaagataatctcacctgtttctttacatcttcagaagcaacttactccaaagttgaaaaccagacttgagatgatgctacacaacatagccttagggattgagtgcaactcatctactgaaacatcaaacttgtttatcttcgtatattgtcttattgaggatactattacaggaagcagatctgaatgcaaagagaatacacaatctagtcctgatcaagacagtactgtaagaaagaccttcctgggactaggtgagagtggatcacagaattcttatatacttaccaagtttgcacttgacttacttcgtaatcgtctgaagagcatcaagcttgacaaggaagatgaacaactcgtgaagatgttggatccttttgttgaccttctgcgaaagtgtatgagttcgaaacatgcaagtgtcctctcagccacatttagatgttttgccttgttggtgaaacttccgttgccatctctgagggacaatgcaattactataaaaaatgtacttatggagattttacagagagctggaaactccaatggtcatttagtcacatcttgttttaagctacttgctgatctacttagaggattcaggatttcactttcagataatgagcttcagatgcttgttcatacccctatgtttgtagatcttcagacaaacccttcccctgttgccttatcgcttctcaaaacaatagtcaggctaaaattggtttctcacgaaatttatgatatagttgttaagataggagagttgatggtaacaacattaactgaatctatacagcagcaatgcattcaaattatgctacaattttttctgaactatccactttctgagaagcgcttacagcaacatattgactttttcctggcaaacttaagttatgaacatccttcaggaagagaagcagtgcttgaaatgctccatgacattcttaccagatttccccagaggattattgatgagcagggtcaaaccttttttcttcatcttgtagttgctctagccaatgaacagcatcagaatgtgtcttcaatgatccttagagctattcaaaagctgttaggacgcattggtggtcagggaaagagttacatttatgagtattcactttcgtggtacactggtgagaagaaaagtttgtggagtgcttcagctcaggttattggtttacttgttggcgatcacacattacaaatgggcaagcaccttaaaagtattctggctgttgttaagaaaataatggaatcatctattattgcttctggagctatacaattaggcttatctgatgaagctgccctgccattgtggaaagagacttactactctgttgccatgatggagaggttacttcttcgctttccggagttgtattttgagaaaaacatggaggacatatggataatattatgcaagttgttgatccatcctcattcgatgttgcgtagtatttcaagctctctggtagcatcatattttgctacagtggagaagaggaaacatgaacagaaattggatgccccatcatggttgcttgttcaaccgagcaggctattcataatagctgtttccttgttgaaacaattgaggagtgagctgagtgatactacggcaaataatctgattgtacagaatgttgcatactcagtctgcaacttgcatatgttgattaggcaatcgacctccacacatcagttttggtctagcattagttctgatcgtggtgctttccttgagggttttgaattgcttggttcaagaaaagcaaaaaatatatttctcctttgtacttcaacatctagtgatgtatctggatctagcctcgacaccaacgaagagcctacatctttgttagtttcgtcaatcctaaagaagatgggaagaattgcaatgcaaatgcaggatacacagataaagaacgtgttcaattgcttcaatatgatttcatcagctcttggtcctgatgaatcactaacctatgctgatcacctcttggccccattgtataaagtttctgaaggatttgctgggaaagttgttagtgatgaagtgaagcaactggcccagggggtccagaacaagttacgtgacctgattggttccgagaaatttgttgaagtctacaagagcgttcggatgggcctgaaacagaagcgggacggtagaaagcaggcacagaagattgttgcagccgtggacccagaacgcaatgccaagcgaaagcagcgaatggcagccaagcaccgggaacacaagaggcgaaagataatggcgatgaagattggcaggtggatgagatagcttggtatttaggctctgcggaattcggtgaatcatataattgtagaggataatttttcgtgctacaagtgctggcataaaattatgtttctgttttatatgctgtctcactgacttactgcccgacgtaattttattgttgagttaccgaaccataccgtaagtaaaaattaagaggcataagcaatgaagacatagaattgattgaattatatttttttggggtggatggataagtaacaatatattattaaatgtgcaattaagagttttctggctgaggtttgc

SEQ ID NO: 29160 - DNA, 8413 bp, Zea Mays
caaaactctgctcctcgcttaaacccgcgagcctccggacccggatgttgttccggttccgcccggccccctcgtagccatcgcctccttttagcgccgccatcccacctcgccggcggccatggcgaccccgtcttatgcggcggtgaagtgcctcaacacgtcctcgtccagccgcaagcgtttctcgtttaagagcttctcgcagcgggtggaggagatcgacatcgatgtgtaccgcagcctccacacactgaaggcggagccatccagcggatcgtccttcttcctcgacgcaattgtggagtggagggagcttaatactgcagaagacttcatctcattttatgaggagatgataccattggtacaaacacttcctcaaattgtcttgcaccgggacaagctcttttccgcacttctacaaagggtaaacatgagtgcaagattgtccctggagccaatactcatgttgattgcagctttctccagggatattctagaagattttttgccttttttaggaagacatgctagtgcacttttatctcttcttaacgacggaggtgatcgcgaccctgaaatcttggagcaggtcttcacatcctggtcgtatataatgatgtacttgcaaaagtatctagtgaaagatactgtccaaattcttaggatcacagcagcgttgagatatttcccgaaggactatgttagagaatttatggcagaatctgtttcatttttgctgaggaatgcacctaataatcagctaacgcaaggtctactgaaagttctacttgaggctgctaaacaaccatcacctgcacggatagacggggtggtctctttgctgtggcatgtcatgaaaggaacttccacaaagctacactcaaaagctgggcaggtcttgaagttcttgttgagcaagtcaattgtttccactctccgtgataaatttcctgatgggtcttctactgttcatgccgtcatgacagggctgattcaaagattatgcgatgaagtggatccaaaagaattaccattgatgtatacttgtttatgtgaagaaatcaactgctgtcttgaggatggctgtttggagcatttgaagtgcttgattgtttttcttgcatttgctttacaaaagaagcaaaacaatgcattcgataaggtgaagatgattaaacttgttgagttgctggttagtagatatgtgttccctggtagcaacataacaggatcttcttcaattgaggttcttggaagtattcttgactttatgctttctgttctggatgttccaaccattttgggcaatttgtccatcatatcacctttctatgccccagtgttcaaacttaaaaatccgagggtgattgtctttataaagaaacttttggtaaaaggtccccaagttgcacaacattttgaaagtcaaatattaagtgcaatggataatttcattgtaagttcacccgaggatgtcatatttatccttttaaatttctttaaaggatcaaagaagcaaatatttctttgtagcactgatggaaatcatctggattcagtggagaaaacttgcaagttctttgaatcaaaattttctttgtggatagagttattagatgatacagccggcactggtaatcgatctagtaaccagttggtttttctaaatggcataaattcaaaggatttacatgcagggaacatgaatggtcttccaatgactacctggagaggtctacttggtgcagcattgtcatcgtaccacaaactactgttggtcaacaccagcagaaattcagaatttagttttttcttatcgcttgccaagagtcacagtacatgcccacaagtactgtctgctgtagctgaatatttggattccctgcaaggagtatcatccatggaagtgacaaaagaatttgatccacaaaatctcttggagctgttctccatctttgctttcaatttgagcagtccaaccaaggatgttcggattttaacattgaggattctatcatattttgtgaagatggatcaacgtctaatcacagatgaggagcgaccacacaagaggcagagaacagaagtttctggagaggaagctgttgctaaatacgctaatgttgtggatattcttttgattattgagtcaatgccaatttcagtatctactagccgtaaaattgctatcttcatttctcggatacaaatgagtttatcttccaagatggttcatgatgattacatacctcctctcttacatggtattattggcatattgtacaatagatttagtgatctatggccacaaacactggattgccttgctgttctcattagaaaacacaaggagcttgtttggggtcagtttgttccgttcattgcaattcaccaatcaaaaggactgactgtgaaaaatcaggagaagctggaagctgcaacccaaccacagtctatttttgactgcttcaacttgtatcttgctatggactttgattgcacaccagctgtgaccgtggctaccttattgcttcaatcgctccaaaggattcctgatgttgctgaatcccgctctcgacaacttataccgctatttctcaactttatgggctatgatgatagcagcatctttagtgctgattcatatatgcctgaaaaatgtaaaggcaaacaatggaaagcgattctaaaagaatggttaaacttattgaggttaatgcacaatgcaagatcgttatatcagggcaattttctccaggaagtactaactaaaagggttcttgatgacagtgatcctgaaatacaagcaaaagcattggattgccttttgaactggaaggatgaattcttgatcccgtacagtcagaaccttaaaaatctgattgatgtaaagactcttcgtgaagagctgaccacatgggcagtttcacatgactccttgtcaattctgaaagaccatagaagtcgtgtggttcctctggttatccgcgtgttggcaccgaaagtaaggaaactgaagctactaggttctcgaaagcacacaggtgccagtcatcgaaaggcaattcttcgtttccttttgcagtttgattcaaatgaacttgagctttttttttctttacttctgaggtccttgatccctggcagcctccagcttaaaatgtttggttctcagccagacaaccttcttggaagtttctctgacattgttggaacttcaacagaaatttgtgtagagaattttacatggaaaaaggcaaatggtttcattcatctggttgaagaaatttttggtacttttgatatgccacatataagcccatttcttaatgttttattaatcattgtcgctcgcttgctggagagttgcatgaggaatcttagaaatgagagtgatgggaaatatccttgcaaccaaacaaatgaccatggtaatggttgttccataaattctgaagtgggcaattctgtgaacgtggatgaatgctttaaagaaatgcatctagaaggccatatggagcaacctcactctatcacgcagacaagtgtatccatcaagcagttgaaggatttgaggtcttcatgtattagagttgtctcgtcagcccttagtcactatgaaagccatgagtttggagaaaacttctggggtgtttttttttcttctgtgaaacctctgatagactgctttacacaagaggcttccagtagtgagaaaccaagttcattatttgcttgttttatggctatgagccggagcccaaaattagcaccactgttggggtcaaataatcttgtaccagctattttttctattttgactgtgaagacagcgtcaggatccatcaccacctatgcacttgagttcattgagaatctgttgaggttggatattgatttgcagcagcaagatgaacatttagtgaagaaagttcttcttcaacatatggatgttcttatccatagtctccatgattttgttaatcatcgcaaagagctcaacaggagatctggtacatggcttgggcaacgtgaacttaggctgttcaaattattgctaaattacatcacagatccctcagctgctgataacttcatagaccttattcttccatttttcagcaagaaagatttgaactccgacgattgtttggaagcactatgtgttgtgaggggaataattcaaaatctgagatgcaaagtatctgaaaaagttctaaatgcactgaacccattacttgcaattgttggattggaactgcgactatgtatctgtgatatttatgctgggttgtcattgaatgatccttcgatgttgtttctggctgggttaataggagatctgaatgcagtttcagcttcagaacttggtgaactagattatgacacaagacttaacacctatgataaggttaggccacaattgtttcttggcttgacagaagagcatgtgggcgccatattatctcattgtgtgtatgatatgtcatctgaagaattaattttgcggcaaagtgcatctagggctctgcagtcgttcctggacttttccgcctcagttatgaataatgatgtgtccaaatactctattgatgataaatttagagagaataataccagaagcatttgcacgatgggctgtattcagaagatattggaaaaaacttatctgcacaatatgggagtagcaatgactaaagatgtatcaattcaaaaggaatggattattttacttagggagatggtctccaattttaatcatttagcatccttaagctcatttaggcctctctgtaaggtggatatagaagaggattttttccacaacataactcatttacaggctggtaaaagatcaaaagcactgttgctttttagacagggaatcaaggaaaacaacttttcagaggatatcactatgaaagtctttgttccactatttttcaatatgttttctgacgtaaaagctgggaaaggcgaacaagtcagagatatatgtttggatacactatctgctgttgctgccaaagtgcagtgggaacactatagaacaatattgaagagatgcttccgagaattaaaccttagacctgataagcagaagatcatattgaggctgatttgttccatattagatgcattccatttcatgaaacctgcaaatgatgcctcaggaaattctgatgctttgagtgaagatattgattcttcccttacattctctttggtcacagtctcttctgataagcaacagtacatgcaaaaggtagtgtttccacaggttcaaaagttgttaggatcagatccagagaaagtcaacgtcaacataaacctggtagcactgaaaatacttaagttgctaccggtggattattttgagtcccaactttcaagcatcattcatcgaatctgtaacttcctcaagaatcgtcttgaaagcatacgtgatgaagctaggtctgctttagctgcttctgttaaggaactggggattgggtatttgcagtttgtggtcaagatattaagagctatacttaaaagaggttttgagttacatgttctgggctacacacttcattatttgttgtcaaaaaacattactgctgatatgtatggtaggcttgactactgtttagaagatttgttggcagtggttgacagtgatttacttggagatgttgcagaacaaaaggaagttgaaaaacttgcctccaaaatgaaagagacaaagaagagaatgtcgtttgagactcttaagctgattgctcaaagtattacattcaagaccgatttactgaagaagataatctcacctgtttctttacatcttcagaagcaacttactccaaagttgaaaaccagacttgagatgatgctacacaacatagccttagggattgagtgcaactcatctactgaaacatcaaacttgtttatcttcgtatattgtcttattgaggatactattacaggaagcagatctgaatgcaaagagaatacacaatctagtcctgatcaagacagtactgtaagaaagaccttcctgggactaggtgagagtggatcacagaattcttatatacttaccaagtttgcacttgacttacttcgtaatcgtctgaagagcatcaagcttgacaaggaagatgaacaactcgtgaagatgttggatccttttgttgaccttctgcgaaagtgtatgagttcgaaacatgcaagtgtcctctcagccacatttagatgttttgccttgttggtgaaacttccgttgccatctctgagggacaatgcaattactataaaaaatgtacttatggagattttacagagagctggaaactccaatggtcatttagtcacatcttgttttaagctacttgctgatctacttagaggattcaggatttcactttcagataatgagcttcagatgcttgttcatacccctatgtttgtagatcttcagacaaacccttcccctgttgccttatcgcttctcaaaacaatagtcaggctaaaattggtttctcacgaaatttatgatatagttgttaagataggagagttgatggtaacaacattaactgaatctatacagcagcaatgcattcaaattatgctacaattttttctgaactatccactttctgagaagcgcttacagcaacatattgactttttcctggcaaacttaagttatgaacatccttcaggaagagaagcagtgcttgaaatgctccatgacattcttaccagatttccccagaggattattgatgagcagggtcaaaccttttttcttcatcttgtagttgctctagccaatgaacagcatcagaatgtgtcttcaatgatccttagagctattcaaaagctgttaggacgcattggtggtcagggaaagagttacatttatgagtattcactttcgtggtacactggtgagaagaaaagtttgtggagtgcttcagctcaggttattggtttacttgttggcgatcacacattacaaatgggcaagcaccttaaaagtattctggctgttgttaagaaaataatggaatcatctattattgcttctggagctatacaattaggcttatctgatgaagctgccctgccattgtggaaagagacttactactctgttgccatgatggagaggttacttcttcgctttccggagttgtattttgagaaaaacatggaggacatatggataatattatgcaagttgttgatccatcctcattcgatgttgcgtagtatttcaagctctctggtagcatcatattttgctacagtggagaagaggaaacatgaacagaaattggatgccccatcatggttgcttgttcaaccgagcaggctattcataatagctgtttccttgttgaaacaattgaggagtgagctgagtgatactacggcaaataatctgattgtacagaatgttgcatactcagtctgcaacttgcatatgttgattaggcaatcgacctccacacatcagttttggtctagcattagttctgatcgtggtgctttccttgagggttttgaattgcttggttcaagaaaagcaaaaaatatatttctcctttgtacttcaacatctagtgatgtatctggatctagcctcgacaccaacgaagagcctacatctttgttagtttcgtcaatcctaaagaagatgggaagaattgcaatgcaaatgcaggatacacagataaagaacgtgttcaattgcttcaatatgatttcatcagctcttggtcctgatgaatcactaacctatgctgatcacctcttggccccattgtataaagtttctgaaggatttgctgggaaagttgttagtgatgaagtgaagcaactggcccagggggtccagaacaagttacgtgacctgattggttccgagaaatttgttgaagtctacaagagcgttcggatgggcctgaaacagaagcgggacggtagaaagcaggcacagaagattgttgcagccgtggacccagaacgcaatgccaagcgaaagcagcgaatggcagccaagcaccgggaacacaagaggcgaaagataatggcgatgaagattggcaggtggatgagatagcttggtatttaggctctgcggaattcggtgaatcatataattgtagaggataatttttcgtgctacaagtgctggcataaaattatgtttctgttttatatgctgtctcactgacttactgcccgacgtaattttattgttgagttaccgaaccataccgtaagtaaaaattaagaggcataagcaatgaagacatagaattgattgaattatatttttttggggtggatggataagtaacaatatattattaaatgtgcaattaagagttttctggctgaggtttgc

SEQ ID NO: 29161 - DNA, 8426 bp, Zea Mays
cttaaacccgcgagcctccggacccggatgttgttccggttccgcccggccccctcgtagccatcgcctccttttagcgccgccatcccacctcgccggcggccatggcgaccccgtcttatgcggcggtgaagtgcctcaacacgtcctcgtccagccgcaagcgtttctcgtttaagagcttctcgcagcgggtggaggagatcgacatcgatgtgtaccgcagcctccacacactgaaggcggagccatccagcggatcgtccttcttcctcgacgcaattgtggagtggagggagcttaatactgcagaagacttcatctcattttatgaggagatgataccattggtacaaacacttcctcaaattgtcttgcaccgggacaagctcttttccgcacttctacaaagggtaaacatgagtgcaagattgtccctggagccaatactcatgttgattgcagctttctccagggatattctagaagattttttgccttttttaggaagacatgctagtgcacttttatctcttcttaacgacggaggtgatcgcgaccctgaaatcttggagcaggtcttcacatcctggtcgtatataatgatgtacttgcaaaagtatctagtgaaagatactgtccaaattcttaggatcacagcagcgttgagatatttcccgaaggactatgttagagaatttatggcagaatctgtttcatttttgctgaggaatgcacctaataatcagctaacgcaaggtctactgaaagttctacttgaggctgctaaacaaccatcacctgcacggatagacggggtggtctctttgctgtggcatgtcatgaaaggaacttccacaaagctacactcaaaagctgggcaggtcttgaagttcttgttgagcaagtcaattgtttccactctccgtgataaatttcctgatgggtcttctactgttcatgccgtcatgacagggctgattcaaagattatgcgatgaagtggatccaaaagaattaccattgatgtatacttgtttatgtgaagaaatcaactgctgtcttgaggatggctgtttggagcatttgaagtgcttgattgtttttcttgcatttgctttacaaaagaagcaaaacaatgcattcgataaggtgaagatgattaaacttgttgagttgctggttagtagatatgtgttccctggtagcaacataacaggatcttcttcaattgaggttcttggaagtattcttgactttatgctttctgttctggatgttccaaccattttgggcaatttgtccatcatatcacctttctatgccccagtgttcaaacttaaaaatccgagggtgattgtctttataaagaaacttttggtaaaaggtccccaagttgcacaacattttgaaagtcaaatattaagtgcaatggataatttcattgtaagttcacccgaggatgtcatatttatccttttaaatttctttaaaggatcaaagaagcaaatatttctttgtagcactgatggaaatcatctggattcagtggagaaaacttgcaagttctttgaatcaaaattttctttgtggatagagttattagatgatacagccggcactggtaatcgatctagtaaccaggtcagtgagaaggaagctgctatactgtggggatcttttttctgctaccctaacatgaaaggtgtacatcaagatagtttgtcactgctgaggaagttaatcatcaactttgatcggttgcttgaagtgggagaagggaacatgaatggtcttccaatgactacctggagaggtctacttggtgcagcattgtcatcgtaccacaaactactgttggtcaacaccagcagaaattcagaatttagttttttcttatcgcttgccaagagtcacagtacatgcccacaagtactgtctgctgtagctgaatatttggattccctgcaaggagtatcatccatggaagtgacaaaagaatttgatccacaaaatctcttggagctgttctccatctttgctttcaatttgagcagtccaaccaaggatgttcggattttaacattgaggattctatcatattttgtgaagatggatcaacgtctaatcacagatgaggagcgaccacacaagaggcagagaacagaagtttctggagaggaagctgttgctaaatacgctaatgttgtggatattcttttgattattgagtcaatgccaatttcagtatctactagccgtaaaattgctatcttcatttctcggatacaaatgagtttatcttccaagatggttcatgatgattacatacctcctctcttacatggtattattggcatattgtacaatagatttagtgatctatggccacaaacactggattgccttgctgttctcattagaaaacacaaggagcttgtttggggtcagtttgttccgttcattgcaattcaccaatcaaaaggactgactgtgaaaaatcaggagaagctggaagctgcaacccaaccacagtctatttttgactgcttcaacttgtatcttgctatggactttgattgcacaccagctgtgaccgtggctaccttattgcttcaatcgctccaaaggattcctgatgttgctgaatcccgctctcgacaacttataccgctatttctcaactttatgggctatgatgatagcagcatctttagtgctgattcatatatgcctgaaaaatgtaaaggcaaacaatggaaagcgattctaaaagaatggttaaacttattgaggttaatgcacaatgcaagatcgttatatcagggcaattttctccaggaagtactaactaaaagggttcttgatgacagtgatcctgaaatacaagcaaaagcattggattgccttttgaactggaaggatgaattcttgatcccgtacagtcagaaccttaaaaatctgattgatgtaaagactcttcgtgaagagctgaccacatgggcagtttcacatgactccttgtcaattctgaaagaccatagaagtcgtgtggttcctctggttatccgcgtgttggcaccgaaagtaaggaaactgaagctactaggttctcgaaagtccttgatccctggcagcctccagcttaaaatgtttggttctcagccagacaaccttcttggaagtttctctgacattgttggaacttcaacagaaatttgtgtagagaattttacatggaaaaaggcaaatggtttcattcatctggttgaagaaatttttggtacttttgatatgccacatataagcccatttcttaatgttttattaatcattgtcgctcgcttgctggagagttgcatgaggaatcttagaaatgagagtgatgggaaatatccttgcaaccaaacaaatgaccatggtaatggttgttccataaattctgaagtgggcaattctgtgaacgtggatgaatgctttaaagaaatgcatctagaaggccatatggagacaagtgtatccatcaagcagttgaaggatttgaggtcttcatgtattagagttgtctcgtcagcccttagtcactatgaaagccatgagtttggagaaaacttctggggtgtttttttttcttctgtgaaacctctgatagactgctttacacaagaggcttccagtagtgagaaaccaagttcattatttgcttgttttatggctatgagccggagcccaaaattagcaccactgttggggtcaaataatcttgtaccagctattttttctattttgactgtgaagacagcgtcaggatccatcaccacctatgcacttgagttcattgagaatctgttgaggttggatattgatttgcagcagcaagatgaacatttagtgaagaaagttcttcttcaacatatggatgttcttatccatagtctccatgattttgttaatcatcgcaaagagctcaacaggagatctggtacatggcttgggcaacgtgaacttaggctgttcaaattattgctaaattacatcacagatccctcagctgctgataacttcatagaccttattcttccatttttcagcaagaaagatttgaactccgacgattgtttggaagcactatgtgttgtgaggggaataattcaaaatctgagatgcaaagtatctgaaaaagttctaaatgcactgaacccattacttgcaattgttggattggaactgcgactatgtatctgtgatatttatgctgggttgtcattgaatgatccttcgatgttgtttctggctgggttaataggagatctgaatgcagtttcagcttcagaacttggtgaactagattatgacacaagacttaacacctatgataaggttaggccacaattgtttcttggcttgacagaagagcatgtgggcgccatattatctcattgtgtgtatgatatgtcatctgaagaattaattttgcggcaaagtgcatctagggctctgcagtcgttcctggacttttccgcctcagttatgaataatgatgtgtccaaatactctattgatgataaatttagagagaataataccagaagcatttgcacgatgggctgtattcagaagatattggaaaaaacttatctgcacaatatgggagtagcaatgactaaagatgtatcaattcaaaaggaatggattattttacttagggagatggtctccaattttaatcatttagcatccttaagctcatttaggcctctctgtaaggtggatatagaagaggattttttccacaacataactcatttacaggctggtaaaagatcaaaagcactgttgctttttagacagggaatcaaggaaaacaacttttcagaggatatcactatgaaagtctttgttccactatttttcaatatgttttctgacgatatcactatgaaagtctttgttccactatttttcaatatgttttctgacgtaaaagctgggaaaggcgaacaagtcagagatatatgtttggatacactatctgctgttgctgccaaagtgcagtgggaacactatagaacaatattgaagagatgcttccgagaattaaaccttagacctgataagcagaagatcatattgaggctgatttgttccatattagatgcattccatttcatgaaacctgcaaatgatgcctcaggaaattctgatgctttgagtgaagatattgattcttcccttacattctctttggtcacagtctcttctgataagcaacagtacatgcaaaaggtagtgtttccacaggttcaaaagttgttaggatcagatccagagaaagtcaacgtcaacataaacctggtagcactgaaaatacttaagttgctaccggtggattattttgagtcccaactttcaagcatcattcatcgaatctgtaacttcctcaagaatcgtcttgaaagcatacgtgatgaagctaggtctgctttagctgcttctgttaaggaactggggattgggtatttgcagtttgtggtcaagatattaagagctatacttaaaagaggttttgagttacatgttctgggctacacacttcattatttgttgtcaaaaaacattactgctgatatgtatggtaggcttgactactgtttagaagatttgttggcagtggttgacagtgatttacttggagatgttgcagaacaaaaggaagttgaaaaacttgcctccaaaatgaaagagacaaagaagagaatgtcgtttgagactcttaagctgattgctcaaagtattacattcaagaccgatttactgaagaagataatctcacctgtttctttacatcttcagaagcaacttactccaaagttgaaaaccagacttgagatgatgctacacaacatagccttagggattgagtgcaactcatctactgaaacatcaaacttgtttatcttcgtatattgtcttattgaggatactattacaggaagcagatctgaatgcaaagagaatacacaatctagtcctgatcaagacagtactgtaagaaagaccttcctgggactaggtgagagtggatcacagaattcttatatacttaccaagtttgcacttgacttacttcgtaatcgtctgaagagcatcaagcttgacaaggaagatgaacaactcgtgaagatgttggatccttttgttgaccttctgcgaaagtgtatgagttcgaaacatgcaagtgtcctctcagccacatttagatgttttgccttgttggtgaaacttccgttgccatctctgagggacaatgcaattactataaaaaatgtacttatggagattttacagagagctggaaactccaatggtcatttagtcacatcttgttttaagctacttgctgatctacttagaggattcaggatttcactttcagataatgagcttcagatgcttgttcatacccctatgtttgtagatcttcagacaaacccttcccctgttgccttatcgcttctcaaaacaatagtcaggctaaaattggtttctcacgaaatttatgatatagttgttaagataggagagttgatggtaacaacattaactgaatctatacagcagcaatgcattcaaattatgctacaattttttctgaactatccactttctgagaagcgcttacagcaacatattgactttttcctggcaaacttaagttatgaacatccttcaggaagagaagcagtgcttgaaatgctccatgacattcttaccagatttccccagaggattattgatgagcagggtcaaaccttttttcttcatcttgtagttgctctagccaatgaacagcatcagaatgtgtcttcaatgatccttagagctattcaaaagctgttaggacgcattggtggtcagggaaagagttacatttatgagtattcactttcgtggtacactggtgagaagaaaagtttgtggagtgcttcagctcaggttattggtttacttgttggcgatcacacattacaaatgggcaagcaccttaaaagtattctggctgttgttaagaaaataatggaatcatctattattgcttctggagctatacaattaggcttatctgatgaagctgccctgccattgtggaaagagacttactactctgttgccatgatggagaggttacttcttcgctttccggagttgtattttgagaaaaacatggaggacatatggataatattatgcaagttgttgatccatcctcattcgatgttgcgtagtatttcaagctctctggtagcatcatattttgctacagtggagaagaggaaacatgaacagaaattggatgccccatcatggttgcttgttcaaccgagcaggctattcataatagctgtttccttgttgaaacaattgaggagtgagctgagtgatactacggcaaataatctgattgtacagaatgttgcatactcagtctgcaacttgcatatgttgattaggcaatcgacctccacacatcagttttggtctagcattagttctgatcgtggtgctttccttgagggttttgaattgcttggttcaagaaaagcaaaaaatatatttctcctttgtacttcaacatctagtgatgtatctggatctagcctcgacaccaacgaagagcctacatctttgttagtttcgtcaatcctaaagaagatgggaagaattgcaatgcaaatgcaggatacacagataaagaacgtgttcaattgcttcaatatgatttcatcagctcttggtcctgatgaatcactaacctatgctgatcacctcttggccccattgtataaagtttctgaaggatttgctgggaaagttgttagtgatgaagtgaagcaactggcccagggggtccagaacaagttacgtgacctgattggttccgagaaatttgttgaagtctacaagagcgttcggatgggcctgaaacagaagcgggacggtagaaagcaggcacagaagattgttgcagccgtggacccagaacgcaatgccaagcgaaagcagcgaatggcagccaagcaccgggaacacaagaggcgaaagataatggcgatgaagattggcaggtggatgagatagcttggtatttaggctctgcggaattcggtgaatcatataattgtagaggataatttttcgtgctacaagtgctggcataaaattatgtttctgttttatatgctgtctcactgacttactgcccgacgtaattttattgttgagttaccgaaccataccgtaagtaaaaattaagaggcataagcaatgaagacatagaattgattgaattatatttttttggggtggatggataagtaacaatatattattaaatgtgcaattaagagttttctggctgaggtttgc

SEQ ID NO: 29162 - DNA, 7941 bp, Zea Mays
cttaaacccgcgagcctccggacccggatgttgttccggttccgcccggccccctcgtagccatcgcctccttttagcgccgccatcccacctcgccggcggccatggcgaccccgtcttatgcggcggtgaagtgcctcaacacgtcctcgtccagccgcaagcgtttctcgtttaagagcttctcgcagcgggtggaggagatcgacatcgatgtgtaccgcagcctccacacactgaaggcggagccatccagcggatcgtccttcttcctcgacgcaattgtggagtggagggagcttaatactgcagaagacttcatctcattttatgaggagatgataccattggtacaaacacttcctcaaattgtcttgcaccgggacaagctcttttccgcacttctacaaagggtaaacatgagtgcaagattgtccctggagccaatactcatgttgattgcagctttctccagggatattctagaagattttttgccttttttaggaagacatgctagtgcacttttatctcttcttaacgacggaggtgatcgcgaccctgaaatcttggagcaggtcttcacatcctggtcgtatataatgatgtacttgcaaaagtatctagtgaaagatactgtccaaattcttaggatcacagcagcgttgagatatttcccgaaggactatgttagagaatttatggcagaatctgtttcatttttgctgaggaatgcacctaataatcagctaacgcaaggtctactgaaagttctacttgaggctgctaaacaaccatcacctgcacggatagacggggtggtctctttgctgtggcatgtcatgaaaggaacttccacaaagctacactcaaaagctgggcaggtcttgaagttcttgttgagcaagtcaattgtttccactctccgtgataaatttcctgatgggtcttctactgttcatgccgtcatgacagggctgattcaaagattatgcgatgaagtggatccaaaagaattaccattgatgtatacttgtttatgtgaagaaatcaactgctgtcttgaggatggctgtttggagcatttgaagtgcttgattgtttttcttgcatttgctttacaaaagaagcaaaacaatgcattcgataaggtgaagatgattaaacttgttgagttgctggttagtagatatgtgttccctggtagcaacataacaggatcttcttcaattgaggttcttggaagtattcttgactttatgctttctgttctggatgttccaaccattttgggcaatttgtccatcatatcacctttctatgccccagtgttcaaacttaaaaatccgagggtgattgtctttataaagaaacttttggtaaaaggtccccaagttgcacaacattttgaaagtcaaatattaagtgcaatggataatttcattgtaagttcacccgaggatgtcatatttatccttttaaatttctttaaaggatcaaagaagcaaatatttctttgtagcactgatggaaatcatctggattcagtggagaaaacttgcaagttctttgaatcaaaattttctttgtggatagagttattagatgatacagccggcactggtaatcgatctagtaaccaggtcagtgagaaggaagctgctatactgtggggatcttttttctgctaccctaacatgaaaggtgtacatcaagatagtttgtcactgctgaggaagttaatcatcaactttgatcggttgcttgaagtgggagaagggaacatgaatggtcttccaatgactacctggagaggtctacttggtgcagcattgtcatcgtaccacaaactactgttggtcaacaccagcagaaattcagaatttagttttttcttatcgcttgccaagagtcacagtacatgcccacaagtactgtctgctgtagctgaatatttggattccctgcaaggagtatcatccatggaagtgacaaaagaatttgatccacaaaatctcttggagctgttctccatctttgctttcaatttgagcagtccaaccaaggatgttcggattttaacattgaggattctatcatattttgtgaagatggatcaacgtctaatcacagatgaggagcgaccacacaagaggcagagaacagaagtttctggagaggaagctgttgctaaatacgctaatgttgtggatattcttttgattattgagtcaatgccaatttcagtatctactagccgtaaaattgctatcttcatttctcggatacaaatgagtttatcttccaagatggttcatgatgattacatacctcctctcttacatggtattattggcatattgtacaatagatttagtgatctatggccacaaacactggattgccttgctgttctcattagaaaacacaaggagcttgtttggggtcagtttgttccgttcattgcaattcaccaatcaaaaggactgactgtgaaaaatcaggagaagctggaagctgcaacccaaccacagtctatttttgactgcttcaacttgtatcttgctatggactttgattgcacaccagctgtgaccgtggctaccttattgcttcaatcgctccaaaggattcctgatgttgctgaatcccgctctcgacaacttataccgctatttctcaactttatgggctatgatgatagcagcatctttagtgctgattcatatatgcctgaaaaatgtaaaggcaaacaatggaaagcgattctaaaagaatggttaaacttattgaggttaatgcacaatgcaagatcgttatatcagggcaattttctccaggaagtactaactaaaagggttcttgatgacagtgatcctgaaatacaagcaaaagcattggattgccttttgaactggaaggatgaattcttgatcccgtacagtcagaaccttaaaaatctgattgatgtaaagactcttcgtgaagagctgaccacatgggcagtttcacatgactccttgtcaattctgaaagaccatagaagtcgtgtggttcctctggttatccgcgtgttggcaccgaaagtaaggaaactgaagctactaggttctcgaaagcacacaggtgccagtcatcgaaaggcaattcttcgtttccttttgcagtttgattcaaatgaacttgagctttttttttctttacttctgaggtccttgatccctggcagcctccagcttaaaatgtttggttctcagccagacaaccttcttggaagtttctctgacattgttggaacttcaacagaaatttgtgtagagaattttacatggaaaaaggcaaatggtttcattcatctggttgaagaaatttttggtacttttgatatgccacatataagcccatttcttaatgttttattaatcattgtcgctcgcttgctggagagttgcatgaggaatcttagaaatgagagtgatgggaaatatccttgcaaccaaacaaatgaccatggtaatggttgttccataaattctgaagtgggcaattctgtgaacgtggatgaatgctttaaagaaatgcatctagaaggccatatggagcaacctcactctatcacgcagacaagtgtatccatcaagcagttgaaggatttgaggtcttcatgtattagagttgtctcgtcagcccttagtcactatgaaagccatgagtttggagaaaacttctggggtgtttttttttcttctgtgaaacctctgatagactgctttacacaagaggcttccagtagtgagaaaccaagttcattatttgcttgttttatggctatgagccggagcccaaaattagcaccactgttggggtcaaataatcttgtaccagctattttttctattttgactgtgaagacagcgtcaggatccatcaccacctatgcacttgagttcattgagaatctgttgaggttggatattgatttgcagcagcaagatgaacatttagtgaagaaagttcttcttcaacatatggatgttcttatccatagtctccatgattttgttaatcatcgcaaagagctcaacaggagatctggtacatggcttgggcaacgtgaacttaggctgttcaaattattgctaaattacatcacagatccctcagctgctgataacttcatagaccttattcttccatttttcagcaagaaagatttgaactccgacgattgtttggaagcactatgtgttgtgaggggaataattcaaaatctgagatgcaaagtatctgaaaaagttctaaatgcactgaacccattacttgcaattgttggattggaactgcgactatgtatctgtgatatttatgctgggttgtcattgaatgatccttcgatgttgtttctggctgggttaataggagatctgaatgcagtttcagcttcagaacttggtgaactagattatgacacaagacttaacacctatgataaggttaggccacaattgtttcttggcttgacagaagagcatgtgggcgccatattatctcattgtgtgtatgatatgtcatctgaagaattaattttgcggcaaagtgcatctagggctctgcagtcgttcctggacttttccgcctcagttatgaataatgatgtgtccaaatactctattgatgataaatttagagagaataataccagaagcatttgcacgatgggctgtattcagaagatattggaaaaaacttatctgcacaatatgggagtagcaatgactaaagatgtatcaattcaaaaggaatggattattttacttagggagatggtctccaattttaatcatttagcatccttaagctcatttaggcctctctgtaaggtggatatagaagaggattttttccacaacataactcatttacaggctggtaaaagatcaaaagcactgttgctttttagacagggaatcaaggaaaacaacttttcagaggatatcactatgaaagtctttgttccactatttttcaatatgttttctgacgtaaaagctgggaaaggcgaacaagtcagagatatatgtttggatacactatctgctgttgctgccaaagtgcagtgggaacactatagaacaatattgaagagatgcttccgagaattaaaccttagacctgataagcagaagatcatattgaggctgatttgttccatattagatgcattccatttcatgaaacctgcaaatgatgcctcaggaaattctgatgctttgagtgaagatattgattcttcccttacattctctttggtcacagtctcttctgataagcaacagtacatgcaaaaggtagtgtttccacaggttcaaaagttgttaggatcagatccagagaaagtcaacgtcaacataaacctggtagcactgaaaatacttaagttgctaccggtggattattttgagtcccaactttcaagcatcattcatcgaatctgtaacttcctcaagaatcgtcttgaaagcatacgtgatgaagctaggtctgctttagctgcttctgttaaggaactggggattgggtatttgcagtttgtggtcaagatattaagagctatacttaaaagaggttttgagttacatgttctgggctacacacttcattatttgttgtcaaaaaacattactgctgatatgtatggtaggcttgactactgtttagaagatttgttggcagtggttgacagtgatttacttggagatgttgcagaacaaaaggaagttgaaaaacttgcctccaaaatgaaagagacaaagaagagaatgtcgtttgagactcttaagctgattgctcaaagtattacattcaagaccgatttactgaagaagataatctcacctgtttctttacatcttcagaagcaacttactccaaagttgaaaaccagacttgagatgatgctacacaacatagccttagggattgagtgcaactcatctactgaaacatcaaacttgtttatcttcgtatattgtcttattgaggatactattacaggaagcagatctgaatgcaaagagaatacacaatctagtcctgatcaagacagtactgtaagaaagaccttcctgggactagcaatgcattcaaattatgctacaattttttctgaactatccactttctgagaagcgcttacagcaacatattgactttttcctggcaaacttaagttatgaacatccttcaggaagagaagcagtgcttgaaatgctccatgacattcttaccagatttccccagaggattattgatgagcagggtcaaaccttttttcttcatcttgtagttgctctagccaatgaacagcatcagaatgtgtcttcaatgatccttagagctattcaaaagctgttaggacgcattggtggtcagggaaagagttacatttatgagtattcactttcgtggtacactggtgagaagaaaagtttgtggagtgcttcagctcaggttattggtttacttgttggcgatcacacattacaaatgggcaagcaccttaaaagtattctggctgttgttaagaaaataatggaatcatctattattgcttctggagctatacaattaggcttatctgatgaagctgccctgccattgtggaaagagacttactactctgttgccatgatggagaggttacttcttcgctttccggagttgtattttgagaaaaacatggaggacatatggataatattatgcaagttgttgatccatcctcattcgatgttgcgtagtatttcaagctctctggtagcatcatattttgctacagtggagaagaggaaacatgaacagaaattggatgccccatcatggttgcttgttcaaccgagcaggctattcataatagctgtttccttgttgaaacaattgaggagtgagctgagtgatactacggcaaataatctgattgtacagaatgttgcatactcagtctgcaacttgcatatgttgattaggcaatcgacctccacacatcagttttggtctagcattagttctgatcgtggtgctttccttgagggttttgaattgcttggttcaagaaaagcaaaaaatatatttctcctttgtacttcaacatctagtgatgtatctggatctagcctcgacaccaacgaagagcctacatctttgttagtttcgtcaatcctaaagaagatgggaagaattgcaatgcaaatgcaggatacacagataaagaacgtgttcaattgcttcaatatgatttcatcagctcttggtcctgatgaatcactaacctatgctgatcacctcttggccccattgtataaagtttctgaaggatttgctgggaaagttgttagtgatgaagtgaagcaactggcccagggggtccagaacaagttacgtgacctgattggttccgagaaatttgttgaagtctacaagagcgttcggatgggcctgaaacagaagcgggacggtagaaagcaggcacagaagattgttgcagccgtggacccagaacgcaatgccaagcgaaagcagcgaatggcagccaagcaccgggaacacaagaggcgaaagataatggcgatgaagattggcaggtggatgagatagcttggtatttaggctctgcggaattcggtgaatcatataattgtagaggataatttttcgtgctacaagtgctggcataaaattatgtttctgttttatatgctgtctcactgacttactgcccgacgtaattttattgttgagttaccgaaccataccgtaagtaaaaattaagaggcataagcaatgaagacatagaattgattgaattatatttttttggggtggatggataagtaacaatatattattaaatgtgcaattaagagttttctggctgaggtttgc

SEQ ID NO: 29163 - DNA, 7239 bp, Zea Mays
cccggccccctcgtagccatcgcctccttttagcgccgccatcccacctcgccggcggccatggcgaccccgtcttatgcggcggtgaagtgcctcaacacgtcctcgtccagccgcaagcgtttctcgtttaagagcttctcgcagcgggtggaggagatcgacatcgatgtgtaccgcagcctccacacactgaaggcggagccatccagcggatcgtccttcttcctcgacgcaattgtggagtggagggagcttaatactgcagaagacttcatctcattttatgaggagatgataccattggtacaaacacttcctcaaattgtcttgcaccgggacaagctcttttccgcacttctacaaagggtaaacatgagtgcaagattgtccctggagccaatactcatgttgattgcagctttctccagggatattctagaagattttttgccttttttaggaagacatgctagtgcacttttatctcttcttaacgacggaggtgatcgcgaccctgaaatcttggagcaggtcttcacatcctggtcgtatataatgatgtacttgcaaaagtatctagtgaaagatactgtccaaattcttaggatcacagcagcgttgagatatttcccgaaggactatgttagagaatttatggcagaatctgtttcatttttgctgaggaatgcacctaataatcagctaacgcaaggtctactgaaagttctacttgaggctgctaaacaaccatcacctgcacggatagacggggtggtctctttgctgtggcatgtcatgaaaggaacttccacaaagctacactcaaaagctgggcaggtcttgaagttcttgttgagcaagtcaattgtttccactctccgtgataaatttcctgatgataaggtgaagatgattaaacttgttgagttgctggttagtagatatgtgttccctggtagcaacataacaggatcttcttcaattgaggttcttggaagtattcttgactttatgctttctgttctggatgttccaaccattttgggcaatttgtccatcatatcacctttctatgccccagtgttcaaacttaaaaatccgagggtgattgtctttataaagaaacttttggtaaaaggtccccaagttgcacaacattttgaaagtcaaatattaagtgcaatggataatttcattgtaagttcacccgaggatgtcatatttatccttttaaatttctttaaaggatcaaagaagcaaatatttctttgtagcactgatggaaatcatctggattcagtggagaaaacttgcaagttctttgaatcaaaattttctttgtggatagagttattagatgatacagccggcactggtaatcgatctagtaaccaggtcagtgagaaggaagctgctatactgtggggatcttttttctgctaccctaacatgaaaggtgtacatcaagatagtttgtcactgctgaggaagttaatcatcaactttgatcggttgcttgaagtgggagaagggaacatgaatggtcttccaatgactacctggagaggtctacttggtgcagcattgtcatcgtaccacaaactactgttggtcaacaccagcagaaattcagaatttagttttttcttatcgcttgccaagagtcacagtacatgcccacaagtactgtctgctgtagctgaatatttggattccctgcaaggagtatcatccatggaagtgacaaaagaatttgatccacaaaatctcttggagctgttctccatctttgctttcaatttgagcagtccaaccaaggatgttcggattttaacattgaggattctatcatattttgtgaagatggatcaacgtctaatcacagatgaggagcgaccacacaagaggcagagaacagaagtttctggagaggaagctgttgctaaatacgctaatgttgtggatattcttttgattattgagtcaatgccaatttcagtatctactagccgtaaaattgctatcttcatttctcggatacaaatgagtttatcttccaagatggttcatgatgattacatacctcctctcttacatggtattattggcatattgtacaatagatttagtgatctatggccacaaacactggattgccttgctgttctcattagaaaacacaaggagcttgtttggggtcagtttgttccgttcattgcaattcaccaatcaaaaggactgactgtgaaaaatcaggagaagctggaagctgcaacccaaccacagtctatttttgactgcttcaacttgtatcttgctatggactttgattgcacaccagctgtgaccgtggctaccttattgcttcaatcgctccaaaggattcctgatgttgctgaatcccgctctcgacaacttataccgctatttctcaactttatgggctatgatgatagcagcatctttagtgctgattcatatatgcctgaaaaatgtaaaggcaaacaatggaaagcgattctaaaagaatggttaaacttattgaggttaatgcacaatgcaagatcgttatatcagggcaattttctccaggaagtactaactaaaagggttcttgatgacagtgatcctgaaatacaagcaaaagcattggattgccttttgaactggaaggatgaattcttgatcccgtacagtcagaaccttaaaaatctgattgatgtaaagactcttcgtgaagagctgaccacatgggcagtttcacatgactccttgtcaattctgaaagaccatagaagtcgtgtggttcctctggttatccgcgtgttggcaccgaaagtaaggaaactgaagctactaggttctcgaaagcacacaggtgccagtcatcgaaaggcaattcttcgtttccttttgcagtttgattcaaatgaacttgagctttttttttctttacttctgaggtccttgatccctggcagcctccagcttaaaatgtttggttctcagccagacaaccttcttggaagtttctctgacattgttggaacttcaacagaaatttgtgtagagaattttacatggaaaaaggcaaatggtttcattcatctggttgaagaaatttttggtacttttgatatgccacatataagcccatttcttaatgttttattaatcattgtcgctcgcttgctggagagttgcatgaggaatcttagaaatgagagtgatgggaaatatccttgcaaccaaacaaatgaccatggtaatggttgttccataaattctgaagtgggcaattctgtgaacgtggatgaatgctttaaagaaatgcatctagaaggccatatggagacagcgtcaggatccatcaccacctatgcacttgagttcattgagaatctgttgaggttggatattgatttgcagcagcaagatgaacatttagtgaagaaagttcttcttcaacatatggatgttcttatccatagtctccatgattttgttaatcatcgcaaagagctcaacaggagatctggtacatggcttgggcaacgtgaacttaggctgttcaaattattgctaaattacatcacagatccctcagctgctgataacttcatagaccttattcttccatttttcagcaagaaagatttgaactccgacgattgtttggaagcactatgtgttgtgaggggaataattcaaaatctgagatgcaaagtatctgaaaaagttctaaatgcactgaacccattacttgcaattgttggattggaactgcgactatgtatctgtgatatttatgctgggttgtcattgaatgatccttcgatgttgtttctggctgggttaataggagatctgaatgcagtttcagcttcagaacttggtgaactagattatgacacaagacttaacacctatgataagtgcatctagggctctgcagtcgttcctggacttttccgcctcagttatgaataatgatgtgtccaaatactctattgatgataaatttagagagaataataccagaagcatttgcacgatgggctgtattcagaagatattggaaaaaacttatctgcacaatatgggagtagcaatgactaaagatgtatcaattcaaaaggaatggattattttacttagggagatggtctccaattttaatcatttagcatccttaagctcatttaggcctctctgtaaggtggatatagaagaggattttttccacaacataactcatttacaggctggtaaaagatcaaaagcactgttgctttttagacagggaatcaaggaaaacaacttttcagaggatatcactatgaaagtctttgttccactatttttcaatatgttttctgacgatatcactatgaaagtctttgttccactatttttcaatatgttttctgacgtaaaagctgggaaaggcgaacaagtcagagatatatgtttggatacactatctgctgttgctgccaaagtgcagtgggaacactatagaacaatattgaagagatgcttccgagaattaaaccttagacctgataagcagaagatcatattgaggctgatttgttccatattagatgcattccatttcatgaaacctgcaaatgatgcctcaggaaattctgatgctttgagtgaagatattgattcttcccttacattctctttggtcacagtctcttctgataagcaacagtacatgcaaaaggtagtgtttccacaggttcaaaagttgttaggatcagatccagagaaagtcaacgtcaacataaacctggtagcactgaaaatacttaagttgctaccggtggattattttgagtcccaactttcaagcatcattcatcgaatctgtaacttcctcaagaatcgtcttgaaagcatacgtgatgaagctaggtctgctttagctgcttctgttaaggaactggggattgggtatttgcagtttgtggtcaagatattaagagctatacttaaaagaggttttgagttacatgttctgggctacacacttcattatttgttgtcaaaaaacattactgctgatatgtatggtaggcttgactactgtttagaagatttgttggcagtggttgacagtgatttacttggagatgttgcagaacaaaaggaagttgaaaaacttgcctccaaaatgaaagagacaaagaagagaatgtcgtttgagactcttaagctgattgctcaaagtattacattcaagaccgatttactgaagaagataatctcacctgtttctttacatcttcagaagcaacttactccaaagttgaaaaccagacttgagatgatgctacacaacatagccttagggattgagtgcaactcatctactgaaacatcaaacttgtttatcttcgtatattgtcttattgaggatactattacaggaagcagatctgaatgcaaagagaatacacaatctagtcctgatcaagacagtactgtaagaaagaccttcctgggactagttatgaacatccttcaggaagagaagcagtgcttgaaatgctccatgacattcttaccagatttccccagaggattattgatgagcagggtcaaaccttttttcttcatcttgtagttgctctagccaatgaacagcatcagaatgtgtcttcaatgatccttagagctattcaaaagctgttaggacgcattggtggtcagggaaagagttacatttatgagtattcactttcgtggtacactggtgagaagaaaagtttgtggagtgcttcagctcaggttattggtttacttgttggcgatcacacattacaaatgggcaagcaccttaaaagtattctggctgttgttaagaaaataatggaatcatctattattgcttctggagctatacaattaggcttatctgatgaagctgccctgccattgtggaaagagacttactactctgttgccatgatggagaggttacttcttcgctttccggagttgtattttgagaaaaacatggaggacatatggataatattatgcaagttgttgatccatcctcattcgatgttgcgtagtatttcaagctctctggtagcatcatattttgctacagtggagaagaggaaacatgaacagaaattggatgccccatcatggttgcttgttcaaccgagcaggctattcataatagctgtttccttgttgaaacaattgaggagtgagctgagtgatactacggcaaataatctgattgtacagaatgttgcatactcagtctgcaacttgcatatgttgattaggcaatcgacctccacacatcagttttggtctagcattagttctgatcgtggtgctttccttgagggttttgaattgcttggttcaagaaaagcaaaaaatatatttctcctttgtacttcaacatctagtgatgtatctggatctagcctcgacaccaacgaagagcctacatctttgttagtttcgtcaatcctaaagaagatgggaagaattgcaatgcaaatgcaggatacacagataaagaacgtgttcaattgcttcaatatgatttcatcagctcttggtcctgatgaatcactaacctatgctgatcacctcttggccccattgtataaagtttctgaaggatttgctgggaaagttgttagtgatgaagtgaagcaactggcccagggggtccagaacaagttacgtgacctgattggttccgagaaatttgttgaagtctacaagagcgttcggatgggcctgaaacagaagcgggacggtagaaagcaggcacagaagattgttgcagccgtggacccagaacgcaatgccaagcgaaagcagcgaatggcagccaagcaccgggaacacaagaggcgaaagataatggcgatgaagattggcaggtggatgagatagcttggtatttaggctctgcggaattcggtgaatcatataattgtagaggataatttttcgtgctacaagtgctggcataaaattatgtttctgttttatatgctgtctcactgacttactgcccgacgtaattttattgttgagttaccgaaccataccgtaagtaaaaattaagaggcataagcaatgaagacatagaattgattgaattatatttttttggggtggatggataagtaacaatatattattaaatgtgcaattaagagttttctggctgaggtttgc

SEQ ID NO: 29164 - DNA, 8033 bp, Zea Mays
gccccctcgtagccatcgcctccttttagcgccgccatcccacctcgccggcggccatggcgaccccgtcttatgcggcggtgaagtgcctcaacacgtcctcgtccagccgcaagcgtttctcgtttaagagcttctcgcagcgggtggaggagatcgacatcgatgtgtaccgcagcctccacacactgaaggcggagccatccagcggatcgtccttcttcctcgacgcaattgtggagtggagggagcttaatactgcagaagacttcatctcattttatgaggagatgataccattggtacaaacacttcctcaaattgtcttgcaccgggacaagctcttttccgcacttctacaaagggtaaacatgagtgcaagattgtccctggagccaatactcatgttgattgcagctttctccagggatattctagaagattttttgccttttttaggaagacatgctagtgcacttttatctcttcttaacgacggaggtgatcgcgaccctgaaatcttggagcaggtcttcacatcctggtcgtatataatgatgtacttgcaaaagtatctagtgaaagatactgtccaaattcttaggatcacagcagcgttgagatatttcccgaaggactatgttagagaatttatggcagaatctgtttcatttttgctgaggaatgcacctaataatcagctaacgcaaggtctactgaaagttctacttgaggctgctaaacaaccatcacctgcacggatagacggggtggtctctttgctgtggcatgtcatgaaaggaacttccacaaagctacactcaaaagctgggcaggtcttgaagttcttgttgagcaagtcaattgtttccactctccgtgataaatttcctgatgataaggtgaagatgattaaacttgttgagttgctggttagtagatatgtgttccctggtagcaacataacaggatcttcttcaattgaggttcttggaagtattcttgactttatgctttctgttctggatgttccaaccattttgggcaatttgtccatcatatcacctttctatgccccagtgttcaaacttaaaaatccgagggtgattgtctttataaagaaacttttggtaaaaggtccccaagttgcacaacattttgaaagtcaaatattaagtgcaatggataatttcattgtaagttcacccgaggatgtcatatttatccttttaaatttctttaaaggatcaaagaagcaaatatttctttgtagcactgatggaaatcatctggattcagtggagaaaacttgcaagttctttgaatcaaaattttctttgtggatagagttattagatgatacagccggcactggtaatcgatctagtaaccagttggtttttctaaatggcataaattcaaaggatttacatgcagggaacatgaatggtcttccaatgactacctggagaggtctacttggtgcagcattgtcatcgtaccacaaactactgttggtcaacaccagcagaaattcagaatttagttttttcttatcgcttgccaagagtcacagtacatgcccacaagtactgtctgctgtagctgaatatttggattccctgcaaggagtatcatccatggaagtgacaaaagaatttgatccacaaaatctcttggagctgttctccatctttgctttcaatttgagcagtccaaccaaggatgttcggattttaacattgaggattctatcatattttgtgaagatggatcaacgtctaatcacagatgaggagcgaccacacaagaggcagagaacagaagtttctggagaggaagctgttgctaaatacgctaatgttgtggatattcttttgattattgagtcaatgccaatttcagtatctactagccgtaaaattgctatcttcatttctcggatacaaatgagtttatcttccaagatggttcatgatgattacatacctcctctcttacatggtattattggcatattgtacaatagatttagtgatctatggccacaaacactggattgccttgctgttctcattagaaaacacaaggagcttgtttggggtcagtttgttccgttcattgcaattcaccaatcaaaaggactgactgtgaaaaatcaggagaagctggaagctgcaacccaaccacagtctatttttgactgcttcaacttgtatcttgctatggactttgattgcacaccagctgtgaccgtggctaccttattgcttcaatcgctccaaaggattcctgatgttgctgaatcccgctctcgacaacttataccgctatttctcaactttatgggctatgatgatagcagcatctttagtgctgattcatatatgcctgaaaaatgtaaaggcaaacaatggaaagcgattctaaaagaatggttaaacttattgaggttaatgcacaatgcaagatcgttatatcagggcaattttctccaggaagtactaactaaaagggttcttgatgacagtgatcctgaaatacaagcaaaagcattggattgccttttgaactggaaggatgaattcttgatcccgtacagtcagaaccttaaaaatctgattgatgtaaagactcttcgtgaagagctgaccacatgggcagtttcacatgactccttgtcaattctgaaagaccatagaagtcgtgtggttcctctggttatccgcgtgttggcaccgaaagtaaggaaactgaagctactaggttctcgaaagtccttgatccctggcagcctccagcttaaaatgtttggttctcagccagacaaccttcttggaagtttctctgacattgttggaacttcaacagaaatttgtgtagagaattttacatggaaaaaggcaaatggtttcattcatctggttgaagaaatttttggtacttttgatatgccacatataagcccatttcttaatgttttattaatcattgtcgctcgcttgctggagagttgcatgaggaatcttagaaatgagagtgatgggaaatatccttgcaaccaaacaaatgaccatggtaatggttgttccataaattctgaagtgggcaattctgtgaacgtggatgaatgctttaaagaaatgcatctagaaggccatatggagacaagtgtatccatcaagcagttgaaggatttgaggtcttcatgtattagagttgtctcgtcagcccttagtcactatgaaagccatgagtttggagaaaacttctggggtgtttttttttcttctgtgaaacctctgatagactgctttacacaagaggcttccagtagtgagaaaccaagttcattatttgcttgttttatggctatgagccggagcccaaaattagcaccactgttggggtcaaataatcttgtaccagctattttttctattttgactgtgaagacagcgtcaggatccatcaccacctatgcacttgagttcattgagaatctgttgaggttggatattgatttgcagcagcaagatgaacatttagtgaagaaagttcttcttcaacatatggatgttcttatccatagtctccatgattttgttaatcatcgcaaagagctcaacaggagatctggtacatggcttgggcaacgtgaacttaggctgttcaaattattgctaaattacatcacagatccctcagctgctgataacttcatagaccttattcttccatttttcagcaagaaagatttgaactccgacgattgtttggaagcactatgtgttgtgaggggaataattcaaaatctgagatgcaaagtatctgaaaaagttctaaatgcactgaacccattacttgcaattgttggattggaactgcgactatgtatctgtgatatttatgctgggttgtcattgaatgatccttcgatgttgtttctggctgggttaataggagatctgaatgcagtttcagcttcagaacttggtgaactagattatgacacaagacttaacacctatgataaggttaggccacaattgtttcttggcttgacagaagagcatgtgggcgccatattatctcattgtgtgtatgatatgtcatctgaagaattaattttgcggcaaagtgcatctagggctctgcagtcgttcctggacttttccgcctcagttatgaataatgatgtgtccaaatactctattgatgataaatttagagagaataataccagaagcatttgcacgatgggctgtattcagaagatattggaaaaaacttatctgcacaatatgggagtagcaatgactaaagatgtatcaattcaaaaggaatggattattttacttagggagatggtctccaattttaatcatttagcatccttaagctcatttaggcctctctgtaaggtggatatagaagaggattttttccacaacataactcatttacaggctggtaaaagatcaaaagcactgttgctttttagacagggaatcaaggaaaacaacttttcagaggatatcactatgaaagtctttgttccactatttttcaatatgttttctgacgtaaaagctgggaaaggcgaacaagtcagagatatatgtttggatacactatctgctgttgctgccaaagtgcagtgggaacactatagaacaatattgaagagatgcttccgagaattaaaccttagacctgataagcagaagatcatattgaggctgatttgttccatattagatgcattccatttcatgaaacctgcaaatgatgcctcaggaaattctgatgctttgagtgaagatattgattcttcccttacattctctttggtcacagtctcttctgataagcaacagtacatgcaaaaggtagtgtttccacaggttcaaaagttgttaggatcagatccagagaaagtcaacgtcaacataaacctggtagcactgaaaatacttaagttgctaccggtggattattttgagtcccaactttcaagcatcattcatcgaatctgtaacttcctcaagaatcgtcttgaaagcatacgtgatgaagctaggtctgctttagctgcttctgttaaggaactggggattgggtatttgcagtttgtggtcaagatattaagagctatacttaaaagaggttttgagttacatgttctgggctacacacttcattatttgttgtcaaaaaacattactgctgatatgtatggtaggcttgactactgtttagaagatttgttggcagtggttgacagtgatttacttggagatgttgcagaacaaaaggaagttgaaaaacttgcctccaaaatgaaagagacaaagaagagaatgtcgtttgagactcttaagctgattgctcaaagtattacattcaagaccgatttactgaagaagataatctcacctgtttctttacatcttcagaagcaacttactccaaagttgaaaaccagacttgagatgatgctacacaacatagccttagggattgagtgcaactcatctactgaaacatcaaacttgtttatcttcgtatattgtcttattgaggatactattacaggaagcagatctgaatgcaaagagaatacacaatctagtcctgatcaagacagtactgtaagaaagaccttcctgggactaggtgagagtggatcacagaattcttatatacttaccaagtttgcacttgacttacttcgtaatcgtctgaagagcatcaagcttgacaaggaagatgaacaactcgtgaagatgttggatccttttgttgaccttctgcgaaagtgtatgagttcgaaacatgcaagtgtcctctcagccacatttagatgttttgccttgttggtgaaacttccgttgccatctctgagggacaatgcaattactataaaaaatgtacttatggagattttacagagagctggaaactccaatggtcatttagtcacatcttgttttaagctacttgctgatctacttagaggattcaggatttcactttcagataatgagcttcagatgcttgttcatacccctatgtttgtagatcttcagacaaacccttcccctgttgccttatcgcttctcaaaacaatagtcaggctaaaattggtttctcacgaaatttatgatatagttgttaagataggagagttgatggtaacaacattaactgaatctatacagcagcaatgcattcaaattatgctacaattttttctgaactatccactttctgagaagcgcttacagcaacatattgactttttcctggcaaacttaagttatgaacatccttcaggaagagaagcagtgcttgaaatgctccatgacattcttaccagatttccccagaggattattgatgagcagggtcaaaccttttttcttcatcttgtagttgctctagccaatgaacagcatcagaatgtgtcttcaatgatccttagagctattcaaaagctgttaggacgcattggtggtcagggaaagagttacatttatgagtattcactttcgtggtacactggtgagaagaaaagtttgtggagtgcttcagctcaggttattggtttacttgttggcgatcacacattacaaatgggcaagcaccttaaaagtattctggctgttgttaagaaaataatggaatcatctattattgcttctggagctatacaattaggcttatctgatgaagctgccctgccattgtggaaagagacttactactctgttgccatgatggagaggttacttcttcgctttccggagttgtattttgagaaaaacatggaggacatatggataatattatgcaagttgttgatccatcctcattcgatgttgcgtagtatttcaagctctctggtagcatcatattttgctacagtggagaagaggaaacatgaacagaaattggatgccccatcatggttgcttgttcaaccgagcaggctattcataatagctgtttccttgttgaaacaattgaggagtgagctgagtgatactacggcaaataatctgattgtacagaatgttgcatactcagtctgcaacttgcatatgttgattaggcaatcgacctccacacatcagttttggtctagcattagttctgatcgtggtgctttccttgagggttttgaattgcttggttcaagaaaagcaaaaaatatatttctcctttgtacttcaacatctagtgatgtatctggatctagcctcgacaccaacgaagagcctacatctttgttagtttcgtcaatcctaaagaagatgggaagaattgcaatgcaaatgcaggatacacagataaagaacgtgttcaattgcttcaatatgatttcatcagctcttggtcctgatgaatcactaacctatgctgatcacctcttggccccattgtataaagtttctgaaggatttgctgggaaagttgttagtgatgaagtgaagcaactggcccagggggtccagaacaagttacgtgacctgattggttccgagaaatttgttgaagtctacaagagcgttcggatgggcctgaaacagaagcgggacggtagaaagcaggcacagaagattgttgcagccgtggacccagaacgcaatgccaagcgaaagcagcgaatggcagccaagcaccgggaacacaagaggcgaaagataatggcgatgaagattggcaggtggatgagatagcttggtatttaggctctgcggaattcggtgaatcatataattgtagaggataatttttcgtgctacaagtgctggcataaaattatgtttctgttttatatgctgtctcactgacttactgcccgacgtaattttattgttgagttaccgaaccataccgtaagtaaaaattaagaggcataagcaatgaagacatagaattgattgaattatatttttttggggtggatggataagtaacaatatattattaaatgtgcaattaagagttttctggctgaggtttgc

SEQ ID NO: 29165 - DNA, 7528 bp, Zea Mays
atggcgaccccgtcttatgcggcggtgaagtgcctcaacacgtcctcgtccagccgcaagcgtttctcgtttaagagcttctcgcagcgggtggaggagatcgacatcgatgtgtaccgcagcctccacacactgaaggcggagccatccagcggatcgtccttcttcctcgacgcaattgtggagtggagggagcttaatactgcagaagacttcatctcattttatgaggagatgataccattggtacaaacacttcctcaaattgtcttgcaccgggacaagctcttttccgcacttctacaaagggtaaacatgagtgcaagattgtccctggagccaatactcatgttgattgcagctttctccagggatattctagaagattttttgccttttttaggaagacatgctagtgcacttttatctcttcttaacgacggaggtgatcgcgaccctgaaatcttggagcaggtcttcacatcctggtcgtatataatgatgtacttgcaaaagtatctagtgaaagatactgtccaaattcttaggatcacagcagcgttgagatatttcccgaaggactatgttagagaatttatggcagaatctgtttcatttttgctgaggaatgcacctaataatcagctaacgcaaggtctactgaaagttctacttgaggctgctaaacaaccatcacctgcacggatagacggggtggtctctttgctgtggcatgtcatgaaaggaacttccacaaagctacactcaaaagctgggcaggtcttgaagttcttgttgagcaagtcaattgtttccactctccgtgataaatttcctgatgataaggtgaagatgattaaacttgttgaggatgttccaaccattttgggcaatttgtccatcatatcacctttctatgccccagtgttcaaacttaaaaatccgagggtgattgtctttataaagaaacttttggtaaaaggtccccaagttgcacaacattttgaaagtcaaatattaagagtatcatccatggaagtgacaaaagaatttgatccacaaaatctcttggagctgttctccatctttgctttcaatttgagcagtccaaccaaggatgttcggattttaacattgaggattctatcatattttgtgaagatggatcaacgtctaatcacagatgaggagcgaccacacaagaggcagagaacagaagtttctggagaggaagctgttgctaaatacgctaatgttgtggatattcttttgattattgagtcaatgccaatttcagtatctactagccgtaaaattgctatcttcatttctcggatacaaatgagtttatcttccaagatggttcatgatgattacatacctcctctcttacatggtattattggcatattgtacaatagatttagtgatctatggccacaaacactggattgccttgctgttctcattagaaaacacaaggagcttgtttggggtcagtttgttccgttcattgcaattcaccaatcaaaaggactgactgtgaaaaatcaggagaagctggaagctgcaacccaaccacagtctatttttgactgcttcaacttgtatcttgctatggactttgattgcacaccagctgtgaccgtggctaccttattgcttcaatcgctccaaaggattcctgatgttgctgaatcccgctctcgacaacttataccgctatttctcaactttatgggctatgatgatagcagcatctttagtgctgattcatatatgcctgaaaaatgtaaaggcaaacaatggaaagcgattctaaaagaatggttaaacttattgaggttaatgcacaatgcaagatcgttatatcagggcaattttctccaggaagtactaactaaaagggttcttgatgacagtgatcctgaaatacaagcaaaagcattggattgccttttgaactggaaggatgaattcttgatcccgtacagtcagaaccttaaaaatctgattgatgtaaagactcttcgtgaagagctgaccacatgggcagtttcacatgactccttgtcaattctgaaagaccatagaagtcgtgtggttcctctggttatccgcgtgttggcaccgaaagtaaggaaactgaagctactaggttctcgaaagcacacaggtgccagtcatcgaaaggcaattcttcgtttccttttgcagtttgattcaaatgaacttgagctttttttttctttacttctgaggtccttgatccctggcagcctccagcttaaaatgtttggttctcagccagacaaccttcttggaagtttctctgacattgttggaacttcaacagaaatttgtgtagagaattttacatggaaaaaggcaaatggtttcattcatctggttgaagaaatttttggtacttttgatatgccacatataagcccatttcttaatgttttattaatcattgtcgctcgcttgctggagagttgcatgaggaatcttagaaatgagagtgatgggaaatatccttgcaaccaaacaaatgaccatggtaatggttgttccataaattctgaagtgggcaattctgtgaacgtggatgaatgctttaaagaaatgcatctagaaggccatatggagtcattatttattatcatgaagctactttgcattttattcaacaacaacaacatgcattttatttgccaaatgtttatatcttctcttaactaattgcaacagcaacctcactctatcacgcagacaagtgtatccatcaagcagttgaaggatttgaggtcttcatgtattagagttgtctcgtcagcccttagtcactatgaaagccatgagtttggagaaaacttctggggtgtttttttttcttctgtgaaacctctgatagactgctttacacaagaggcttccagtagtgagaaaccaagttcattatttgcttgttttatggctatgagccggagcccaaaattagcaccactgttggggtcaaataatcttgtaccagctattttttctattttgactgtgaagacagcgtcaggatccatcaccacctatgcacttgagttcattgagaatctgttgaggttggatattgatttgcagcagcaagatgaacatttagtgaagaaagttcttcttcaacatatggatgttcttatccatagtctccatgattttgttaatcatcgcaaagagctcaacaggagatctggtacatggcttgggcaacgtgaacttaggctgttcaaattattgctaaattacatcacagatccctcagctgctgataacttcatagaccttattcttccatttttcagcaagaaagatttgaactccgacgattgtttggaagcactatgtgttgtgaggggaataattcaaaatctgagatgcaaagtatctgaaaaagttctaaatgcactgaacccattacttgcaattgttggattggaactgcgactatgtatctgtgatatttatgctgggttgtcattgaatgatccttcgatgttgtttctggctgggttaataggagatctgaatgcagtttcagcttcagaacttggtgaactagattatgacacaagacttaacacctatgataagggctctgcagtcgttcctggacttttccgcctcagttatgaataatgatgtgtccaaatactctattgatgataaatttagagagaataataccagaagcatttgcacgatgggctgtattcagaagatattggaaaaaacttatctgcacaatatgggagtagcaatgactaaagatgtatcaattcaaaaggaatggattattttacttagggagatggtctccaattttaatcatttagcatccttaagctcatttaggcctctctgtaaggtggatatagaagaggattttttccacaacataactcatttacaggctggtaaaagatcaaaagcactgttgctttttagacagggaatcaaggaaaacaacttttcagaggatatcactatgaaagtctttgttccactatttttcaatatgttttctgacgtaaaagctgggaaaggcgaacaagtcagagatatatgtttggatacactatctgctgttgctgccaaagtgcagtgggaacactatagaacaatattgaagagatgcttccgagaattaaaccttagacctgataagcagaagatcatattgaggctgatttgttccatattagatgcattccatttcatgaaacctgcaaatgatgcctcaggaaattctgatgctttgagtgaagatattgattcttcccttacattctctttggtcacagtctcttctgataagcaacagtacatgcaaaaggtagtgtttccacaggttcaaaagttgttaggatcagatccagagaaagtcaacgtcaacataaacctggtagcactgaaaatacttaagttgctaccggtggattattttgagtcccaactttcaagcatcattcatcgaatctgtaacttcctcaagaatcgtcttgaaagcatacgtgatgaagctaggtctgctttagctgcttctgttaaggaactggggattgggtatttgcagtttgtggtcaagatattaagagctatacttaaaagaggttttgagttacatgttctgggctacacacttcattatttgttgtcaaaaaacattactgctgatatgtatggtaggcttgactactgtttagaagatttgttggcagtggttgacagtgatttacttggagatgttgcagaacaaaaggaagttgaaaaacttgcctccaaaatgaaagagacaaagaagagaatgtcgtttgagactcttaagctgattgctcaaagtattacattcaagaccgatttactgaagaagataatctcacctgtttctttacatcttcagaagcaacttactccaaagttgaaaaccagacttgagatgatgctacacaacatagccttagggattgagtgcaactcatctactgaaacatcaaacttgtttatcttcgtatattgtcttattgaggatactattacaggaagcagatctgaatgcaaagagaatacacaatctagtcctgatcaagacagtactgtaagaaagaccttcctgggactaggtgagagtggatcacagaattcttatatacttaccaagtttgcacttgacttacttcgtaatcgtctgaagagcatcaagcttgacaaggaagatgaacaactcgtgaagatgttggatccttttgttgaccttctgcgaaagtgtatgagttcgaaacatgcaagtgtcctctcagccacatttagatgttttgccttgttggtgaaacttccgttgccatctctgagggacaatgcaattactataaaaaatgtacttatggagattttacagagagctggaaactccaatggtcatttagtcacatcttgttttaagctacttgctgatctacttagaggattcaggatttcactttcagataatgagcttcagatgcttgttcatacccctatgtttgtagatcttcagacaaacccttcccctgttgccttatcgcttctcaaaacaatagtcaggctaaaattggtttctcacgaaatttatgatatagttgttaagataggagagttgatggtaacaacattaactgaatctatacagcagcaatgcattcaaattatgctacaattttttctgaactatccactttctgagaagcgcttacagcaacatattgactttttcctggcaaacttaagttatgaacatccttcaggaagagaagcagtgcttgaaatgctccatgacattcttaccagatttccccagaggattattgatgagcagggtcaaaccttttttcttcatcttgtagttgctctagccaatgaacagcatcagaatgtgtcttcaatgatccttagagctattcaaaagctgttaggacgcattggtggtcagggaaagagttacatttatgagtattcactttcgtggtacactggtgagaagaaaagtttgtggagtgcttcagctcaggttattggtttacttgttggcgatcacacattacaaatgggcaagcaccttaaaagtattctggctgttgttaagaaaataatggaatcatctattattgcttctggagctatacaattaggcttatctgatgaagctgccctgccattgtggaaagagacttactactctgttgccatgatggagaggttacttcttcgctttccggagttgtattttgagaaaaacatggaggacatatggataatattatgcaagttgttgatccatcctcattcgatgttgcgtagtatttcaagctctctggtagcatcatattttgctacagtggagaagaggaaacatgaacagaaattggatgccccatcatggttgcttgttcaaccgagcaggctattcataatagctgtttccttgttgaaacaattgaggagtgagctgagtgatactacggcaaataatctgattgtacagaatgttgcatactcagtctgcaacttgcatatgttgattaggcaatcgacctccacacatcagttttggtctagcattagttctgatcgtggtgctttccttgagggttttgaattgcttggttcaagaaaagcaaaaaatatatttctcctttgtacttcaacatctagtgatgtatctggatctagcctcgacaccaacgaagagcctacatctttgttagtttcgtcaatcctaaagaagatgggaagaattgcaatgcaaatgcaggatacacagataaagaacgtgttcaattgcttcaatatgatttcatcagctcttggtcctgatgaatcactaacctatgctgatcacctcttggccccattgtataaagtttctgaaggatttgctgggaaagttgttagtgatgaagtgaagcaactggcccagggggtccagaacaagttacgtgacctgattggttccgagaaatttgttgaagtctacaagagcgttcggatgggcctgaaacagaagcgggacggtagaaagcaggcacagaagattgttgcagccgtggacccagaacgcaatgccaagcgaaagcagcgaatggcagccaagcaccgggaacacaagaggcgaaagataatggcgatgaagattggcaggtggatgagatagcttggtatttaggctctgcggaattcggtgaatcatataattgtagaggataatttttcgtgctacaagtgctggcataaaattatgtttctgttttatatgctgtctcactgacttactgcccgacgtaattttattgttgagttaccgaaccataccgtaagtaaaaattaagaggcataagcaatgaagacatagaattgattgaattatatttttttggggtggatggataagtaacaatatattattaaatgtgcaattaagagttttctggctgaggtttgc

SEQ ID NO: 29166 - DNA, 7637 bp, Zea Mays
ctactgttcatgccgtcatgacagggctgattcaaagattatgcgatgaagtggatccaaaagaattaccattgatgtatacttgtttatgtgaagaaatcaactgctgtcttgaggatggctgtttggagcatttgaagtgcttgattgtttttcttgcatttgctttacaaaagaagcaaaacaatgcattcgataaggtgaagatgattaaacttgttgagttgctggttagtagatatgtgttccctggtagcaacataacaggatcttcttcaattgaggttcttggaagtattcttgactttatgctttctgttctggatgttccaaccattttgggcaatttgtccatcatatcacctttctatgccccagtgttcaaacttaaaaatccgagggtgattgtctttataaagaaacttttggtaaaaggtccccaagttgcacaacattttgaaagtcaaatattaagtgcaatggataatttcattgtaagttcacccgaggatgtcatatttatccttttaaatttctttaaaggatcaaagaagcaaatatttctttgtagcactgatggaaatcatctggattcagtggagaaaacttgcaagttctttgaatcaaaattttctttgtggatagagttattagatgatacagccggcactggtaatcgatctagtaaccaggtcagtgagaaggaagctgctatactgtggggatcttttttctgctaccctaacatgaaaggtgtacatcaagatagtttgtcactgctgaggaagttaatcatcaactttgatcggttgcttgaagtgggagaagggaacatgaatggtcttccaatgactacctggagaggtctacttggtgcagcattgtcatcgtaccacaaactactgttggtcaacaccagcagaaattcagaatttagttttttcttatcgcttgccaagagtcacagtacatgcccacaagtactgtctgctgtagctgaatatttggattccctgcaaggagtatcatccatggaagtgacaaaagaatttgatccacaaaatctcttggagctgttctccatctttgctttcaatttgagcagtccaaccaaggatgttcggattttaacattgaggattctatcatattttgtgaagatggatcaacgtctaatcacagatgaggagcgaccacacaagaggcagagaacagaagtttctggagaggaagctgttgctaaatacgctaatgttgtggatattcttttgattattgagtcaatgccaatttcagtatctactagccgtaaaattgctatcttcatttctcggatacaaatgagtttatcttccaagatggttcatgatgattacatacctcctctcttacatggtattattggcatattgtacaatagatttagtgatctatggccacaaacactggattgccttgctgttctcattagaaaacacaaggagcttgtttggggtcagtttgttccgttcattgcaattcaccaatcaaaaggactgactgtgaaaaatcaggagaagctggaagctgcaacccaaccacagtctatttttgactgcttcaacttgtatcttgctatggactttgattgcacaccagctgtgaccgtggctaccttattgcttcaatcgctccaaaggattcctgatgttgctgaatcccgctctcgacaacttataccgctatttctcaactttatgggctatgatgatagcagcatctttagtgctgattcatatatgcctgaaaaatgtaaaggcaaacaatggaaagcgattctaaaagaatggttaaacttattgaggttaatgcacaatgcaagatcgttatatcagggcaattttctccaggaagtactaactaaaagggttcttgatgacagtgatcctgaaatacaagcaaaagcattggattgccttttgaactggaaggatgaattcttgatcccgtacagtcagaaccttaaaaatctgattgatgtaaagactcttcgtgaagagctgaccacatgggcagtttcacatgactccttgtcaattctgaaagaccatagaagtcgtgtggttcctctggttatccgcgtgttggcaccgaaagtaaggaaactgaagctactaggttctcgaaagcacacaggtgccagtcatcgaaaggcaattcttcgtttccttttgcagtttgattcaaatgaacttgagctttttttttctttacttctgaggtccttgatccctggcagcctccagcttaaaatgtttggttctcagccagacaaccttcttggaagtttctctgacattgttggaacttcaacagaaatttgtgtagagaattttacatggaaaaaggcaaatggtttcattcatctggttgaagaaatttttggtacttttgatatgccacatataagcccatttcttaatgttttattaatcattgtcgctcgcttgctggagagttgcatgaggaatcttagaaatgagagtgatgggaaatatccttgcaaccaaacaaatgaccatggtaatggttgttccataaattctgaagtgggcaattctgtgaacgtggatgaatgctttaaagaaatgcatctagaaggccatatggagacaagtgtatccatcaagcagttgaaggatttgaggtcttcatgtattagagttgtctcgtcagcccttagtcactatgaaagccatgagtttggagaaaacttctggggtgtttttttttcttctgtgaaacctctgatagactgctttacacaagaggcttccagtagtgagaaaccaagttcattatttgcttgttttatggctatgagccggagcccaaaattagcaccactgttggggtcaaataatcttgtaccagctattttttctattttgactgtgaagacagcgtcaggatccatcaccacctatgcacttgagttcattgagaatctgttgaggttggatattgatttgcagcagcaagatgaacatttagtgaagaaagttcttcttcaacatatggatgttcttatccatagtctccatgattttgttaatcatcgcaaagagctcaacaggagatctggtacatggcttgggcaacgtgaacttaggctgttcaaattattgctaaattacatcacagatccctcagctgctgataacttcatagaccttattcttccatttttcagcaagaaagatttgaactccgacgattgtttggaagcactatgtgttgtgaggggaataattcaaaatctgagatgcaaagtatctgaaaaagttctaaatgcactgaacccattacttgcaattgttggattggaactgcgactatgtatctgtgatatttatgctgggttgtcattgaatgatccttcgatgttgtttctggctgggttaataggagatctgaatgcagtttcagcttcagaacttggtgaactagattatgacacaagacttaacacctatgataaggttaggccacaattgtttcttggcttgacagaagagcatgtgggcgccatattatctcattgtgtgtatgatatgtcatctgaagaattaattttgcggcaaagtgcatctagggctctgcagtcgttcctggacttttccgcctcagttatgaataatgatgtgtccaaatactctattgatgataaatttagagagaataataccagaagcatttgcacgatgggctgtattcagaagatattggaaaaaacttatctgcacaatatgggagtagcaatgactaaagatgtatcaattcaaaaggaatggattattttacttagggagatggtctccaattttaatcatttagcatccttaagctcatttaggcctctctgtaaggtggatatagaagaggattttttccacaacataactcatttacaggctggtaaaagatcaaaagcactgttgctttttagacagggaatcaaggaaaacaacttttcagaggatatcactatgaaagtctttgttccactatttttcaatatgttttctgacgatatcactatgaaagtctttgttccactatttttcaatatgttttctgacgtaaaagctgggaaaggcgaacaagtcagagatatatgtttggatacactatctgctgttgctgccaaagtgcagtgggaacactatagaacaatattgaagagatgcttccgagaattaaaccttagacctgataagcagaagatcatattgaggctgatttgttccatattagatgcattccatttcatgaaacctgcaaatgatgcctcaggaaattctgatgctttgagtgaagatattgattcttcccttacattctctttggtcacagtctcttctgataagcaacagtacatgcaaaaggtagtgtttccacaggttcaaaagttgttaggatcagatccagagaaagtcaacgtcaacataaacctggtagcactgaaaatacttaagttgctaccggtggattattttgagtcccaactttcaagcatcattcatcgaatctgtaacttcctcaagaatcgtcttgaaagcatacgtgatgaagctaggtctgctttagctgcttctgttaaggaactggggattgggtatttgcagtttgtggtcaagatattaagagctatacttaaaagaggttttgagttacatgttctgggctacacacttcattatttgttgtcaaaaaacattactgctgatatgtatggtaggcttgactactgtttagaagatttgttggcagtggttgacagtgatttacttggagatgttgcagaacaaaaggaagttgaaaaacttgcctccaaaatgaaagagacaaagaagagaatgtcgtttgagactcttaagctgattgctcaaagtattacattcaagaccgatttactgaagaagataatctcacctgtttctttacatcttcagaagcaacttactccaaagttgaaaaccagacttgagatgatgctacacaacatagccttagggattgagtgcaactcatctactgaaacatcaaacttgtttatcttcgtatattgtcttattgaggatactattacaggaagcagatctgaatgcaaagagaatacacaatctagtcctgatcaagacagtactgtaagaaagaccttcctgggactaggtgagagtggatcacagaattcttatatacttaccaagtttgcacttgacttacttcgtaatcgtctgaagagcatcaagcttgacaaggaagatgaacaactcgtgaagatgttggatccttttgttgaccttctgcgaaagtgtatgagttcgaaacatgcaagtgtcctctcagccacatttagatgttttgccttgttggtgaaacttccgttgccatctctgagggacaatgcaattactataaaaaatgtacttatggagattttacagagagctggaaactccaatggtcatttagtcacatcttgttttaagctacttgctgatctacttagaggattcaggatttcactttcagataatgagcttcagatgcttgttcatacccctatgtttgtagatcttcagacaaacccttcccctgttgccttatcgcttctcaaaacaatagtcaggctaaaattggtttctcacgaaatttatgatatagttgttaagataggagagttgatggtaacaacattaactgaatctatacagcagcaatgcattcaaattatgctacaattttttctgaactatccactttctgagaagcgcttacagcaacatattgactttttcctggcaaacttaaggtatgatgaatatccatagttactttatcatgatatctcactgtatgctaacactctggaaaattgcagttatgaacatccttcaggaagagaagcagtgcttgaaatgctccatgacattcttaccagatttccccagaggattattgatgagcagggtcaaaccttttttcttcatcttgtagttgctctagccaatgaacagcatcagaatgtgtcttcaatgatccttagagctattcaaaagctgttaggacgcattggtggtcagggaaagagttacatttatgagtattcactttcgtggtacactggtgagaagaaaagtttgtggagtgcttcagctcaggttattggtttacttgttggcgatcacacattacaaatgggcaagcaccttaaaagtattctggctgttgttaagaaaataatggaatcatctattattgcttctggagctatacaattaggcttatctgatgaagctgccctgccattgtggaaagagacttactactctgttgccatgatggagaggttacttcttcgctttccggagttgtattttgagaaaaacatggaggacatatggataatattatgcaagttgttgatccatcctcattcgatgttgcgtagtatttcaagctctctggtagcatcatattttgctacagtggagaagaggaaacatgaacagaaattggatgccccatcatggttgcttgttcaaccgagcaggctattcataatagctgtttccttgttgaaacaattgaggagtgagctgagtgatactacggcaaataatctgattgtacagaatgttgcatactcagtctgcaacttgcatatgttgattaggcaatcgacctccacacatcagttttggtctagcattagttctgatcgtggtgctttccttgagggttttgaattgcttggttcaagaaaagcaaaaaatatatttctcctttgtacttcaacatctagtgatgtatctggatctagcctcgacaccaacgaagagcctacatctttgttagtttcgtcaatcctaaagaagatgggaagaattgcaatgcaaatgcaggatacacagataaagaacgtgttcaattgcttcaatatgatttcatcagctcttggtcctgatgaatcactaacctatgctgatcacctcttggccccattgtataaagtttctgaaggatttgctgggaaagttgttagtgatgaagtgaagcaactggcccagggggtccagaacaagttacgtgacctgattggttccgagaaatttgttgaagtctacaagagcgttcggatgggcctgaaacagaagcgggacggtagaaagcaggcacagaagattgttgcagccgtggacccagaacgcaatgccaagcgaaagcagcgaatggcagccaagcaccgggaacacaagaggcgaaagataatggcgatgaagattggcaggtggatgagatagcttggtatttaggctctgcggaattcggtgaatcatataattgtagaggataatttttcgtgctacaagtgctggcataaaattatgtttctgttttatatgctgtctcactgacttactgcccgacgtaattttattgttgagttaccgaaccataccgtaagtaaaaattaagaggcataagcaatgaagacatagaattgattgaattatatttttttggggtggatggataagtaacaatatattattaaatgtgcaattaagagttttctggctgaggtttgc

SEQ ID NO: 29167 - DNA, 7228 bp, Zea Mays
ctactgttcatgccgtcatgacagggctgattcaaagattatgcgatgaagtggatccaaaagaattaccattgatgtatacttgtttatgtgaagaaatcaactgctgtcttgaggatggctgtttggagcatttgaagtgcttgattgtttttcttgcatttgctttacaaaagaagcaaaacaatgcattcgataaggtgaagatgattaaacttgttgagttgctggttagtagatatgtgttccctggtagcaacataacaggatcttcttcaattgaggttcttggaagtattcttgactttatgctttctgttctggatgttccaaccattttgggcaatttgtccatcatatcacctttctatgccccagtgttcaaacttaaaaatccgagggtgattgtctttataaagaaacttttggtaaaaggtccccaagttgcacaacattttgaaagtcaaatattaagtgcaatggataatttcattgtaagttcacccgaggatgtcatatttatccttttaaatttctttaaaggatcaaagaagcaaatatttctttgtagcactgatggaaatcatctggattcagtggagaaaacttgcaagttctttgaatcaaaattttctttgtggatagagttattagatgatacagccggcactggtaatcgatctagtaaccaggtcagtgagaaggaagctgctatactgtggggatcttttttctgctaccctaacatgaaaggtgtacatcaagatagtttgtcactgctgaggaagttaatcatcaactttgatcggttgcttgaagtgggagaagggaacatgaatggtcttccaatgactacctggagaggtctacttggtgcagcattgtcatcgtaccacaaactactgttggtcaacaccagcagaaattcagaatttagttttttcttatcgcttgccaagagtcacagtacatgcccacaagtactgtctgctgtagctgaatatttggattccctgcaaggagtatcatccatggaagtgacaaaagaatttgatccacaaaatctcttggagctgttctccatctttgctttcaatttgagcagtccaaccaaggatgttcggattttaacattgaggattctatcatattttgtgaagatggatcaacgtctaatcacagatgaggagcgaccacacaagaggcagagaacagaagtttctggagaggaagctgttgctaaatacgctaatgttgtggatattcttttgattattgagtcaatgccaatttcagtatctactagccgtaaaattgctatcttcatttctcggatacaaatgagtttatcttccaagatggttcatgatgattacatacctcctctcttacatggtattattggcatattgtacaatagatttagtgatctatggccacaaacactggattgccttgctgttctcattagaaaacacaaggagcttgtttggggtcagtttgttccgttcattgcaattcaccaatcaaaaggactgactgtgaaaaatcaggagaagctggaagctgcaacccaaccacagtctatttttgactgcttcaacttgtatcttgctatggactttgattgcacaccagctgtgaccgtggctaccttattgcttcaatcgctccaaaggattcctgatgttgctgaatcccgctctcgacaacttataccgctatttctcaactttatgggctatgatgatagcagcatctttagtgctgattcatatatgcctgaaaaatgtaaaggcaaacaatggaaagcgattctaaaagaatggttaaacttattgaggttaatgcacaatgcaagatcgttatatcagggcaattttctccaggaagtactaactaaaagggttcttgatgacagtgatcctgaaatacaagcaaaagcattggattgccttttgaactggaaggatgaattcttgatcccgtacagtcagaaccttaaaaatctgattgatgtaaagactcttcgtgaagagctgaccacatgggcagtttcacatgactccttgtcaattctgaaagaccatagaagtcgtgtggttcctctggttatccgcgtgttggcaccgaaagtaaggaaactgaagctactaggttctcgaaagcacacaggtgccagtcatcgaaaggcaattcttcgtttccttttgcagtttgattcaaatgaacttgagctttttttttctttacttctgaggtccttgatccctggcagcctccagcttaaaatgtttggttctcagccagacaaccttcttggaagtttctctgacattgttggaacttcaacagaaatttgtgtagagaattttacatggaaaaaggcaaatggtttcattcatctggttgaagaaatttttggtacttttgatatgccacatataagcccatttcttaatgttttattaatcattgtcgctcgcttgctggagagttgcatgaggaatcttagaaatgagagtgatgggaaatatccttgcaaccaaacaaatgaccatggtaatggttgttccataaattctgaagtgggcaattctgtgaacgtggatgaatgctttaaagaaatgcatctagaaggccatatggagcagcgtcaggatccatcaccacctatgcacttgagttcattgagaatctgttgaggttggatattgatttgcagcagcaagatgaacatttagtgaagaaagttcttcttcaacatatggatgttcttatccatagtctccatgattttgttaatcatcgcaaagagctcaacaggagatctggtacatggcttgggcaacgtgaacttaggctgttcaaattattgctaaattacatcacagatccctcagctgctgataacttcatagaccttattcttccatttttcagcaagaaagatttgaactccgacgattgtttggaagcactatgtgttgtgaggggaataattcaaaatctgagatgcaaagtatctgaaaaagttctaaatgcactgaacccattacttgcaattgttggattggaactgcgactatgtatctgtgatatttatgctgggttgtcattgaatgatccttcgatgttgtttctggctgggttaataggagatctgaatgcagtttcagcttcagaacttggtgaactagattatgacacaagacttaacacctatgataaggttaggccacaattgtttcttggcttgacagaagagcatgtgggcgccatattatctcattgtgtgtatgatatgtcatctgaagaattaattttgcggcaaagtgcatctagggctctgcagtcgttcctggacttttccgcctcagttatgaataatgatgtgtccaaatactctattgatgataaatttagagagaataataccagaagcatttgcacgatgggctgtattcagaagatattggaaaaaacttatctgcacaatatgggagtagcaatgactaaagatgtatcaattcaaaaggaatggattattttacttagggagatggtctccaattttaatcatttagcatccttaagctcatttaggcctctctgtaaggtggatatagaagaggattttttccacaacataactcatttacaggctggtaaaagatcaaaagcactgttgctttttagacagggaatcaaggaaaacaacttttcagaggatatcactatgaaagtctttgttccactatttttcaatatgttttctgacgtaaaagctgggaaaggcgaacaagtcagagatatatgtttggatacactatctgctgttgctgccaaagtgcagtgggaacactatagaacaatattgaagagatgcttccgagaattaaaccttagacctgataagcagaagatcatattgaggctgatttgttccatattagatgcattccatttcatgaaacctgcaaatgatgcctcaggaaattctgatgctttgagtgaagatattgattcttcccttacattctctttggtcacagtctcttctgataagcaacagtacatgcaaaaggtagtgtttccacaggttcaaaagttgttaggatcagatccagagaaagtcaacgtcaacataaacctggtagcactgaaaatacttaagttgctaccggtggattattttgagtcccaactttcaagcatcattcatcgaatctgtaacttcctcaagaatcgtcttgaaagcatacgtgatgaagctaggtctgctttagctgcttctgttaaggaactggggattgggtatttgcagtttgtggtcaagatattaagagctatacttaaaagaggttttgagttacatgttctgggctacacacttcattatttgttgtcaaaaaacattactgctgatatgtatggtaggcttgactactgtttagaagatttgttggcagtggttgacagtgatttacttggagatgttgcagaacaaaaggaagttgaaaaacttgcctccaaaatgaaagagacaaagaagagaatgtcgtttgagactcttaagctgattgctcaaagtattacattcaagaccgatttactgaagaagataatctcacctgtttctttacatcttcagaagcaacttactccaaagttgaaaaccagacttgagatgatgctacacaacatagccttagggattgagtgcaactcatctactgaaacatcaaacttgtttatcttcgtatattgtcttattgaggatactattacaggaagcagatctgaatgcaaagagaatacacaatctagtcctgatcaagacagtactgtaagaaagaccttcctgggactaggtgagagtggatcacagaattcttatatacttaccaagtttgcacttgacttacttcgtaatcgtctgaagagcatcaagcttgacaaggaagatgaacaactcgtgaagatgttggatccttttgttgaccttctgcgaaagtgtatgagttcgaaacatgcaagtgtcctctcagccacatttagatgttttgccttgttggtgaaacttccgttgccatctctgagggacaatgcaattactataaaaaatgtacttatggagattttacagagagctggaaactccaatggtcatttagtcacatcttgttttaagctacttgctgatctacttagaggattcaggatttcactttcagataatgagcttcagatgcttgttcatacccctatgtttgtagatcttcagacaaacccttcccctgttgccttatcgcttctcaaaacaatagtcaggctaaaattggtttctcacgaaatttatgatatagttgttaagataggagagttgatggtaacaacattaactgaatctatacagcagcaatgcattcaaattatgctacaattttttctgaactatccactttctgagaagcgcttacagcaacatattgactttttcctggcaaacttaagttatgaacatccttcaggaagagaagcagtgcttgaaatgctccatgacattcttaccagatttccccagaggattattgatgagcagggtcaaaccttttttcttcatcttgtagttgctctagccaatgaacagcatcagaatgtgtcttcaatgatccttagagctattcaaaagctgttaggacgcattggtggtcagggaaagagttacatttatgagtattcactttcgtggtacactggtgagaagaaaagtttgtggagtgcttcagctcaggttattggtttacttgttggcgatcacacattacaaatgggcaagcaccttaaaagtattctggctgttgttaagaaaataatggaatcatctattattgcttctggagctatacaattaggcttatctgatgaagctgccctgccattgtggaaagagacttactactctgttgccatgatggagaggttacttcttcgctttccggagttgtattttgagaaaaacatggaggacatatggataatattatgcaagttgttgatccatcctcattcgatgttgcgtagtatttcaagctctctggtagcatcatattttgctacagtggagaagaggaaacatgaacagaaattggatgccccatcatggttgcttgttcaaccgagcaggctattcataatagctgtttccttgttgaaacaattgaggagtgagctgagtgatactacggcaaataatctgattgtacagaatgttgcatactcagtctgcaacttgcatatgttgattaggcaatcgacctccacacatcagttttggtctagcattagttctgatcgtggtgctttccttgagggttttgaattgcttggttcaagaaaagcaaaaaatatatttctcctttgtacttcaacatctagtgatgtatctggatctagcctcgacaccaacgaagagcctacatctttgttagtttcgtcaatcctaaagaagatgggaagaattgcaatgcaaatgcaggatacacagataaagaacgtgttcaattgcttcaatatgatttcatcagctcttggtcctgatgaatcactaacctatgctgatcacctcttggccccattgtataaagtttctgaaggatttgctgggaaagttgttagtgatgaagtgaagcaactggcccagggggtccagaacaagttacgtgacctgattggttccgagaaatttgttgaagtctacaagagcgttcggatgggcctgaaacagaagcgggacggtagaaagcaggcacagaagattgttgcagccgtggacccagaacgcaatgccaagcgaaagcagcgaatggcagccaagcaccgggaacacaagaggcgaaagataatggcgatgaagattggcaggtggatgagatagcttggtatttaggctctgcggaattcggtgaatcatataattgtagaggataatttttcgtgctacaagtgctggcataaaattatgtttctgttttatatgctgtctcactgacttactgcccgacgtaattttattgttgagttaccgaaccataccgtaagtaaaaattaagaggcataagcaatgaagacatagaattgattgaattatatttttttggggtggatggataagtaacaatatattattaaatgtgcaattaagagttttctggctgaggtttgc

SEQ ID NO: 29168 - DNA, 7650 bp, Zea Mays
catgccgtcatgacagggctgattcaaagattatgcgatgaagtggatccaaaagaattaccattgatgtatacttgtttatgtgaagaaatcaactgctgtcttgaggatggctgtttggagcatttgaagtgcttgattgtttttcttgcatttgctttacaaaagaagcaaaacaatgcattcgataaggtgaagatgattaaacttgttgagttgctggttagtagatatgtgttccctggtagcaacataacaggatcttcttcaattgaggttcttggaagtattcttgactttatgctttctgttctggatgttccaaccattttgggcaatttgtccatcatatcacctttctatgccccagtgttcaaacttaaaaatccgagggtgattgtctttataaagaaacttttggtaaaaggtccccaagttgcacaacattttgaaagtcaaatattaagtgcaatggataatttcattgtaagttcacccgaggatgtcatatttatccttttaaatttctttaaaggatcaaagaagcaaatatttctttgtagcactgatggaaatcatctggattcagtggagaaaacttgcaagttctttgaatcaaaattttctttgtggatagagttattagatgatacagccggcactggtaatcgatctagtaaccaggtcagtgagaaggaagctgctatactgtggggatcttttttctgctaccctaacatgaaaggtgtacatcaagatagtttgtcactgctgaggaagttaatcatcaactttgatcggttgcttgaagtgggagaagggaacatgaatggtcttccaatgactacctggagaggtctacttggtgcagcattgtcatcgtaccacaaactactgttggtcaacaccagcagaaattcagaatttagttttttcttatcgcttgccaagagtcacagtacatgcccacaagtactgtctgctgtagctgaatatttggattccctgcaaggagtatcatccatggaagtgacaaaagaatttgatccacaaaatctcttggagctgttctccatctttgctttcaatttgagcagtccaaccaaggatgttcggattttaacattgaggattctatcatattttgtgaagatggatcaacgtctaatcacagatgaggagcgaccacacaagaggcagagaacagaagtttctggagaggaagctgttgctaaatacgctaatgttgtggatattcttttgattattgagtcaatgccaatttcagtatctactagccgtaaaattgctatcttcatttctcggatacaaatgagtttatcttccaagatggttcatgatgattacatacctcctctcttacatggtattattggcatattgtacaatagatttagtgatctatggccacaaacactggattgccttgctgttctcattagaaaacacaaggagcttgtttggggtcagtttgttccgttcattgcaattcaccaatcaaaaggactgactgtgaaaaatcaggagaagctggaagctgcaacccaaccacagtctatttttgactgcttcaacttgtatcttgctatggactttgattgcacaccagctgtgaccgtggctaccttattgcttcaatcgctccaaaggattcctgatgttgctgaatcccgctctcgacaacttataccgctatttctcaactttatgggctatgatgatagcagcatctttagtgctgattcatatatgcctgaaaaatgtaaaggcaaacaatggaaagcgattctaaaagaatggttaaacttattgaggttaatgcacaatgcaagatcgttatatcagggcaattttctccaggaagtactaactaaaagggttcttgatgacagtgatcctgaaatacaagcaaaagcattggattgccttttgaactggaaggatgaattcttgatcccgtacagtcagaaccttaaaaatctgattgatgtaaagactcttcgtgaagagctgaccacatgggcagtttcacatgactccttgtcaattctgaaagaccatagaagtcgtgtggttcctctggttatccgcgtgttggcaccgaaagtaaggaaactgaagctactaggttctcgaaagcacacaggtgccagtcatcgaaaggcaattcttcgtttccttttgcagtttgattcaaatgaacttgagctttttttttctttacttctgaggtccttgatccctggcagcctccagcttaaaatgtttggttctcagccagacaaccttcttggaagtttctctgacattgttggaacttcaacagaaatttgtgtagagaattttacatggaaaaaggcaaatggtttcattcatctggttgaagaaatttttggtacttttgatatgccacatataagcccatttcttaatgttttattaatcattgtcgctcgcttgctggagagttgcatgaggaatcttagaaatgagagtgatgggaaatatccttgcaaccaaacaaatgaccatggtaatggttgttccataaattctgaagtgggcaattctgtgaacgtggatgaatgctttaaagaaatgcatctagaaggccatatggagcaacctcactctatcacgcagacaagtgtatccatcaagcagttgaaggatttgaggtcttcatgtattagagttgtctcgtcagcccttagtcactatgaaagccatgagtttggagaaaacttctggggtgtttttttttcttctgtgaaacctctgatagactgctttacacaagaggcttccagtagtgagaaaccaagttcattatttgcttgttttatggctatgagccggagcccaaaattagcaccactgttggggtcaaataatcttgtaccagctattttttctattttgactgtgaagacagcgtcaggatccatcaccacctatgcacttgagttcattgagaatctgttgaggttggatattgatttgcagcagcaagatgaacatttagtgaagaaagttcttcttcaacatatggatgttcttatccatagtctccatgattttgttaatcatcgcaaagagctcaacaggagatctggtacatggcttgggcaacgtgaacttaggctgttcaaattattgctaaattacatcacagatccctcagctgctgataacttcatagaccttattcttccatttttcagcaagaaagatttgaactccgacgattgtttggaagcactatgtgttgtgaggggaataattcaaaatctgagatgcaaagtatctgaaaaagttctaaatgcactgaacccattacttgcaattgttggattggaactgcgactatgtatctgtgatatttatgctgggttgtcattgaatgatccttcgatgttgtttctggctgggttaataggagatctgaatgcagtttcagcttcagaacttggtgaactagattatgacacaagacttaacacctatgataaggttaggccacaattgtttcttggcttgacagaagagcatgtgggcgccatattatctcattgtgtgtatgatatgtcatctgaagaattaattttgcggcaaagtgcatctagggctctgcagtcgttcctggacttttccgcctcagttatgaataatgatgtgtccaaatactctattgatgataaatttagagagaataataccagaagcatttgcacgatgggctgtattcagaagatattggaaaaaacttatctgcacaatatgggagtagcaatgactaaagatgtatcaattcaaaaggaatggattattttacttagggagatggtctccaattttaatcatttagcatccttaagctcatttaggcctctctgtaaggtggatatagaagaggattttttccacaacataactcatttacaggctggtaaaagatcaaaagcactgttgctttttagacagggaatcaaggaaaacaacttttcagaggatatcactatgaaagtctttgttccactatttttcaatatgttttctgacgatatcactatgaaagtctttgttccactatttttcaatatgttttctgacgtaaaagctgggaaaggcgaacaagtcagagatatatgtttggatacactatctgctgttgctgccaaagtgcagtgggaacactatagaacaatattgaagagatgcttccgagaattaaaccttagacctgataagcagaagatcatattgaggctgatttgttccatattagatgcattccatttcatgaaacctgcaaatgatgcctcaggaaattctgatgctttgagtgaagatattgattcttcccttacattctctttggtcacagtctcttctgataagcaacagtacatgcaaaaggtagtgtttccacaggttcaaaagttgttaggatcagatccagagaaagtcaacgtcaacataaacctggtagcactgaaaatacttaagttgctaccggtggattattttgagtcccaactttcaagcatcattcatcgaatctgtaacttcctcaagaatcgtcttgaaagcatacgtgatgaagctaggtctgctttagctgcttctgttaaggaactggggattgggtatttgcagtttgtggtcaagatattaagagctatacttaaaagaggttttgagttacatgttctgggctacacacttcattatttgttgtcaaaaaacattactgctgatatgtatggtaggcttgactactgtttagaagatttgttggcagtggttgacagtgatttacttggagatgttgcagaacaaaaggaagttgaaaaacttgcctccaaaatgaaagagacaaagaagagaatgtcgtttgagactcttaagctgattgctcaaagtattacattcaagaccgatttactgaagaagataatctcacctgtttctttacatcttcagaagcaacttactccaaagttgaaaaccagacttgagatgatgctacacaacatagccttagggattgagtgcaactcatctactgaaacatcaaacttgtttatcttcgtatattgtcttattgaggatactattacaggaagcagatctgaatgcaaagagaatacacaatctagtcctgatcaagacagtactgtaagaaagaccttcctgggactaggtgagagtggatcacagaattcttatatacttaccaagtttgcacttgacttacttcgtaatcgtctgaagagcatcaagcttgacaaggaagatgaacaactcgtgaagatgttggatccttttgttgaccttctgcgaaagtgtatgagttcgaaacatgcaagtgtcctctcagccacatttagatgttttgccttgttggtgaaacttccgttgccatctctgagggacaatgcaattactataaaaaatgtacttatggagattttacagagagctggaaactccaatggtcatttagtcacatcttgttttaagctacttgctgatctacttagaggattcaggatttcactttcagataatgagcttcagatgcttgttcatacccctatgtttgtagatcttcagacaaacccttcccctgttgccttatcgcttctcaaaacaatagtcaggctaaaattggtttctcacgaaatttatgatatagttgttaagataggagagttgatggtaacaacattaactgaatctatacagcagcaatgcattcaaattatgctacaattttttctgaactatccactttctgagaagcgcttacagcaacatattgactttttcctggcaaacttaaggtatgatgaatatccatagttactttatcatgatatctcactgtatgctaacactctggaaaattgcagttatgaacatccttcaggaagagaagcagtgcttgaaatgctccatgacattcttaccagatttccccagaggattattgatgagcagggtcaaaccttttttcttcatcttgtagttgctctagccaatgaacagcatcagaatgtgtcttcaatgatccttagagctattcaaaagctgttaggacgcattggtggtcagggaaagagttacatttatgagtattcactttcgtggtacactggtgagaagaaaagtttgtggagtgcttcagctcaggttattggtttacttgttggcgatcacacattacaaatgggcaagcaccttaaaagtattctggctgttgttaagaaaataatggaatcatctattattgcttctggagctatacaattaggcttatctgatgaagctgccctgccattgtggaaagagacttactactctgttgccatgatggagaggttacttcttcgctttccggagttgtattttgagaaaaacatggaggacatatggataatattatgcaagttgttgatccatcctcattcgatgttgcgtagtatttcaagctctctggtagcatcatattttgctacagtggagaagaggaaacatgaacagaaattggatgccccatcatggttgcttgttcaaccgagcaggctattcataatagctgtttccttgttgaaacaattgaggagtgagctgagtgatactacggcaaataatctgattgtacagaatgttgcatactcagtctgcaacttgcatatgttgattaggcaatcgacctccacacatcagttttggtctagcattagttctgatcgtggtgctttccttgagggttttgaattgcttggttcaagaaaagcaaaaaatatatttctcctttgtacttcaacatctagtgatgtatctggatctagcctcgacaccaacgaagagcctacatctttgttagtttcgtcaatcctaaagaagatgggaagaattgcaatgcaaatgcaggatacacagataaagaacgtgttcaattgcttcaatatgatttcatcagctcttggtcctgatgaatcactaacctatgctgatcacctcttggccccattgtataaagtttctgaaggatttgctgggaaagttgttagtgatgaagtgaagcaactggcccagggggtccagaacaagttacgtgacctgattggttccgagaaatttgttgaagtctacaagagcgttcggatgggcctgaaacagaagcgggacggtagaaagcaggcacagaagattgttgcagccgtggacccagaacgcaatgccaagcgaaagcagcgaatggcagccaagcaccgggaacacaagaggcgaaagataatggcgatgaagattggcaggtggatgagatagcttggtatttaggctctgcggaattcggtgaatcatataattgtagaggataatttttcgtgctacaagtgctggcataaaattatgtttctgttttatatgctgtctcactgacttactgcccgacgtaattttattgttgagttaccgaaccataccgtaagtaaaaattaagaggcataagcaatgaagacatagaattgattgaattatatttttttggggtggatggataagtaacaatatattattaaatgtgcaattaagagttttctggctgaggtttgc

SEQ ID NO: 29169 - DNA, 4536 bp, Zea Mays
ggtatatttttaaaaagggcagacctagtgctggaggctctcatatgagtgggatctggggaatggagatctggtacatggcttgggcaacgtgaacttaggctgttcaaattattgctaaattacatcacagatccctcagctgctgataacttcatagaccttattcttccatttttcagcaagaaagatttgaactccgacgattgtttggaagcactatgtgttgtgaggggaataattcaaaatctgagatgcaaagtatctgaaaaagttctaaatgcactgaacccattacttgcaattgttggattggaactgcgactatgtatctgtgatatttatgctgggttgtcattgaatgatccttcgatgttgtttctggctgggttaataggagatctgaatgcagtttcagcttcagaacttggtgaactagattatgacacaagacttaacacctatgataaggttaggccacaattgtttcttggcttgacagaagagcatgtgggcgccatattatctcattgtgtgtatgatatgtcatctgaagaattaattttgcggcaaagtgcatctagggctctgcagtcgttcctggacttttccgcctcagttatgaataatgatgtgtccaaatactctattgatgataaatttagagagaataataccagaagcatttgcacgatgggctgtattcagaagatattggaaaaaacttatctgcacaatatgggagtagcaatgactaaagatgtatcaattcaaaaggaatggattattttacttagggagatggtctccaattttaatcatttagcatccttaagctcatttaggcctctctgtaaggtggatatagaagaggattttttccacaacataactcatttacaggctggtaaaagatcaaaagcactgttgctttttagacagggaatcaaggaaaacaacttttcagaggatatcactatgaaagtctttgttccactatttttcaatatgttttctgacgtaaaagctgggaaaggcgaacaagtcagagatatatgtttggatacactatctgctgttgctgccaaagtgcagtgggaacactatagaacaatattgaagagatgcttccgagaattaaaccttagacctgataagcagaagatcatattgaggctgatttgttccatattagatgcattccatttcatgaaacctgcaaatgatgcctcaggaaattctgatgctttgagtgaagatattgattcttcccttacattctctttggtcacagtctcttctgataagcaacagtacatgcaaaaggtagtgtttccacaggttcaaaagttgttaggatcagatccagagaaagtcaacgtcaacataaacctggtagcactgaaaatacttaagttgctaccggtggattattttgagtcccaactttcaagcatcattcatcgaatctgtaacttcctcaagaatcgtcttgaaagcatacgtgatgaagctaggtctgctttagctgcttctgttaaggaactggggattgggtatttgcagtttgtggtcaagatattaagagctatacttaaaagaggttttgagttacatgttctgggctacacacttcattatttgttgtcaaaaaacattactgctgatatgtatggtaggcttgactactgtttagaagatttgttggcagtggttgacagtgatttacttggagatgttgcagaacaaaaggaagttgaaaaacttgcctccaaaatgaaagagacaaagaagagaatgtcgtttgagactcttaagctgattgctcaaagtattacattcaagaccgatttactgaagaagataatctcacctgtttctttacatcttcagaagcaacttactccaaagttgaaaaccagacttgagatgatgctacacaacatagccttagggattgagtgcaactcatctactgaaacatcaaacttgtttatcttcgtatattgtcttattgaggatactattacaggaagcagatctgaatgcaaagagaatacacaatctagtcctgatcaagacagtactgtaagaaagaccttcctgggactaggtgagagtggatcacagaattcttatatacttaccaagtttgcacttgacttacttcgtaatcgtctgaagagcatcaagcttgacaaggaagatgaacaactcgtgaagatgttggatccttttgttgaccttctgcgaaagtgtatgagttcgaaacatgcaagtgtcctctcagccacatttagatgttttgccttgttggtgaaacttccgttgccatctctgagggacaatgcaattactataaaaaatgtacttatggagattttacagagagctggaaactccaatggtcatttagtcacatcttgttttaagctacttgctgatctacttagaggattcaggatttcactttcagataatgagcttcagatgcttgttcatacccctatgtttgtagatcttcagacaaacccttcccctgttgccttatcgcttctcaaaacaatagtcaggctaaaattggtttctcacgaaatttatgatatagttgttaagataggagagttgatggtaacaacattaactgaatctatacagcagcaatgcattcaaattatgctacaattttttctgaactatccactttctgagaagcgcttacagcaacatattgactttttcctggcaaacttaaggtatgatgaatatccatagttactttatcatgatatctcactgtatgctaacactctggaaaattgcagttatgaacatccttcaggaagagaagcagtgcttgaaatgctccatgacattcttaccagatttccccagaggattattgatgagcagggtcaaaccttttttcttcatcttgtagttgctctagccaatgaacagcatcagaatgtgtcttcaatgatccttagagctattcaaaagctgttaggacgcattggtggtcagggaaagagttacatttatgagtattcactttcgtggtacactggtgagaagaaaagtttgtggagtgcttcagctcaggttattggtttacttgttggcgatcacacattacaaatgggcaagcaccttaaaagtattctggctgttgttaagaaaataatggaatcatctattattgcttctggagctatacaattaggcttatctgatgaagctgccctgccattgtggaaagagacttactactctgttgccatgatggagaggttacttcttcgctttccggagttgtattttgagaaaaacatggaggacatatggataatattatgcaagttgttgatccatcctcattcgatgttgcgtagtatttcaagctctctggtagcatcatattttgctacagtggagaagaggaaacatgaacagaaattggatgccccatcatggttgcttgttcaaccgagcaggctattcataatagctgtttccttgttgaaacaattgaggagtgagctgagtgatactacggcaaataatctgattgtacagaatgttgcatactcagtctgcaacttgcatatgttgattaggcaatcgacctccacacatcagttttggtctagcattagttctgatcgtggtgctttccttgagggttttgaattgcttggttcaagaaaagcaaaaaatatatttctcctttgtacttcaacatctagtgatgtatctggatctagcctcgacaccaacgaagagcctacatctttgttagtttcgtcaatcctaaagaagatgggaagaattgcaatgcaaatgcaggatacacagataaagaacgtgttcaattgcttcaatatgatttcatcagctcttggtcctgatgaatcactaacctatgctgatcacctcttggccccattgtataaagtttctgaaggatttgctgggaaagttgttagtgatgaagtgaagcaactggcccagggggtccagaacaagttacgtgacctgattggttccgagaaatttgttgaagtctacaagagcgttcggatgggcctgaaacagaagcgggacggtagaaagcaggcacagaagattgttgcagccgtggacccagaacgcaatgccaagcgaaagcagcgaatggcagccaagcaccgggaacacaagaggcgaaagataatggcgatgaagattggcaggtggatgagatagcttggtatttaggctctgcggaattcggtgaatcatataattgtagaggataatttttcgtgctacaagtgctggcataaaattatgtttctgttttatatgctgtctcactgacttactgcccgacgtaattttattgttgagttaccgaaccataccgtaagtaaaaattaagaggcataagcaatgaagacatagaattgattgaattatatttttttggggtggatggataagtaacaatatattattaaatgtgcaattaagagttttctggctgaggtttgc

SEQ ID NO: 29170 - DNA, 4514 bp, Zea Mays
atcaaatgcatagttattgtgatgtttccactctacccccaattaaatgccttgaaggaagaagattatttgtagcattctatttaattgggttatggatggtgatttcacagagatctggtacatggcttgggcaacgtgaacttaggctgttcaaattattgctaaattacatcacagatccctcagctgctgataacttcatagaccttattcttccatttttcagcaagaaagatttgaactccgacgattgtttggaagcactatgtgttgtgaggggaataattcaaaatctgagatgcaaagtatctgaaaaagttctaaatgcactgaacccattacttgcaattgttggattggaactgcgactatgtatctgtgatatttatgctgggttgtcattgaatgatccttcgatgttgtttctggctgggttaataggagatctgaatgcagtttcagcttcagaacttggtgaactagattatgacacaagacttaacacctatgataaggttaggccacaattgtttcttggcttgacagaagagcatgtgggcgccatattatctcattgtgtgtatgatatgtcatctgaagaattaattttgcggcaaagtgcatctagggctctgcagtcgttcctggacttttccgcctcagttatgaataatgatgtgtccaaatactctattgatgataaatttagagagaataataccagaagcatttgcacgatgggctgtattcagaagatattggaaaaaacttatctgcacaatatgggagtagcaatgactaaagatgtatcaattcaaaaggaatggattattttacttagggagatggtctccaattttaatcatttagcatccttaagctcatttaggcctctctgtaaggtggatatagaagaggattttttccacaacataactcatttacaggctggtaaaagatcaaaagcactgttgctttttagacagggaatcaaggaaaacaacttttcagaggatatcactatgaaagtctttgttccactatttttcaatatgttttctgacgtaaaagctgggaaaggcgaacaagtcagagatatatgtttggatacactatctgctgttgctgccaaagtgcagtgggaacactatagaacaatattgaagagatgcttccgagaattaaaccttagacctgataagcagaagatcatattgaggctgatttgttccatattagatgcattccatttcatgaaacctgcaaatgatgcctcaggaaattctgatgctttgagtgaagatattgattcttcccttacattctctttggtcacagtctcttctgataagcaacagtacatgcaaaaggtagtgtttccacaggttcaaaagttgttaggatcagatccagagaaagtcaacgtcaacataaacctggtagcactgaaaatacttaagttgctaccggtggattattttgagtcccaactttcaagcatcattcatcgaatctgtaacttcctcaagaatcgtcttgaaagcatacgtgatgaagctaggtctgctttagctgcttctgttaaggaactggggattgggtatttgcagtttgtggtcaagatattaagagctatacttaaaagaggttttgagttacatgttctgggctacacacttcattatttgttgtcaaaaaacattactgctgatatgtatggtaggcttgactactgtttagaagatttgttggcagtggttgacagtgatttacttggagatgttgcagaacaaaaggaagttgaaaaacttgcctccaaaatgaaagagacaaagaagagaatgtcgtttgagactcttaagctgattgctcaaagtattacattcaagaccgatttactgaagaagataatctcacctgtttctttacatcttcagaagcaacttactccaaagttgaaaaccagacttgagatgatgctacacaacatagccttagggattgagtgcaactcatctactgaaacatcaaacttgtttatcttcgtatattgtcttattgaggatactattacaggaagcagatctgaatgcaaagagaatacacaatctagtcctgatcaagacagtactgtaagaaagaccttcctgggactaggtgagagtggatcacagaattcttatatacttaccaagtttgcacttgacttacttcgtaatcgtctgaagagcatcaagcttgacaaggaagatgaacaactcgtgaagatgttggatccttttgttgaccttctgcgaaagtgtatgagttcgaaacatgcaagtgtcctctcagccacatttagatgttttgccttgttggtgaaacttccgttgccatctctgagggacaatgcaattactataaaaaatgtacttatggagattttacagagagctggaaactccaatggtcatttagtcacatcttgttttaagctacttgctgatctacttagaggattcaggatttcactttcagataatgagcttcagatgcttgttcatacccctatgtttgtagatcttcagacaaacccttcccctgttgccttatcgcttctcaaaacaatagtcaggctaaaattggtttctcacgaaatttatgatatagttgttaagataggagagttgatggtaacaacattaactgaatctatacagcagcaatgcattcaaattatgctacaattttttctgaactatccactttctgagaagcgcttacagcaacatattgactttttcctggcaaacttaagttatgaacatccttcaggaagagaagcagtgcttgaaatgctccatgacattcttaccagatttccccagaggattattgatgagcagggtcaaaccttttttcttcatcttgtagttgctctagccaatgaacagcatcagaatgtgtcttcaatgatccttagagctattcaaaagctgttaggacgcattggtggtcagggaaagagttacatttatgagtattcactttcgtggtacactggtgagaagaaaagtttgtggagtgcttcagctcaggttattggtttacttgttggcgatcacacattacaaatgggcaagcaccttaaaagtattctggctgttgttaagaaaataatggaatcatctattattgcttctggagctatacaattaggcttatctgatgaagctgccctgccattgtggaaagagacttactactctgttgccatgatggagaggttacttcttcgctttccggagttgtattttgagaaaaacatggaggacatatggataatattatgcaagttgttgatccatcctcattcgatgttgcgtagtatttcaagctctctggtagcatcatattttgctacagtggagaagaggaaacatgaacagaaattggatgccccatcatggttgcttgttcaaccgagcaggctattcataatagctgtttccttgttgaaacaattgaggagtgagctgagtgatactacggcaaataatctgattgtacagaatgttgcatactcagtctgcaacttgcatatgttgattaggcaatcgacctccacacatcagttttggtctagcattagttctgatcgtggtgctttccttgagggttttgaattgcttggttcaagaaaagcaaaaaatatatttctcctttgtacttcaacatctagtgatgtatctggatctagcctcgacaccaacgaagagcctacatctttgttagtttcgtcaatcctaaagaagatgggaagaattgcaatgcaaatgcaggatacacagataaagaacgtgttcaattgcttcaatatgatttcatcagctcttggtcctgatgaatcactaacctatgctgatcacctcttggccccattgtataaagtttctgaaggatttgctgggaaagttgttagtgatgaagtgaagcaactggcccagggggtccagaacaagttacgtgacctgattggttccgagaaatttgttgaagtctacaagagcgttcggatgggcctgaaacagaagcgggacggtagaaagcaggcacagaagattgttgcagccgtggacccagaacgcaatgccaagcgaaagcagcgaatggcagccaagcaccgggaacacaagaggcgaaagataatggcgatgaagattggcaggtggatgagatagcttggtatttaggctctgcggaattcggtgaatcatataattgtagaggataatttttcgtgctacaagtgctggcataaaattatgtttctgttttatatgctgtctcactgacttactgcccgacgtaattttattgttgagttaccgaaccataccgtaagtaaaaattaagaggcataagcaatgaagacatagaattgattgaattatatttttttggggtggatggataagtaacaatatattattaaatgtgcaattaagagttttctggctgaggtttgc

SEQ ID NO: 29171 - DNA, 4610 bp, Zea Mays
attttttgggctatggacaagcacagtctatcaaatgagagtgatcttaaaaattaccaatatgagatctggtacatggcttgggcaacgtgaacttaggctgttcaaattattgctaaattacatcacagatccctcagctgctgataacttcatagaccttattcttccatttttcagcaagaaagatttgaactccgacgattgtttggaagcactatgtgttgtgaggggaataattcaaaatctgagatgcaaagtatctgaaaaagttctaaatgcactgaacccattacttgcaattgttggattggaactgcgactatgtatctgtgatatttatgctgggttgtcattgaatgatccttcgatgttgtttctggctgggttaataggagatctgaatgcagtttcagcttcagaacttggtgaactagattatgacacaagacttaacacctatgataaggttaggccacaattgtttcttggcttgacagaagagcatgtgggcgccatattatctcattgtgtgtatgatatgtcatctgaagaattaattttgcggcaaagtgcatctagggctctgcagtcgttcctggacttttccgcctcagttatgaataatgatgtgtccaaatactctattgatgataaatttagagagaataataccagaagcatttgcacgatgggctgtattcagaagatattggaaaaaacttatctgcacaatatgggagtagcaatgactaaagatgtatcaattcaaaaggtgcgcatatatatattttttattttgtagtctatcaaactgttggttgaagggctgcaattgatgttgtattcaggaatggattattttacttagggagatggtctccaattttaatcatttagcatccttaagctcatttaggcctctctgtaaggtggatatagaagaggattttttccacaacataactcatttacaggctggtaaaagatcaaaagcactgttgctttttagacagggaatcaaggaaaacaacttttcagaggatatcactatgaaagtctttgttccactatttttcaatatgttttctgacgtaaaagctgggaaaggcgaacaagtcagagatatatgtttggatacactatctgctgttgctgccaaagtgcagtgggaacactatagaacaatattgaagagatgcttccgagaattaaaccttagacctgataagcagaagatcatattgaggctgatttgttccatattagatgcattccatttcatgaaacctgcaaatgatgcctcaggaaattctgatgctttgagtgaagatattgattcttcccttacattctctttggtcacagtctcttctgataagcaacagtacatgcaaaaggtagtgtttccacaggttcaaaagttgttaggatcagatccagagaaagtcaacgtcaacataaacctggtagcactgaaaatacttaagttgctaccggtggattattttgagtcccaactttcaagcatcattcatcgaatctgtaacttcctcaagaatcgtcttgaaagcatacgtgatgaagctaggtctgctttagctgcttctgttaaggaactggggattgggtatttgcagtttgtggtcaagatattaagagctatacttaaaagaggttttgagttacatgttctgggctacacacttcattatttgttgtcaaaaaacattactgctgatatgtatggtaggcttgactactgtttagaagatttgttggcagtggttgacagtgatttacttggagatgttgcagaacaaaaggaagttgaaaaacttgcctccaaaatgaaagagacaaagaagagaatgtcgtttgagactcttaagctgattgctcaaagtattacattcaagaccgatttactgaagaagataatctcacctgtttctttacatcttcagaagcaacttactccaaagttgaaaaccagacttgagatgatgctacacaacatagccttagggattgagtgcaactcatctactgaaacatcaaacttgtttatcttcgtatattgtcttattgaggatactattacaggaagcagatctgaatgcaaagagaatacacaatctagtcctgatcaagacagtactgtaagaaagaccttcctgggactaggtgagagtggatcacagaattcttatatacttaccaagtttgcacttgacttacttcgtaatcgtctgaagagcatcaagcttgacaaggaagatgaacaactcgtgaagatgttggatccttttgttgaccttctgcgaaagtgtatgagttcgaaacatgcaagtgtcctctcagccacatttagatgttttgccttgttggtgaaacttccgttgccatctctgagggacaatgcaattactataaaaaatgtacttatggagattttacagagagctggaaactccaatggtcatttagtcacatcttgttttaagctacttgctgatctacttagaggattcaggatttcactttcagataatgagcttcagatgcttgttcatacccctatgtttgtagatcttcagacaaacccttcccctgttgccttatcgcttctcaaaacaatagtcaggctaaaattggtttctcacgaaatttatgatatagttgttaagataggagagttgatggtaacaacattaactgaatctatacagcagcaatgcattcaaattatgctacaattttttctgaactatccactttctgagaagcgcttacagcaacatattgactttttcctggcaaacttaaggtatgatgaatatccatagttactttatcatgatatctcactgtatgctaacactctggaaaattgcagttatgaacatccttcaggaagagaagcagtgcttgaaatgctccatgacattcttaccagatttccccagaggattattgatgagcagggtcaaaccttttttcttcatcttgtagttgctctagccaatgaacagcatcagaatgtgtcttcaatgatccttagagctattcaaaagctgttaggacgcattggtggtcagggaaagagttacatttatgagtattcactttcgtggtacactggtgagaagaaaagtttgtggagtgcttcagctcaggttattggtttacttgttggcgatcacacattacaaatgggcaagcaccttaaaagtattctggctgttgttaagaaaataatggaatcatctattattgcttctggagctatacaattaggcttatctgatgaagctgccctgccattgtggaaagagacttactactctgttgccatgatggagaggttacttcttcgctttccggagttgtattttgagaaaaacatggaggacatatggataatattatgcaagttgttgatccatcctcattcgatgttgcgtagtatttcaagctctctggtagcatcatattttgctacagtggagaagaggaaacatgaacagaaattggatgccccatcatggttgcttgttcaaccgagcaggctattcataatagctgtttccttgttgaaacaattgaggagtgagctgagtgatactacggcaaataatctgattgtacagaatgttgcatactcagtctgcaacttgcatatgttgattaggcaatcgacctccacacatcagttttggtctagcattagttctgatcgtggtgctttccttgagggttttgaattgcttggttcaagaaaagcaaaaaatatatttctcctttgtacttcaacatctagtgatgtatctggatctagcctcgacaccaacgaagagcctacatctttgttagtttcgtcaatcctaaagaagatgggaagaattgcaatgcaaatgcaggatacacagataaagaacgtgttcaattgcttcaatatgatttcatcagctcttggtcctgatgaatcactaacctatgctgatcacctcttggccccattgtataaagtttctgaaggatttgctgggaaagttgttagtgatgaagtgaagcaactggcccagggggtccagaacaagttacgtgacctgattggttccgagaaatttgttgaagtctacaagagcgttcggatgggcctgaaacagaagcgggacggtagaaagcaggcacagaagattgttgcagccgtggacccagaacgcaatgccaagcgaaagcagcgaatggcagccaagcaccgggaacacaagaggcgaaagataatggcgatgaagattggcaggtggatgagatagcttggtatttaggctctgcggaattcggtgaatcatataattgtagaggataatttttcgtgctacaagtgctggcataaaattatgtttctgttttatatgctgtctcactgacttactgcccgacgtaattttattgttgagttaccgaaccataccgtaagtaaaaattaagaggcataagcaatgaagacatagaattgattgaattatatttttttggggtggatggataagtaacaatatattattaaatgtgcaattaagagttttctggctgaggtttgc

SEQ ID NO: 29172 - DNA, 1202 bp, Zea Mays
gccggaggaagcaggagtgatgaacttgggctcgcgccgctccgcgctctgccctctgcgaaccacgacgaggtcttcctgacatggccggcgcccgcggccgcgcgacgccgacgcgaacacctccgcggtcgtcttccccggcgccccgcaccgaggcggtagtcccgccggactgggactccgctgtatcgaccgtctcctcccacccctcgcccccggtggtcgtcgtgtgcgggcccaagaacagcggcaagtccaccttctcccgcgtcctcctcaacgcgctgctccccaggcatggtaaggttgcttatctggacaccgacgtggggcagccagagttcgggccgccgggatgcctctcgttcaatgtcctcgacgaagctattgcagatttgatgaacccaagcctacgggaagctgaaaggtgctacttctttggtgacatttcatcgaaaagagatccagaagcatatctgaattgtctattccattcgtatgactactttgttggaaaatatcgatgcgatgagaatgaaatgctgccactaattgtcaatacacctggatgggtaaaaggtgctggctttgatatgctcgtagagatgctaaggtatatctgccccacaatagttgttcagatacgcatcacaatcaagaacaaaaatctccctgatggagggttttggttagatggtgggcaaacaggacctatgatgattaacatcgatgctgcatttcatgatgcctcaaatagatcgttgttaattcagaaagattcatgtggaatgcgtgaacgccgacttgtagagtacttgaaacaatgttttccaagcaacatctctctttcaactaataaggagcttgcttatgccctagcttcacttccaccttatcaagtaccattttcagatgttgcaattgtgcatcttcattgtaaggtacctgctggtgagatatggcatagtctgaatgcaaccatagttggtttggcagtttccaatgcatctgagggaaccagatcaatcccttactgtgttgggcttggcatcataaggggcgtcgatattcaaaaaggcctgttatatttaataactcctgttcctctccagcgcctgcaatgcgttgatcttttgcaacagggtctcattgagatacctactgctcttttgcagtgtttaggtaatggatggcctgca

SEQ ID NO: 29173 - DNA, 1511 bp, Zea Mays
gccggaggaagcaggagtgatgaacttgggctcgcgccgctccgcgctctgccctctgcgaaccacgacgaggtcttcctgacatggccggcgcccgcggccgcgcgacgccgacgcgaacacctccgcggtcgtcttccccggcgccccgcaccgaggcggtagtcccgccggactgggactccgctgtatcgaccgtctcctcccacccctcgcccccggtggtcgtcgtgtgcgggcccaagaacagcggcaagtccaccttctcccgcgtcctcctcaacgcgctgctccccaggcatggtaaggttgcttatctggacaccgacgtggggcagccagagttcgggccgccgggatgcctctcgttcaatgtcctcgacgaagctattgcagatttgatgaacccaagcctacgggaagctgaaaggtgctacttctttggtgacatttcatcgaaaagagatccagaagcatatctgaattgtctattccattcgtatgactactttgttggaaaatatcgatgcgatgagaatgaaatgctgccactaattgtcaatacacctggatgggtaaaaggtgctggctttgatatgctcgtagagatgctaaggtatatctgccccacaatagttgttcagatacgcatcacaatcaagaacaaaaatctccctgatggagggttttggttagatggtgggcaaacaggacctatgatgattaacatcgatgctgcatttcatgatgcctcaaatagatcgttgttaattcagaaagattcatgtggaatgcgtgaacgccgacttgtagagtacttgaaacaatgttttccaagcaacatctctctttcaactaataaggagcttgcttatgccctagcttcacttccaccttatcaagtaccattttcagatgttgcaattgtgcatcttcattgtaaggtacctgctggtgagatatggcatagtctgaatgcaaccatagttggtttggcagtttccaatgcatctgagggaaccagatcaatcccttactgtgttgggcttgcgcctgcaatgcgttgatcttttgcaacagggtctcattgagatacctactgctcttttgcaggtccgcggatgtgtgtccccctacatgtcgacgaatgtgcttcacaagatatcagaaagggatttgtatgctgggtgatgttggcgcaggcagtgtcggagatagacctgtgtttgctggtttctgacccggagagcatgaaccggactgtagtttcaggctgccagcggttgcctccagctcctaagattagatatgtaacctgtgctgtgcaactcctctgtcaaattagtagtcacggagatctgaatgcaacttcctggattcattgaattgaaatactataattctgtggcaagttactccctttgcttttgcctttgaattgattagtatagagaaagatattgattaattggtatcttggtattatttaaagaaagagtggtatatcttag

SEQ ID NO: 29174 - DNA, 1563 bp, Zea Mays
gccggaggaagcaggagtgatgaacttgggctcgcgccgctccgcgctctgccctctgcgaaccacgacgaggtcttcctgacatggccggcgcccgcggccgcgcgacgccgacgcgaacacctccgcggtcgtcttccccggcgccccgcaccgaggcggtagtcccgccggactgggactccgctgtatcgaccgtctcctcccacccctcgcccccggtggtcgtcgtgtgcgggcccaagaacagcggcaagtccaccttctcccgcgtcctcctcaacgcgctgctccccaggcatggtaaggttgcttatctggacaccgacgtggggcagccagagttcgggccgccgggatgcctctcgttcaatgtcctcgacgaagctattgcagatttgatgaacccaagcctacgggaagctgaaaggtgctacttctttggtgacatttcatcgaaaagagatccagaagcatatctgaattgtctattccattcgtatgactactttgttggaaaatatcgatgcgatgagaatgaaatgctgccactaattgtcaatacacctggatgggtaaaaggtgctggctttgatatgctcgtagagatgctaaggtatatctgccccacaatagttgttcagatacgcatcacaatcaagaacaaaaatctccctgatggagggttttggttagatggtgggcaaacaggacctatgatgattaacatcgatgctgcatttcatgatgcctcaaatagatcaaagattcatgtggaatgcgtgaacgccgacttgtagagtacttgaaacaatgttttccaagcaacatctctctttcaactaataaggagcttgcttatgccctagcttcacttccaccttatcaagtaccattttcagatgttgcaattgtgcatcttcattgtaaggtacctgctggtgagatatggcatagtctgaatgcaaccatagttggtttggcagtttccaatgcatctgagggaaccagatcaatcccttactgtgttgggcttggcatcataaggggcgtcgatattcaaaaaggcctgttatatttaataactcctgttcctctccagcgcctgcaatgcgttgatcttttgcaacagggtctcattgagatacctactgctcttttgcaggtccgcggatgtgtgtccccctacatgtcgacgaatgtgcttcacaagatatcagaaagggatttgtatgctgggtgatgttggcgcaggcagtgtcggagatagacctgtgtttgctggtttctgacccggagagcatgaaccggactgtagtttcaggctgccagcggttgcctccagctcctaagattagatatgtaacctgtgctgtgcaactcctctgtcaaattagtagtcacggagatctgaatgcaacttcctggattcattgaattgaaatactataattctgtggcaagttactccctttgcttttgcctttgaattgattagtatagagaaagatattgattaattggtatcttggtattatttaaagaaagagtggtatatcttag

SEQ ID NO: 29175 - DNA, 1466 bp, Zea Mays
ctccagtaataaaaaaaaactcccagtctctctccgtgccgtccgctgttcggctccggaagtccccatccgctccacctctcctcctccactcccccgccccactgatcgcggcggtgcctagaagtttgttccagtggcatggcggattgggcctctattcaaacggatattcttggtataataataaagaagcttccaatccctgattacattagattccgtgctgtgtgcacatcttggaacaacgtctgcaaggatgtgtcatactgtccaagggtggacccatggctgatgctccccccaaaccagaatcctcttggtgctcagttcttttgcattcctgaaagaaagaatcaaagtatccgcctccctaacaccgcctcactgttcgaatcggtctgggctccggttggttcttccaatggatggcttatctacttcagtcacacttacggaaccatgcagctggttaaccctgtaagtggcaaacatatccagctccccccgatagggcgcaggaccttctctaaggccaagctgcttgaaatcagcgagaggaacttcatcgtcgctgtcctctatggtgatgagaaaggctacaaaataacacggaaagggtccagcaactggtcgtcggtcgagtcaaaattcattttggatgacatcatcaagcatggaggccggctatacacgtgcgacatgtatggcacagtggagatgtgggcagagccgccccgcgcatggccagacgaggaagtcacgcatcggtggaggttccgctgtcttatagagaccccagctggtgatctggtcagggttaagcgcctgtgccagaacaagtttgctgtttggatattggacaaggcgagctcttcctgggttgggaccgagaacattggggatctcgcgctgtttgtgagccactacaactcattctgtttccctgccagtggccagcccaacctgaaagcgaactgcatctacttcatcgacatctacaacaacctgtgcgctttcaaccttgagcatgggaccaaggaactcgtccaaactcttaccatcggccgaggccaagggcgcaatgactaccaccgctggcctgagcgagaccaggtcttatggtttatcccttcactaaagtaaatactgaaggtaatggtggatgatgcgtgtccgtttacccacccagagatggagctcatatagtactgtaggctcctcctatggacggccatttatcccgatatgaaggtcgtatagtatcctgtatttccaaagtattggatgtcgcacatgcaactgcaggtctatgtatatgagtaccgaacatcgtcttaacttgttgctaaagcaactgtttgaaccatttgaagctttcgtttcaagctgtcttggcctgtaaactattccgaattttcaagttccttgaggattgaaaaaaaacctagaaagcttcctcagtc

SEQ ID NO: 29176 - DNA, 1569 bp, Zea Mays
ccagtaataaaaaaaaactcccagtctctctccgtgccgtccgctgttcggctccggaagtccccatccgctccacctctcctcctccactcccccgccccactgatcgcggcggtgagaacatgctctttctacagctcgttgaagttttaaattatattggcattcgtgttgtcaagtctgaactaaagcctcagccaaggtggcatgtctgctaaggtgcctagaagtttgttccagtggcatggcggattgggcctctattcaaacggatattcttggtataataataaagaagcttccaatccctgattacattagattccgtgctgtgtgcacatcttggaacaacgtctgcaaggatgtgtcatactgtccaagggtggacccatggctgatgctccccccaaaccagaatcctcttggtgctcagttcttttgcattcctgaaagaaagaatcaaagtatccgcctccctaacaccgcctcactgttcgaatcggtctgggctccggttggttcttccaatggatggcttatctacttcagtcacacttacggaaccatgcagctggttaaccctgtaagtggcaaacatatccagctccccccgatagggcgcaggaccttctctaaggccaagctgcttgaaatcagcgagaggaacttcatcgtcgctgtcctctatggtgatgagaaaggctacaaaataacacggaaagggtccagcaactggtcgtcggtcgagtcaaaattcattttggatgacatcatcaagcatggaggccggctatacacgtgcgacatgtatggcacagtggagatgtgggcagagccgccccgcgcatggccagacgaggaagtcacgcatcggtggaggttccgctgtcttatagagaccccagctggtgatctggtcagggttaagcgcctgtgccagaacaagtttgctgtttggatattggacaaggcgagctcttcctgggttgggaccgagaacattggggatctcgcgctgtttgtgagccactacaactcattctgtttccctgccagtggccagcccaacctgaaagcgaactgcatctacttcatcgacatctacaacaacctgtgcgctttcaaccttgagcatgggaccaaggaactcgtccaaactcttaccatcggccgaggccaagggcgcaatgactaccaccgctggcctgagcgagaccaggtcttatggtttatcccttcactaaagtaaatactgaaggtaatggtggatgatgcgtgtccgtttacccacccagagatggagctcatatagtactgtaggctcctcctatggacggccatttatcccgatatgaaggtcgtatagtatcctgtatttccaaagtattggatgtcgcacatgcaactgcaggtctatgtatatgagtaccgaacatcgtcttaacttgttgctaaagcaactgtttgaaccatttgaagctttcgtttcaagctgtcttggcctgtaaactattccgaattttcaagttccttgaggattgaaaaaaaacctagaaagcttcctcagtc

SEQ ID NO: 29177 - DNA, 1554 bp, Zea Mays
agggttcttggtggccagcgactcgacctgaacgcgtgcggcgccgatcggggtttgggtgtcggaggacgtggtgtgtggattggaggttattataacatgctctttctacagctcgttgaagttttaaattatattggcattcgtgttgtcaagtctgaactaaagcctcagccaaggtggcatgtctgctaaggtgccaaggtgcctagaagtttgttccagtggcatggcggattgggcctctattcaaacggatattcttggtataataataaagaagcttccaatccctgattacattagattccgtgctgtgtgcacatcttggaacaacgtctgcaaggatgtgtcatactgtccaagggtggacccatggctgatgctccccccaaaccagaatcctcttggtgctcagttcttttgcattcctgaaagaaagaatcaaagtatccgcctccctaacaccgcctcactgttcgaatcggtctgggctccggttggttcttccaatggatggcttatctacttcagtcacacttacggaaccatgcagctggttaaccctgtaagtggcaaacatatccagctccccccgatagggcgcaggaccttctctaaggccaagctgcttgaaatcagcgagaggaacttcatcgtcgctgtcctctatggtgatgagaaaggctacaaaataacacggaaagggtccagcaactggtcgtcggtcgagtcaaaattcattttggatgacatcatcaagcatggaggccggctatacacgtgcgacatgtatggcacagtggagatgtgggcagagccgccccgcgcatggccagacgaggaagtcacgcatcggtggaggttccgctgtcttatagagaccccagctggtgatctggtcagggttaagcgcctgtgccagaacaagtttgctgtttggatattggacaaggcgagctcttcctgggttgggaccgagaacattggggatctcgcgctgtttgtgagccactacaactcattctgtttccctgccagtggccagcccaacctgaaagcgaactgcatctacttcatcgacatctacaacaacctgtgcgctttcaaccttgagcatgggaccaaggaactcgtccaaactcttaccatcggccgaggccaagggcgcaatgactaccaccgctggcctgagcgagaccaggtcttatggtttatcccttcactaaagtaaatactgaaggtaatggtggatgatgcgtgtccgtttacccacccagagatggagctcatatagtactgtaggctcctcctatggacggccatttatcccgatatgaaggtcgtatagtatcctgtatttccaaagtattggatgtcgcacatgcaactgcaggtctatgtatatgagtaccgaacatcgtcttaacttgttgctaaagcaactgtttgaaccatttgaagctttcgtttcaagctgtcttggcctgtaaactattccgaattttcaagttccttgaggattgaaaaaaaacctagaaagcttcctcagtc

SEQ ID NO: 29178 - DNA, 1720 bp, Zea Mays
cgacagtgccgtttggccatagttgcccggctacccgccgcgccgcaaacccgagccactcgcctgccgcgctgattagatttctttgcatccgccagtggagtcgaatcgatggcggcgtggtcgtcgccgccgtcgcttcgccacctcctcatgctccgtccatgcttgcccctcagccccacctgccttgctggctccttgcgccgccacatccacagccgctgccgcctcttctcctccgccgcatcctcctcgacactgacccacggcgacatcgcctcgacgcacggtgacgccgatggcgtcgtcgaagtcaaccctccgcgcggaactagggatttcccgccggaggacatgcggctccgcacctggctcttcgaccaattcagggaggtctcccgcctcatggccttcgaggaggtcgatttccccgtcctcgagtcggaggctctcttcatccggaaggcaggggaagaaattacgcagcagctctacaacttcgaggacaaagggggtcgccgtgttgttctcaggcccgaaattaccccttccctcgcgcgcctagtcataaagcaaggaaaatcagtctcccttccactgaaatggtttactataggacaatgctggcgatatgagcgcatgaccagaggaagaaggcgggaacattaccaatggaatatggatatatttggtgtgcctaaagttcgggctgaggctgagcttcttcatgctattgttctcttatttcaacgtcttggaattacatcttcagatgtggggatcagggtgtccagtcggaaggttcttcaggctgttttgaacatgtactccatcccagatcacttattcactcaagtttgtgttattgttgataaattgggtaaaatgactagggaagaaattgagaaggaacttgtttcaactgggttgtcatctgaagctgtacagggtatcatcgatgtgctttcaatcaagtcattgtccaaacttgaagaggtgttaggctctgatgttgaagctgttgctgacttgaagaaactcttctcctttgcggagcaatatggttatgctgattggatttgttttgatgcatcagtggtccgtggccttgcatactacacaggaattgtatttgaggcatttgatagagaaggaaaactgagagcaatttgcggtggtggaagctgctgaaagaaaagggtctcttgcctgatatgtcacgccaaattgatgacattgtcttccctttggacgaagaacttgaaggaccagcatccagtattgcttcctctctgaggaagaaaggccgatctgttgaacttgtagaagacaaacgtctcaaatgggtatttaagcatgcggagaggatcaatgcgagccggctgatattggttggaaattctgagtgggagcgaggcatggtacgcgtaaaggtgctatcaaccagggaagagtttgaggtaaagacaagtgaactagagtgattgtagaaatgttacgttatgctagcctcggctaatgcttgtgagatgatacaatcaaacagtagctagctatttctggagagtttaaacttattgtaacagcctgtaacaactattcatattcatacagaatggatgggcatgatccttgccagctagtatgctcatctgacattctgactccaagtatacattacacattaacttagcctatagcggcgactgaggtgcgg

SEQ ID NO: 29179 - DNA, 1715 bp, Zea Mays
agtgccgtttggccatagttgcccggctacccgccgcgccgcaaacccgagccactcgcctgccgcgctgattagatttctttgcatccgccagtggagtcgaatcgatggcggcgtggtcgtcgccgccgtcgcttcgccacctcctcatgctccgtccatgcttgcccctcagccccacctgccttgctggctccttgcgccgccacatccacagccgctgccgcctcttctcctccgccgcatcctcctcgacactgacccacggcgacatcgcctcgacgcacggtgacgccgatggcgtcgtcgaagtcaaccctccgcgcggaactagggatttcccgccggaggacatgcggctccgcacctggctcttcgaccaattcagggaggtctcccgcctcatggccttcgaggaggtcgatttccccgtcctcgagtcggaggctctcttcatccggaaggcaggggaagaaattacgcagcagctctacaacttcgaggacaaagggggtcgccgtgttgttctcaggcccgaaattaccccttccctcgcgcgcctagtcataaagcaagggacaatgctggcgatatgagcgcatgaccagaggaagaaggcgggaacattaccaatggaatatggatatatttggtgtgcctaaagttcgggctgaggctgagcttcttcatgctattgttctcttatttcaacgtcttggaattacatcttcagatgtggggatcagggtgtccagtcggaaggttcttcaggctgttttgaacatgtactccatcccagatcacttattcactcaagtttgtgttattgttgataaattgggtaaaatgactagggaagaaattgagaaggaacttgtttcaactgggttgtcatctgaagctgtacaggaggtgttaggctctgatgttgaagctgttgctgacttgaagaaactcttctcctttgcggagcaatatggttatgctgattggatttgttttgatgcatcagtggtccgtggccttgcatactacacaggaattgtatttgaggcatttgatagagaaggaaaactgagagcaatttgcggtggtggaaggtatgatagattgctttcaacatttggaagtgaagatataccggcttgtggctttggatttggagacgctgttatagtggaactgctgaaagaaaagggtctcttgcctgatatgtcacgccaaattgatgacattgtcttccctttggacgaagaacttgaaggaccagcatccagtattgcttcctctctgaggaagaaaggccgatctgttgaacttgtagaagacaaacgtctcaaatgggtatttaagcatgcggagaggatcaatgcgagccggctgatattggttggaaattctgagtgggagcgaggcatggtacgcgtaaaggtgctatcaaccagggaagagtttgaggtaaagacaagtgaactagagtgattgtagaaatgttacgttatgctagcctcggctaatgcttgtgagatgatacaatcaaacagtagctagctatttctggagagtttaaacttattgtaacagcctgtaacaactattcatattcatacagaatggatgggcatgatccttgccagctagtatgctcatctgacattctgactccaagtatacattacacattaacttagcctatagcggcgactgaggtgcgg

SEQ ID NO: 29180 - DNA, 1913 bp, Zea Mays
cgtttggccatagttgcccggctacccgccgcgccgcaaacccgagccactcgcctgccgcgctgattagatttctttgcatccgccagtggagtcgaatcgatggcggcgtggtcgtcgccgccgtcgcttcgccacctcctcatgctccgtccatgcttgcccctcagccccacctgccttgctggctccttgcgccgccacatccacagccgctgccgcctcttctcctccgccgcatcctcctcgacactgacccacggcgacatcgcctcgacgcacggtgacgccgatggcgtcgtcgaagtcaaccctccgcgcggaactagggatttcccgccggaggacatgcggctccgcacctggctcttcgaccaattcagggaggtctcccgcctcatggccttcgaggaggtcgatttccccgtcctcgagtcggaggctctcttcatccggaaggcaggggaagaaattacgcagcagctctacaacttcgaggacaaagggggtcgccgtgttgttctcaggcccgaaattaccccttccctcgcgcgcctagtcataaagcaaggaaaatcagtctcccttccactgaaatggtttactataggacaatgctggcgatatgagcgcatgaccagaggaagaaggcgggaacattaccaatggaatatggatatatttggtgtgcctaaagttcgggctgaggctgagcttcttcatgctattgttctcttatttcaacgtcttggaattacatcttcagatgtggggatcagggtgtccagtcggaaggttcttcaggctgttttgaacatgtactccatcccagatcacttattcactcaagtttgtgttattgttgataaattgggtaaaatgactagggaagaaattgagaaggaacttgtttcaactgggttgtcatctgaagctgtacagggtatcatcgatgtgctttcaatcaagtcattgtccaaacttgaaggttttctcttaaccttttgttgttggcttgttattatgcatgctccatatcacataactttacttcaatattgtactgatgtaatgttgctaaattggaaaatgtattccctagaataatatcaagtaaaggcattctcttacatcaggccctcgtgctttatttgttgttaagcttggcttttttatccatataatgtttatttttttaatcttcaggaccttttggcaatggttcttgtttaatcttgatatacatatgcagaggtgttaggctctgatgttgaagctgttgctgacttgaagaaactcttctcctttgcggagcaatatggttatgctgattggatttgttttgatgcatcagtggtccgtggccttgcatactacacaggaattgtatttgaggcatttgatagagaaggaaaactgagagcaatttgcggtggtggaaggtatgatagattgctttcaacatttggaagtgaagatataccggcttgtggctttggatttggagacgctgttatagtggaactgctgaaagaaaagggtctcttgcctgatatgtcacgccaaattgatgacattgtcttccctttggacgaagaacttgaaggaccagcatccagtattgcttcctctctgaggaagaaaggccgatctgttgaacttgtagaagacaaacgtctcaaatgggtatttaagcatgcggagaggatcaatgcgagccggctgatattggttggaaattctgagtgggagcgaggcatggtacgcgtaaaggtgctatcaaccagggaagagtttgaggtaaagacaaaatggatgggcatgatccttgccagctagtatgctcatctgacattctgactccaagtatacattacacattaacttagcctatagcggcgactgaggtgcgg

SEQ ID NO: 29181 - DNA, 1650 bp, Zea Mays
cgtttggccatagttgcccggctacccgccgcgccgcaaacccgagccactcgcctgccgcgctgattagatttctttgcatccgccagtggagtcgaatcgatggcggcgtggtcgtcgccgccgtcgcttcgccacctcctcatgctccgtccatgcttgcccctcagccccacctgccttgctggctccttgcgccgccacatccacagccgctgccgcctcttctcctccgccgcatcctcctcgacactgacccacggcgacatcgcctcgacgcacggtgacgccgatggcgtcgtcgaagtcaaccctccgcgcggaactagggatttcccgccggaggacatgcggctccgcacctggctcttcgaccaattcagggaggtctcccgcctcatggccttcgaggaggtcgatttccccgtcctcgagtcggaggctctcttcatccggaaggcaggggaagaaattacgcagcagctctacaacttcgaggacaaagggggtcgccgtgttgttctcaggcccgaaattaccccttccctcgcgcgcctagtcataaagcaaggaaaatcagtctcccttccactgaaatggtttactataggacaatgctggcgatatgagcgcatgaccagaggaagaaggcgggaacattaccaatggaatatggatatatttggtgtgcctaaagttcgggctgaggctgagcttcttcatgctattgttctcttatttcaacgtcttggaattacatcttcagatgtggggatcagggtgtccagtcggaaggttcttcaggctgttttgaacatgtactccatcccagatcacttattcactcaagtttgtgttattgttgataaattgggtaaaatgactagggaagaaattgagaaggaacttgtttcaactgggttgtcatctgaagctgtacagggtatcatcgatgtgctttcaatcaagtcattgtccaaacttgaaggcatttgatagagaaggaaaactgagagcaatttgcggtggtggaaggtatgatagattgctttcaacatttggaagtgaagatataccggcttgtggctttggatttggagacgctgttatagtggaactgctgaaagaaaagggtctcttgcctgatatgtcacgccaaattgatgacattgtcttccctttggacgaagaacttgaaggaccagcatccagtattgcttcctctctgaggaagaaaggccgatctgttgaacttgtagaagacaaacgtctcaaatgggtatttaagcatgcggagaggatcaatgcgagccggctgatattggttggaaattctgagtgggagcgaggcatggtacgcgtaaaggtgctatcaaccagggaagagtttgaggtaaagacaagtgaactagagtgattgtagaaatgttacgttatgctagcctcggctaatgcttgtgagatgatacaatcaaacagtagctagctatttctggagagtttaaacttattgtaacagcctgtaacaactattcatattcatacagaatggatgggcatgatccttgccagctagtatgctcatctgacattctgactccaagtatacattacacattaacttagcctatagcggcgactgaggtgcgg

SEQ ID NO: 29182 - DNA, 1755 bp, Zea Mays
cgtttggccatagttgcccggctacccgccgcgccgcaaacccgagccactcgcctgccgcgctgattagatttctttgcatccgccagtggagtcgaatcgatggcggcgtggtcgtcgccgccgtcgcttcgccacctcctcatgctccgtccatgcttgcccctcagccccacctgccttgctggctccttgcgccgccacatccacagccgctgccgcctcttctcctccgccgcatcctcctcgacactgacccacggcgacatcgcctcgacgcacggtgacgccgatggcgtcgtcgaagtcaaccctccgcgcggaactagggatttcccgccggaggacatgcggctccgcacctggctcttcgaccaattcagggaggtctcccgcctcatggccttcgaggaggtcgatttccccgtcctcgagtcggaggctctcttcatccggaaggcaggggaagaaattacgcagcagctctacaacttcgaggacaaagggggtcgccgtgttgttctcaggcccgaaattaccccttccctcgcgcgcctagtcataaagcaagggacaatgctggcgatatgagcgcatgaccagaggaagaaggcgggaacattaccaatggaatatggatatatttggtgtgcctaaagttcgggctgaggctgagcttcttcatgctattgttctcttatttcaacgtcttggaattacatcttcagatgtggggatcagggtgtccagtcggaaggttcttcaggctgttttgaacatgtactccatcccagatcacttattcactcaagtttgtgttattgttgataaattgggtaaaatgactagggaagaaattgagaaggaacttgtttcaactgggttgtcatctgaagctgtacagggtatcatcgatgtgctttcaatcaagtcattgtccaaacttgaagaggtgttaggctctgatgttgaagctgttgctgacttgaagaaactcttctcctttgcggagcaatatggttatgctgattggatttgttttgatgcatcagtggtccgtggccttgcatactacacaggaattgtatttgaggcatttgatagagaaggaaaactgagagcaatttgcggtggtggaaggtatgatagattgctttcaacatttggaagtgaagatataccggcttgtggctttggatttggagacgctgttatagtggaactgctgaaagaaaagggtctcttgcctgatatgtcacgccaaattgatgacattgtcttccctttggacgaagaacttgaaggaccagcatccagtattgcttcctctctgaggaagaaaggccgatctgttgaacttgtagaagacaaacgtctcaaatgggtatttaagcatgcggagaggatcaatgcgagccggctgatattggttggaaattctgagtgggagcgaggcatggtacgcgtaaaggtgctatcaaccagggaagagtttgaggtaaagacaagtgaactagagtgattgtagaaatgttacgttatgctagcctcggctaatgcttgtgagatgatacaatcaaacagtagctagctatttctggagagtttaaacttattgtaacagcctgtaacaactattcatattcatacagaatggatgggcatgatccttgccagctagtatgctcatctgacattctgactccaagtatacattacacattaacttagcctatagcggcgactgaggtgcgg

SEQ ID NO: 29183 - DNA, 1649 bp, Zea Mays
cgtttggccatagttgcccggctacccgccgcgccgcaaacccgagccactcgcctgccgcgctgattagatttctttgcatccgccagtggagtcgaatcgatggcggcgtggtcgtcgccgccgtcgcttcgccacctcctcatgctccgtccatgcttgcccctcagccccacctgccttgctggctccttgcgccgccacatccacagccgctgccgcctcttctcctccgccgcatcctcctcgacactgacccacggcgacatcgcctcgacgcacggtgacgccgatggcgtcgtcgaagtcaaccctccgcgcggaactagggatttcccgccggaggacatgcggctccgcacctggctcttcgaccaattcagggaggtctcccgcctcatggccttcgaggaggtcgatttccccgtcctcgagtcggaggctctcttcatccggaaggcaggggaagaaattacgcagcagctctacaacttcgaggacaaagggggtcgccgtgttgttctcaggcccgaaattaccccttccctcgcgcgcctagtcataaagcaaggaaaatcagtctcccttccactgaaatggtttactataggacaatgctggcgatatgagcgcatgaccagaggaagaaggcgggaacattaccaatggaatatggatatatttggtgtgcctaaagttcgggctgaggctgagcttcttcatgctattgttctcttatttcaacgtcttggaattacatcttcagatgtggggatcagggtgtccagtcggaaggttcttcaggctgttttgaacatgtactccatcccagatcacttattcactcaagtttgtgttattgttgataaattgggtaaaatgactagggaagaaattgagaaggaacttgtttcaactgggttgtcatctgaagctgtacagggtatcatcgatgtgctttcaatcaagtcattgtccaaacttgaagaggtgttaggctctgatgttgaagctgttgctgacttgaagaaactcttctcctttgcggagcaatatggttatgctgattggatttgttttgatgcatcagtggtccgtggccttgcatactacacaggaattgtatttgaggcatttgatagagaaggaaaactgagagcaatttgcggtggtggaaggtatgatagattgctttcaacatttggaagtgaagatataccggcttgtggctttggatttggagacgctgttatagtggaactgctgaaagaaaagggtctcttgcctgatatgtcacgccaaattgatgacattgtcttccctttggacgaagaacttgaaggaccagcatccagtattgcttcctctctgaggaagaaaggccgatctgttgaacttgtagaagacaaacgtctcaaatgggtatttaagcatgcggagaggatcaatgcgagccggctgatattggttggaaattctgagtgggagcgaggcatggtacgcgtaaaggtgctatcaaccagggaagagtttgaggtaaagacaaaatggatgggcatgatccttgccagctagtatgctcatctgacattctgactccaagtatacattacacattaacttagcctatagcggcgactgaggtgcgg

SEQ ID NO: 29184 - DNA, 980 bp, Zea Mays
gtaatttgctaggctttgttggttcttcaggctgttttgaacatgtactccatcccagatcacttattcactcaagtttgtgttattgttgataaattgggtaaaatgactagggaagaaattgagaaggaacttgtttcaactgggttgtcatctgaagctgtacagggtatcatcgatgtgctttcaatcaagtcattgtccaaacttgaagaggtgttaggctctgatgttgaagctgttgctgacttgaagaaactcttctcctttgcggagcaatatggttatgctgattggatttgttttgatgcatcagtggcatttgatagagaaggaaaactgagagcaatttgcggtggtggaaggtatgatagattgctttcaacatttggaagtgaagatataccggcttgtggctttggatttggagacgctgttatagtggaactgctgaaagaaaagggtctcttgcctgatatgtcacgccaaattgatgacattgtcttccctttggacgaagaacttgaaggaccagcatccagtattgcttcctctctgaggaagaaaggccgatctgttgaacttgtagaagacaaacgtctcaaatgggtatttaagcatgcggagaggatcaatgcgagccggctgatattggttggaaattctgagtgggagcgaggcatggtacgcgtaaaggtgctatcaaccagggaagagtttgaggtaaagacaagtgaactagagtgattgtagaaatgttacgttatgctagcctcggctaatgcttgtgagatgatacaatcaaacagtagctagctatttctggagagtttaaacttattgtaacagcctgtaacaactattcatattcatacagaatggatgggcatgatccttgccagctagtatgctcatctgacattctgactccaagtatacattacacattaacttagcctatagcggcgactgaggtgcgg

SEQ ID NO: 29185 - DNA, 557 bp, Zea Mays
gttttagattgatgattaatgcagctgctgaaagaaaagggtctcttgcctgatatgtcacgccaaattgatgacattgtcttccctttggacgaagaacttgaaggaccagcatccagtattgcttcctctctgaggaagaaaggccgatctgttgaacttgtagaagacaaacgtctcaaatgggtatttaagcatgcggagaggatcaatgcgagccggctgatattggttggaaattctgagtgggagcgaggcatggtacgcgtaaaggtgctatcaaccagggaagagtttgaggtaaagacaagtgaactagagtgattgtagaaatgttacgttatgctagcctcggctaatgcttgtgagatgatacaatcaaacagtagctagctatttctggagagtttaaacttattgtaacagcctgtaacaactattcatattcatacagaatggatgggcatgatccttgccagctagtatgctcatctgacattctgactccaagtatacattacacattaacttagcctatagcggcgactgaggtgcgg

SEQ ID NO: 29186 - DNA, 433 bp, Zea Mays
cggaaatagaagtctagtacttgacaacatgaattccttgaaaactgctgaaagaaaagggtctcttgcctgatatgtcacgccaaattgatgacattgtcttccctttggacgaagaacttgaaggaccagcatccagtattgcttcctctctgaggaagaaaggccgatctgttgaacttgtagaagacaaacgtctcaaatgggtatttaagcatgcggagaggatcaatgcgagccggctgatattggttggaaattctgagtgggagcgaggcatggtacgcgtaaaggtgctatcaaccagggaagagtttgaggtaaagacaaaatggatgggcatgatccttgccagctagtatgctcatctgacattctgactccaagtatacattacacattaacttagcctatagcggcgactgaggtgcgg

SEQ ID NO: 29187 - DNA, 1225 bp, Zea Mays
atacctgtgccctaatagaatttttacccgtctggtttcggggtaccgattgccagccagagcgagagggagagcgagcgcgagcgcgcagtcgccgtccacaccgttgagttttttctcaggcttcgcatggcctgattcatcctacagtctccaacaagccaagcaaacgccgcatcgcgctttctccgcttccttctttcccctcacagggtcagaccccaacgccgggagaataggggattaggagccagacctggcggcgccgggcgtccaagaaacgctgcctaataaaatccctccggcgtctgtcgtcttgaccgcggcggcgcaggcttcttcttttcgctctccacggcagcgtcatgaagattaaggggaacttgcatgtttgatgtacccctgtagcaaaaaattcttgtgataaaatttgttgaattagtcactgtcagggagggatctagttgtcagttgtttgtattaaagctgctggcactttccttgcagggtttctgtagaataaatgggagaagcacacttggatgaatgttgtcattgccaagggtgtgctggcaagtatacactactcagagatgaagaaaacccacggtggacaatctttgagaggcggcttccttgctgtggttgtgggataggatggtcttcgtttcttgtgtcctttgatttggtactttgcaaccactctttactgctgcaagtactacaacaaagatcctcgagagcgccctgggctagctgcatcagctgttgcggcactcatcttcacagtcctggcactcatcgctctctctgtggcactgataatctatatataaaacgaggaatgaacttgcgcttgcttgaaatgcgtactcaggcactcatcttcacagtcctggcagccatacatcgctctctgtggcacagatcatctgaaacccaaagcgaggaaaacgcggtagctggacctggcattcagaaggaacttgtaatttcagtgatagtagcatatagttgcaatcatccttcatgtatcaccatatcaagttgttgatttaaatgctgcaaccgtccctgttgtcggttgacctgtcggctgctgttgtctatcaacgaggatgatcattgctctatcgcaaactgtgtgctccgtgatctgcgatgcttctgaactcatgctgtcttggcaacctttagggctcattttacagagctccccttcatg

SEQ ID NO: 29188 - DNA, 1059 bp, Zea Mays
atacctgtgccctaatagaatttttacccgtctggtttcggggtaccgattgccagccagagcgagagggagagcgagcgcgagcgcgcagtcgccgtccacaccgttgagttttttctcaggcttcgcatggcctgattcatcctacagtctccaacaagccaagcaaacgccgcatcgcgctttctccgcttccttctttcccctcacagggtcagaccccaacgccgggagaataggggattaggagccagacctggcggcgccgggcgtccaagaaacgctgcctaataaaatccctccggcgtctgtcgtcttgaccgcggcggcgcaggcttcttcttttcgctctccaccacacttggatgaatgttgtcattgccaagggtgtgctggcaagtatacactactcagagatgaagaaaacccacggtggacaatctttgagaggcggcttccttgctgtggttgtgggataggatggtcttcttttcttttaggtttcttgtgtcctttgatttggtactttgcaaccactctttactgctgcaagtactacaacaaagatcctcgagagcgccctgggctagctgcatcagctgttgcggcactcatcttcacagtcctggcactcatcgctctctctgtggcactgataatctatatataaaacgaggaatgaacttgcgcttgcttgaaatgcgtactcaggcactcatcttcacagtcctggcagccatacatcgctctctgtggcacagatcatctgaaacccaaagcgaggaaaacgcggtagctggacctggcattcagaaggaacttgtaatttcagtgatagtagcatatagttgcaatcatccttcatgtatcaccatatcaagttgttgatttaaatgctgcaaccgtccctgttgtcggttgacctgtcggctgctgttgtctatcaacgaggatgatcattgctctatcgcaaactgtgtgctccgtgatctgcgatgcttctgaactcatgctgtcttggcaacctttagggctcattttacagagctccccttcatg

SEQ ID NO: 29189 - DNA, 1623 bp, Zea Mays
atacctgtgccctaatagaatttttacccgtctggtttcggggtaccgattgccagccagagcgagagggagagcgagcgcgagcgcgcagtcgccgtccacaccgttgagttttttctcaggcttcgcatggcctgattcatcctacagtctccaacaagccaagcaaacgccgcatcgcgctttctccgcttccttctttcccctcacagggtcagaccccaacgccgggagaataggggattaggagccagacctggcggcgccgggcgtccaagaaacgctgcctaataaaatccctccggcgtctgtcgtcttgaccgcggcggcgcaggcttcttcttttcgctctccacggcagcgtcatgaagattaaggggaacttgcatgtttgatgtacccctgtagcaaaaaattcttgtgataaaatttgttgaattagtcactgtcagggagggatctagttgtcagttgtttgtattaaagctgctggcactttccttgcagggtttctgtagaataaatgggagaaggtaacaattttcaactttatattgtttcttgtggatcaattgactgttgcacctttgcaacatcagagtccgtcattgtagaattgtgcttttctgttaccttcagaattagatgttattatacctgccatgtgtaaacatcagcatggctgcgtgttcctcttggggcctctttgtcatgcctctggaaggcgcttggtctactgtacataaacactctttcgtatcttaatcgaaaggcagagctcctgccacatctttcaaaaaaaatgcatctcattaacacttagacttgatgtaggatactggctctgttcattatcttaaatttccagatttaggaagaaacttcagttactgatcatattcttcctttgctttgcatagcacacttggatgaatgttgtcattgccaagggtgtgctggcaagtatacactactcagagatgaagaaaacccacggtggacaatctttgagaggcggcttccttgctgtggttgtgggataggatggtcttcttttcttttaggtttcttgtgtcctttgatttggtactttgcaaccactctttactgctgcaagtactacaacaaagatcctcgagagcgccctgggctagctgcatcagctgttgcggcactcatcttcacagtcctggcactcatcgctctctctgtggcactgataatctatatataaaacgaggaatgaacttgcgcttgcttgaaatgcgtactcaggcactcatcttcacagtcctggcagccatacatcgctctctgtggcacagatcatctgaaacccaaagcgaggaaaacgcggtagctggacctggcattcagaaggaacttgtaatttcagtgatagtagcatatagttgcaatcatccttcatgtatcaccatatcaagttgttgatttaaatgctgcaaccgtccctgttgtcggttgacctgtcggctgctgttgtctatcaacgaggatgatcattgctctatcgcaaactgtgtgctccgtgatctgcgatgcttctgaactcatgctgtcttggcaacctttagggctcattttacagagctccccttcatg

SEQ ID NO: 29190 - DNA, 2368 bp, Zea Mays
atacctgtgccctaatagaatttttacccgtctggtttcggggtaccgattgccagccagagcgagagggagagcgagcgcgagcgcgcagtcgccgtccacaccgttgagttttttctcaggcttcgcatggcctgattcatcctacagtctccaacaagccaagcaaacgccgcatcgcgctttctccgcttccttctttcccctcacagggtcagaccccaacgccgggagaataggggattaggagccagacctggcggcgccgggcgtccaagaaacgctgcctaataaaatccctccggcgtctgtcgtcttgaccgcggcggcgcaggcttcttcttttcgctctccacgtaagtctgctacctttccccccacggttccagcgcttgcccccctgcgggagcgtgtcttggatcctttggttgggaattgggattcgaagccgtcgtcgggattgtctgttcccgttcttgaattctagcgcggaggcggattggattcgagctgcgagttttagcttactaatttttctgtgcggtgggtcgagtaatagaatctggagggcgtccttttgtgcgatattgtcagttcatagctgttactcagctcgatgatgcaggcagtgagctcaacatgttcgatgaaattgcttacccaagttacttatctaaggaaggattgctgcggtcagaattacatcttcaagattgtagactgacaactgtgtttccaaacttaaactgacggcaggacatgcaagaagcaagacacacttagggctggtttggtgactagagaattgggggttcattttctccctcaatccccttcaatatcacttaattccccggtcatcaaaccggtcagaattacagcgtaagggtgggtttggtgaccagtgaattgagaattccccctccaattactctcaattcccttatcaccaaaccaactctaaagcttagacacggcacctactgatttatgtaggactaattcctatggtcctatcaattgcaagggacatgcatctgtgcctatgatcctatttgttacagaggaatatatagattttcatgcatttgttcctatcaatttactcatgtttgtattttttttccagggcagcgtcatgaagattaaggggaacttgcatgtttgatgtacccctgtagcaaaaaattcttgtgataaaatttgttgaattagtcactgtcagggagggatctagttgtcagttgtttgtattaaagctgctggcactttccttgcagggtttctgtagaataaatgggagaaggtaacaattttcaactttatattgtttcttgtggatcaattgactgttgcacctttgcaacatcagagtccgtcattgtagaattgtgcttttctgttaccttcagaattagatgttattatacctgccatgtgtaaacatcagcatggctgcgtgttcctcttggggcctctttgtcatgcctctggaaggcgcttggtctactgtacataaacactctttcgtatcttaatcgaaaggcagagctcctgccacatctttcaaaaaaaatgcatctcattaacacttagacttgatgtaggatactggctctgttcattatcttaaatttccagatttaggaagaaacttcagttactgatcatattcttcctttgctttgcatagcacacttggatgaatgttgtcattgccaagggtgtgctggcaagtatacactactcagagatgaagaaaacccacggtggacaatctttgagaggcggcttccttgctgtggttgtgggataggatggtcttcgtaagtatgctttactactccagtcttcatataaacttcggttcacaattgtccattgagcatactgtggttgcagttttcttttaggtttcttgtgtcctttgatttggtactttgcaaccactctttactgctgcaagtactacaacaaagatcctcgagagcgccctgggctagctgcatcagctgttgcggcactcatcttcacagtcctggcagccatacatcgctctctgtggcacagatcatctgaaacccaaagcgaggaaaacgcggtagctggacctggcattcagaaggaacttgtaatttcagtgatagtagcatatagttgcaatcatccttcatgtatcaccatatcaagttgttgatttaaatgctgcaaccgtccctgttgtcggttgacctgtcggctgctgttgtctatcaacgaggatgatcattgctctatcgcaaactgtgtgctccgtgatctgcgatgcttctgaactcatgctgtcttggcaacctttagggctcattttacagagctccccttcatg

SEQ ID NO: 29191 - DNA, 2396 bp, Zea Mays
atacctgtgccctaatagaatttttacccgtctggtttcggggtaccgattgccagccagagcgagagggagagcgagcgcgagcgcgcagtcgccgtccacaccgttgagttttttctcaggcttcgcatggcctgattcatcctacagtctccaacaagccaagcaaacgccgcatcgcgctttctccgcttccttctttcccctcacagggtcagaccccaacgccgggagaataggggattaggagccagacctggcggcgccgggcgtccaagaaacgctgcctaataaaatccctccggcgtctgtcgtcttgaccgcggcggcgcaggcttcttcttttcgctctccacgtaagtctgctacctttccccccacggttccagcgcttgcccccctgcgggagcgtgtcttggatcctttggttgggaattgggattcgaagccgtcgtcgggattgtctgttcccgttcttgaattctagcgcggaggcggattggattcgagctgcgagttttagcttactaatttttctgtgcggtgggtcgagtaatagaatctggagggcgtccttttgtgcgatattgtcagttcatagctgttactcagctcgatgatgcaggcagtgagctcaacatgttcgatgaaattgcttacccaagttacttatctaaggaaggattgctgcggtcagaattacatcttcaagattgtagactgacaactgtgtttccaaacttaaactgacggcaggacatgcaagaagcaagacacacttagggctggtttggtgactagagaattgggggttcattttctccctcaatccccttcaatatcacttaattccccggtcatcaaaccggtcagaattacagcgtaagggtgggtttggtgaccagtgaattgagaattccccctccaattactctcaattcccttatcaccaaaccaactctaaagcttagacacggcacctactgatttatgtaggactaattcctatggtcctatcaattgcaagggacatgcatctgtgcctatgatcctatttgttacagaggaatatatagattttcatgcatttgttcctatcaatttactcatgtttgtattttttttccagggcagcgtcatgaagattaaggggaacttgcatgtttgatgtacccctgtagcaaaaaattcttgtgataaaatttgttgaattagtcactgtcagggagggatctagttgtcagttgtttgtattaaagctgctggcactttccttgcagggtttctgtagaataaatgggagaaggtaacaattttcaactttatattgtttcttgtggatcaattgactgttgcacctttgcaacatcagagtccgtcattgtagaattgtgcttttctgttaccttcagaattagatgttattatacctgccatgtgtaaacatcagcatggctgcgtgttcctcttggggcctctttgtcatgcctctggaaggcgcttggtctactgtacataaacactctttcgtatcttaatcgaaaggcagagctcctgccacatctttcaaaaaaaatgcatctcattaacacttagacttgatgtaggatactggctctgttcattatcttaaatttccagatttaggaagaaacttcagttactgatcatattcttcctttgctttgcatagcacacttggatgaatgttgtcattgccaagggtgtgctggcaagtatacactactcagagatgaagaaaacccacggtggacaatctttgagaggcggcttccttgctgtggttgtgggataggatggtcttcttttcttttaggtttcttgtgtcctttgatttggtactttgcaaccactctttactgctgcaagtactacaacaaagatcctcgagagcgccctgggctagctgcatcagctgttgcggcactcatcttcacagtcctggcactcatcgctctctctgtggcactgataatctatatataaaacgaggaatgaacttgcgcttgcttgaaatgcgtactcaggcactcatcttcacagtcctggcagccatacatcgctctctgtggcacagatcatctgaaacccaaagcgaggaaaacgcggtagctggacctggcattcagaaggaacttgtaatttcagtgatagtagcatatagttgcaatcatccttcatgtatcaccatatcaagttgttgatttaaatgctgcaaccgtccctgttgtcggttgacctgtcggctgctgttgtctatcaacgaggatgatcattgctctatcgcaaactgtgtgctccgtgatctgcgatgcttctgaactcatgctgtcttggcaacctttagggctcattttacagagctccccttcatg

SEQ ID NO: 29192 - DNA, 3641 bp, Zea Mays
cctgcctgccaggcccaggctgaccgcaccgcaccgtctgcacgagaggagcctaccgagccacagcccacagccagcacccgcgggtgctcacgcgactgcacgagctagccttcggcaactgatcggtctcacacggcgccattggagagaggcgagggaggatagcatcagaggaagagtcagagacagacagagcagcggggatggtggtgcagaagcagaggagggtgccggccgaggtgttctggcctaaggtcgtgctcaagaagtggctcaacctcaagagcaaggacctggacttgggcgcctccttggccgccgattacgacgacgacgacgacggtagcgacgttgacggccaagagaactgcggctgtgacgacggcggcggcggcggcggcgctcgcaggccggacgatgacggcgacggcgcccagatcaccggtgagggtctgcgtcggcacctggaacgccggcggcaaggcgccgccgaacgacctcgacatcgccgagtggctcggcactggcggcgacgccgagcccgccgacatctacgtgctcgggttccaggaagtggtgccgctgaacgccagcaacgtgttcggcgcggaggacgggcggccggcgcgggcgtgggagtccgtgatccgcggcgcgctgcggcaggcgcagccgccggcgcccaggtacaggtgctacagccaccctccctcgccgtcgcggttcgagcccccgatcggtgccgccgaagagctcctccccggcggcacggacaccgagaccgacaccgacgaggacgtgcccttgggcgaccccgtcgcggcagccactccgaccccgagaaagctgagcaggctcaaccacttcagcgtcgtcgtgggcgagaacgagaacggctcatcggagctcaacggcgacgaactggacgacgggcctgaccagccgccgcagcagctaagccttcagcagcgggcgctgctgaggtccctgagccgggcggacagggtaggggtgctctggccggagcagccgctggacctactccccgcgtcgtcggcgtcggcgtcggcgtcagcgtcgttcagggcgtccaagtcgttcagccgggccgcctacaggtcgtcgttcagggggtcgtcccgcgtggcggccgacgtggtggatgacctgcccatgatcccggacctcgacctggacggcgcgctgcggaagaagggccggtcgccgttcgtgcgcatcgtgagcaagcagatggtggggatcttcctgacggtgtgggtgcggcggggcctccggaagtgcgtgcagagcctcaaggtctccaccgtcggcgtcggcgccatgggctacatcggcaacaagggggccgtgtcggtgagcatgtccgtgtaccagaccatgttctgcttcgtgtgcagccacctcgccgccggcgagaagcccggcgacgtccacaagcgcaacgccgacgtgcacgagatccaccgccgcacgcgcttcgccgccccgggcgacctgcagctgcccagaaacatccacgaccacgaccggatcttctggctgggcgatctgaactaccggctggacgcgtcgtacgagcgagcgcacgagctgatctcggcgggaagctggcgcgagctggccgagacggaccagctgaagcgggagctgaggaaggggcgggcgttcgacgggtggacggagggcgtcctggagttcgcgccgacgtacaagtacgagctcggctcgaggaggtacgtcggcgtcggggaccaccagggccagagccagagccagaggggcggcgggcggcggacgccggcgtggtgcgaccgggtgctgtcgtacggcaaggggctgaggctgctgggctaccggcggtcggagctggcgctgtcggaccaccgtccggtgacggccacgtacgcggcggaggtggaggtgttctccagccggaagctgcagagggcgctgacgctcacggacgccgaggtggagggcgggcaggccagccgcatgccccatcaagccctcggagacaccgccatctacccctcgcccacctacctcccgacctcaagcatagacatccatgccaccatcgccaaggccgctgagctccacgcggtgctcctccagggcggcagcgccgccgcatccattgttggggcctacgccagcgctaggcagagcctcgctctcatctgcctacagccggccgcgtcgcgggtgctaacgatcaccaggtcaggcctcctggccatggccatcgaggactaccccgtgtttgccctgctgctctcagatttgaaatgcacaagaaggaacaagcatcaggcgacgaccgtctcgactgcgggagaggggagtgcccctcgagtatccgcagggatccaacacttggacaccgacattcgcataactaggaacatcgaccggggggaaaagagccacaggccaagcggcgagatgaggcggtttggaaccgccatggcagcggcagccgccgacttccgatcccgccgcagccgcggccgccatgtccacctgtacccactccatctgtgcccactggttcgttcttggctccgaatttctttcccatccatctcccttgcgcttcctggtcccttgctgtacatgggtcgccgtgtatgtgatgcgcttgaactgctcgtgaatgatagccttttggcgtgggtatgccacaactctacattgcagctagagatggcagaggaatgccttcttcaagcaaaggacttaagtggcttgttgctactgtactcatctcttggagatgctgaaggaattgaaaagcttgcttctttggcaaaagaacacgaaaaaaacaatgttgctttcctctgcctttttatgcttggtaaagttgaagattgcatacaattgcttgtagacagtaactgtatacctgaagctgcattactggcacgttcatatcttcctagcaaagtaccagagatagtggcaatttggagagacgacctgagtaaaattaatccaaaagctgcagagtctctagcagatccttctgaatatccaaatctatttgaagactggcaggttgctctaactgtagaaaaaagtgttgcgtctcagaggggcaattatcttcctgctgaccagtatgatgctagggtccccctggacactgtgttcacagcttcagttatgaagatgtatctcaagtatgaatcaccagaagtgctggcaaatgaatgtcggcgccccttgtgtccagctcccctgttcgatgggcttcatgcccagtttcttctgctgcttccgttctacttgtcgaggcatcacctccaagatgaagctgccaccgttccatgtcgaggcgcacaccttgagtatcaggaacaccacgtgcatccagtaggacaggaatatagggaccgtcagggccattgttgccactgtgaacagcgcctggagcagtatgtacatgacctgccggttccggtcacccagcagtccgctcagcctccaccagatgttgtttgctttctgtgctttctttgagagctctctgacaaatagttcataagataaacattgagttttatgttttttcatcggaaaatttggttctatgttgggatcaaggatat

SEQ ID NO: 29193 - DNA, 3724 bp, Zea Mays
cctgcctgccaggcccaggctgaccgcaccgcaccgtctgcacgagaggagcctaccgagccacagcccacagccagcacccgcgggtgctcacgcgactgcacgagctagccttcggcaactgatcggtctcacacggcgccattggagagaggcgagggaggatagcatcagaggaagagtcagagacagacagagcagcggggatggtggtgcagaagcagaggagggtgccggccgaggtgttctggcctaaggtcgtgctcaagaagtggctcaacctcaagagcaaggacctggacttgggcgcctccttggccgccgattacgacgacgacgacgacggtagcgacgttgacggccaagagaactgcggctgtgacgacggcggcggcggcggcggcgctcgcaggccggacgatgacggcgacggcgcccagatcaccgacgatagcctggagagcgcgccgtacaagctgcggcggcggaactcggagacgctgcgcgcgcagtacatcaacaccaaagagctgagggtctgcgtcggcacctggaacgccggcggcaaggcgccgccgaacgacctcgacatcgccgagtggctcggcactggcggcgacgccgagcccgccgacatctacgtgctcgggttccaggaagtggtgccgctgaacgccagcaacgtgttcggcgcggaggacgggcggccggcgcgggcgtgggagtccgtgatccgcggcgcgctgcggcaggcgcagccgccggcgcccaggtacaggtgctacagccaccctccctcgccgtcgcggttcgagcccccgatcggtgccgccgaagagctcctccccggcggcacggacaccgagaccgacaccgacgaggacgtgcccttgggcgaccccgtcgcggcagccactccgaccccgagaaagctgagcaggctcaaccacttcagcgtcgtcgtgggcgagaacgagaacggctcatcggagctcaacggcgacgaactggacgacgggcctgaccagccgccgcagcagctaagccttcagcagcgggcgctgctgaggtccctgagccgggcggacagggtaggggtgctctggccggagcagccgctggacctactccccgcgtcgtcggcgtcggcgtcggcgtcagcgtcgttcagggcgtccaagtcgttcagccgggccgcctacaggtcgtcgttcagggggtcgtcccgcgtggcggccgacgtggtggatgacctgcccatgatcccggacctcgacctggacggcgcgctgcggaagaagggccggtcgccgttcgtgcgcatcgtgagcaagcagatggtggggatcttcctgacggtgtgggtgcggcggggcctccggaagtgcgtgcagagcctcaaggtctccaccgtcggcgtcggcgccatgggctacatcggcaacaagggggccgtgtcggtgagcatgtccgtgtaccagaccatgttctgcttcgtgtgcagccacctcgccgccggcgagaagcccggcgacgtccacaagcgcaacgccgacgtgcacgagatccaccgccgcacgcgcttcgccgccccgggcgacctgcagctgcccagaaacatccacgaccacgaccggatcttctggctgggcgatctgaactaccggctggacgcgtcgtacgagcgagcgcacgagctgatctcggcgggaagctggcgcgagctggccgagacggaccagctgaagcgggagctgaggaaggggcgggcgttcgacgggtggacggagggcgtcctggagttcgcgccgacgtacaagtacgagctcggctcgaggaggtacgtcggcgtcggggaccaccagggccagagccagagccagaggggcggcgggcggcggacgccggcgtggtgcgaccgggtgctgtcgtacggcaaggggctgaggctgctgggctaccggcggtcggagctggcgctgtcggaccaccgtccggtgacggccacgtacgcggcggaggtggaggtgttctccagccggaagctgcagagggcgctgacgctcacggacgccgaggtggagggcgggcaggccagccgcatgccccatcaagccctcggagacaccgccatctacccctcgcccacctacctcccgacctcaagcatagacatccatgccaccatcgccaaggccgctgagctccacgcggtgctcctccagggcggcagcgccgccgcatccattgttggggcctacgccagcgctaggcagagcctcgctctcatctgcctacagccggccgcgtcgcgggtgctaacgatcaccaggtcaggcctcctggccatggccatcgaggactaccccgtgtttgccctgctgctctcagatttgaaatgcacaagaaggaacaagcatcaggcgacgaccgtctcgactgcgggagaggggagtgcccctcgagtatccgcagggatccaacacttggacaccgacattcgcataactaggaacatcgaccggggggaaaagagccacaggccaagcggcgagatgaggcggtttggaaccgccatggcagcggcagccgccgacttccgatcccgccgcagccgcggccgccatgtccacctgtacccactccatctgtgcccactggttcgttcttggctccgaatttctttcccatccatctcccttgcgcttcctggtcccttgctgtacatgggtcgccgtgtatgtgatgcgcttgaactgctcgtgaatgatagccttttggcgtgggtatgccacaactctacattgcagctagagatggcagaggaatgccttcttcaagcaaaggacttaagtggcttgttgctactgtactcatctcttggagatgctgaaggaattgaaaagcttgcttctttggcaaaagaacacgaaaaaaacaatgttgctttcctctgcctttttatgcttggtaaagttgaagattgcatacaattgcttgtagacagtaactgtatacctgaagctgcattactggcacgttcatatcttcctagcaaagtaccagagatagtggcaatttggagagacgacctgagtaaaattaatccaaaagctgcagagtctctagcagatccttctgaatatccaaatctatttgaagactggcaggttgctctaactgtagaaaaaagtgttgcgtctcagaggggcaattatcttcctgctgaccagtatgatgctagggtccccctggacactgtgttcacagcttcagttatgaagatgtatctcaagtatgaatcaccagaagtgctggcaaatgaatgtcggcgccccttgtgtccagctcccctgttcgatgggcttcatgcccagtttcttctgctgcttccgttctacttgtcgaggcatcacctccaagatgaagctgccaccgttccatgtcgaggcgcacaccttgagtatcaggaacaccacgtgcatccagtaggacaggaatatagggaccgtcagggccattgttgccactgtgaacagcgcctggagcagtatgtacatgacctgccggttccggtcacccagcagtccgctcagcctccaccagatgttgtttgctttctgtgctttctttgagagctctctgacaaatagttcataagataaacattgagttttatgttttttcatcggaaaatttggttctatgttgggatcaaggatat

SEQ ID NO: 29194 - DNA, 2877 bp, Zea Mays
atttctgtcatccctagccgccacaaaacagccggccaccaggttgtctcctggccgaccgcgctctgctgctcaaaacttcctctctccctatctgttatgcctcggccaaaatagctcttggcaaacggcttggcaagcagctgtctgctggcttcttgccttagccaaatgaagatcatatttttcacgacctctcttttatttgttttagttcttttttttgtttgactgaatctcagagaaaacgtcttgctccctccaccaggccgccaggacgcaacgtttctctcttttgaatctgctgttttttttcttgaatccgacgctagttccctggcctagcgcaggcatgtcttttcatttaccagagatggtcggccgattatggggcgctgtctctaaccttttaaaaactcggatctagttctcatttactcgaatcccttactgtgagaatgaatgtatgagatggatctaatgtaatatttgggatcgagttatgagttgattaaaaaaacgtggatccgagagtttgcgttatttctgttattttctgtgatgattttctgtacctattctaatctgttctgtcatctaggccgtggatgtaaaaaaagatcccgagccactgatctctgttgaccaagatttaaaaatgattagggttaggttattaaaccctaaccctaaaacctcgatctattttactatctcggatttcctcggtttggtcgagaccaagtctcatttagtggccgaaaatcctagatttagggtcagggaaagaagtaatgccaatgaaacacagaagactacaaagtctgaacttagaagctgagacacaggaaaacgtggaacaacatgaagatgtccaagatccacaaccagagctcaccattgggtttcctgagggagaagcgccaacaaggaataagtcattcaaaataatatgtgagtttgtcattttgttctcaaacattcttatagatatatgaacatcaatgtatgatccatgacattattaatttaagggcaaaatggagttgttcgggaggtttttagaaatttccgaacagctgaattgtgggatctgaaaggaggaagagtactagttgaaactgacaagaatggcattcccaatcagtggtctgaatccattctctcgtcataccttggtgagcttgcacagaattcatcatttgcaccattacacattccgagatgggacaacaaattattcaaaggtccaaaggaacgcatcatcaaagatgttgagaaaaaatttatctatagtagtgagacaaaatggtctactcgagattggattcttaagacagtgaataaaaggtggagagactacaagtcagacttgaagaaacaatacttcaatccagataagaggtcttttgaccagattgaaaaggatgtccctgatggtgtgaatgaaaatcaatggagttttctgttaggcatatggtgcagtgaagcacatcagaaattatgccggacaaatgcggaatctggaaagaagcagaggcatccacacactagcggtaggaaaagccatgctagacttaagaaggagatggaagacaagaagaaaggaagcatcactaaaattgatctttgggacgagtctcataagaagaggaatgggaactatgtcaatcaaaatgtgcaaacacttatgggtaaggccttcgatgaattagagaacaggaggaaaggacaaggggacactttctactagtgattatgatgatgtgtttgagaatgtcataagaaaagacttgaacattcgtgggtactatgatgatacacattggagcaatgaaactgattcacatgttcaatcagaggagaacaaaatgattagaagggacctagagcttgctatttctgggtttaggaacattagagcattcctagaaaaaagtttccagaagaggaattgctaagcacaattctagctactggatctggaagcactacacaggttgatactaaagacaatgaaaatgtctcattgcaatatgataatgtagaacgatccagttatgagaaatcaccttcaccatacaatgaacagatttatactagagattataatattgccaaggtgggttgctctgatcattcagtaccaaatgacaacatagctttcagggaatcacaagttacaaggtctagtgacttgaaccaggaactcaacaatggatcactatctctagataaagaaatgtctgataaggaaactcaaagcaagcaacaacaacaaagcaaattgcaacagaataaacagaagactgtcttgttgtactcaacaaggaaaagaaaactaggccaagtttttgctgttggtaatcttatatctagagatactactcatgaaattggaggaactgtacttggggatggatattatgctgttgcggttcattatcttaacaatgttgaagatgaaagattacctcgaccacacggagatcttaaaactttggaggatgctgtgggcatgtgtgttgcttggcctcgcacacatcttaaaagggtgaagccaactactgagaagcgcacttgaatggttagaagactgaagatgcaactaatgaatgagcaagtgttatagtggagagtagttctaggatcaaaagttctagttgtcaatctacttgtttaattgtgttaggaacctcattttattcactcttgtatgtctaatctacctcaagaccacttcgtttggattgaaaatacttatgtattgttgcttacacatgaagcatttaattgatctgttatatatatgaaccttgtgtcttgtatatatatgtgctcaaattgagtgtttgtgtataagcaaaaattagcaat

SEQ ID NO: 29195 - DNA, 2692 bp, Zea Mays
atattgactttggtaatatgtatttagcttctcgaaccttaaatatatgttataaaaatatcagtgacaacctttacgaaacgaaggtagtagtttttgtacattttttagtaagacaaagtttaactttgatttttaaaagtcaaacattatttgaatttaaaacgtgtgtggaattgaaaaatcgatggctagctaatcaaattggtcaataaactagtcaacgtgatcaaactaaaaaaatgttgcactttattacttgagaaattttccagtagaaattttccagttgaaattttaaaagaataaatctaaataattaatgaagtgtttcttggcgcgcttaaacttctcgaaaatattgtgctttcggctttcgcgctctgtttatccgcgccaaaaaattcccccccccctaaagtgttggaaccaccctcccatgtttctcgatcacacctcctagaaatctcctccggttcttccacctccctgtagttctcgctctcctgccaccattctcttcgtgctcctgctccatatgccctcctttcagtctgctgcttgatgatccatcgcccagctgctggttgatccgtcgcccagctggtaacagatttcttcgtgggtgcagtagtaccataactgacccaccctctaatctttactccgacctacaagggaaagaagtaatgccaatgaaacacagaagactacaaagtctgaacttagaagctgagacacaggaaaacgtggaacaacatgaagatgtccaagatccacaaccagagctcaccattgggtttcctgagggagaagcgccaacaaggaataagtcattcaaaataatatggcaaaatggagttgttcgggaggtttttagaaatttccgaacagctgaattgtgggatctgaaaggaggaagagtactagttgaaactgacaagaatggcattcccaatcagtggtctgaatccattctctcgtcataccttggtgagcttgcacagaattcatcatttgcaccattacacattccgagatgggacaacaaattattcaaaggtccaaaggaacgcatcatcaaagatgttgagaaaaaatttatctatagtagtgagacaaaatggtctactcgagattggattcttaagacagtgaataaaaggtggagagactacaagtcagacttgaagaaacaatacttcaatccagataagaggtcttttgaccagattgaaaaggatgtccctgatggtgtgaatgaaaatcaatggagttttctgttaggcatatggtgcagtgaagcacatcagaaattatgccggacaaatgcggaatctggaaagaagcagaggcatccacacactagcggtaggaaaagccatgctagacttaagaaggagatggaagacaagaagaaaggaagcatcactaaaattgatctttgggacgagtctcataagaagaggaatgggaactatgtcaatcaaaatgtgcaaacacttatgggtaaggccttcgatgaattagagaacaggaggaaaggacaaggggacactttctactagtgattatgatgatgtgtttgagaatgtcataagaaaagacttgaacattcgtgggtactatgatgatacacattggagcaatgaaactgattcacatgttcaatcagaggagaacaaaatgattagaagggacctagagcttgctatttctgggtttaggaacattagagcattcctagaaaaaagtttccagaagaggaattgctaagcacaattctagctactggatctggaagcactacacaggttgatactaaagacaatgaaaatgtctcattgcaatatgataatgtagaacgatccagttatgagaaatcaccttcaccatacaatgaacagatttatactagagattataatattgccaaggtgggttgctctgatcattcagtaccaaatgacaacatagctttcagggaatcacaagttacaaggtctagtgacttgaaccaggaactcaacaatggatcactatctctagataaagaaatgtctgataaggaaactcaaagcaagcaacaacaacaaagcaaattgcaacagaataaacagaagactgtcttgttgtactcaacaaggaaaagaaaactaggccaagtttttgctgttggtaatcttatatctagagatactactcatgaaattggaggaactgtacttggggatggatattatgctgttgcggttcattatcttaacaatgttgaagatgaaagattacctcgaccacacggagatcttaaaactttggaggatgctgtgggcatgtgtgttgcttggcctcgcacacatcttaaaagggtgaagccaactactgagaagcgcacttgaatggttagaagactgaagatgcaactaatgaatgagcaagtgttatagtggagagtagttctaggatcaaaagttctagttgtcaatctacttgtttaattgtgttaggaacctcattttattcactcttgtatgtctaatctacctcaagaccacttcgtttggattgaaaatacttatgtattgttgcttacacatgaagcatttaattgatctgttatatatatgaaccttgtgtcttgtatatatatgtgctcaaattgagtgtttgtgtataagcaaaaattagcaat

SEQ ID NO: 29196 - DNA, 2681 bp, Zea Mays
attgactttggtaatatgtatttagcttctcgaaccttaaatatatgttataaaaatatcagtgacaacctttacgaaacgaaggtagtagtttttgtacattttttagtaagacaaagtttaactttgatttttaaaagtcaaacattatttgaatttaaaacgtgtgtggaattgaaaaatcgatggctagctaatcaaattggtcaataaactagtcaacgtgatcaaactaaaaaaatgttgcactttattacttgagaaattttccagtagaaattttccagttgaaattttaaaagaataaatctaaataattaatgaagtgtttcttggcgcgcttaaacttctcgaaaatattgtgctttcggctttcgcgctctgtttatccgcgccaaaaaattcccccccccctaaagtgttggaaccaccctcccatgtttctcgatcacacctcctagaaatctcctccggttcttccacctccctgtagttctcgctctcctgccaccattctcttcgtgctcctgctccatatgccctcctttcagtctgctgcttgatgatccatcgcccagctgctggttgatccgtcgcccagctggtaacagatttcttcgtgggtgcagtagtaccataactgacccaccctctaatctttactccgacctacaagggaaagaagtaatgccaatgaaacacagaagactacaaagtctgaacttagaagctgagacacaggaaaacgtggaacaacatgaagatgtccaagatccacaaccagagctcaccattgggtttcctgagggagaagcgccaacaaggaataagtcattcaaaataatatggcaaaatggagttgttcgggaggtttttagaaatttccgaacagctgaattgtgggatctgaaaggaggaagagtactagttgaaactgacaagaatggcattcccaatcagtggtctgaatccattctctcgtcataccttggtgagcttgcacagaattcatcatttgcaccattacacattccgagatgggacaacaaattattcaaaggtccaaaggaacgcatcatcaaagatgttgagaaaaaatttatctatagtagtgagacaaaatggtctactcgagattggattcttaagacagtgaataaaaggtggagagactacaagtcagacttgaagaaacaatacttcaatccagataagaggtcttttgaccagattgaaaaggatgtccctgatggtgtgaatgaaaatcaatggagttttctgttaggcatatggtgcagtgaagcacatcagaaattatgccggacaaatgcggaatctggaaagaagcagaggcatccacacactagcggtaggaaaagccatgctagacttaagaaggagatggaagacaagaagaaaggaagcatcactaaaattgatctttgggacgagtctcataagaagaggaatgggaactatgtcaatcaaaatgtgcaaacacttatgggtaaggccttcgatgaattagagaacaggaggaaaggacaaggggacactttctactagtgattatgatgatgtgtttgagaatgtcataagaaaagacttgaacattcgtgggtactatgatgatacacattggagcaatgaaactgattcacatgttcaatcagaggagaacaaaatgattagaagggacctagagcttgctatttctgggtttaggaacattagagcattcctagaaaaaagtttccagaagaggaattgctaagcacaattctagctactggatctggaagcactacacaggttgatactaaagacaatgaaaatgtctcattgcaatatgataatgtagaacgatccagttatgagaaatcaccttcaccatacaatgaacagatttatactagagattataatattgccaaggtgggttgctctgatcattcagtaccaaatgacaacatagctttcagggaatcacaagttacaaggtctagtgacttgaaccaggaactcaacaatggatcactatctctagataaagaaatgtctgataaggaaactcaaagcaagcaacaacaacaaagcaaattgcaacagaagactgtcttgttgtactcaacaaggaaaagaaaactaggccaagtttttgctgttggtaatcttatatctagagatactactcatgaaattggaggaactgtacttggggatggatattatgctgttgcggttcattatcttaacaatgttgaagatgaaagattacctcgaccacacggagatcttaaaactttggaggatgctgtgggcatgtgtgttgcttggcctcgcacacatcttaaaagggtgaagccaactactgagaagcgcacttgaatggttagaagactgaagatgcaactaatgaatgagcaagtgttatagtggagagtagttctaggatcaaaagttctagttgtcaatctacttgtttaattgtgttaggaacctcattttattcactcttgtatgtctaatctacctcaagaccacttcgtttggattgaaaatacttatgtattgttgcttacacatgaagcatttaattgatctgttatatatatgaaccttgtgtcttgtatatatatgtgctcaaattgagtgtttgtgtataagcaaaaattagcaat

SEQ ID NO: 29197 - DNA, 2687 bp, Zea Mays
attgactttggtaatatgtatttagcttctcgaaccttaaatatatgttataaaaatatcagtgacaacctttacgaaacgaaggtagtagtttttgtacattttttagtaagacaaagtttaactttgatttttaaaagtcaaacattatttgaatttaaaacgtgtgtggaattgaaaaatcgatggctagctaatcaaattggtcaataaactagtcaacgtgatcaaactaaaaaaatgttgcactttattacttgagaaattttccagtagaaattttccagttgaaattttaaaagaataaatctaaataattaatgaagtgtttcttggcgcgcttaaacttctcgaaaatattgtgctttcggctttcgcgctctgtttatccgcgccaaaaaattcccccccccctaaagtgttggaaccaccctcccatgtttctcgatcacacctcctagaaatctcctccggttcttccacctccctgtagttctcgctctcctgccaccattctcttcgtgctcctgctccatatgccctcctttcagtctgctgcttgatgatccatcgcccagctgctggttgatccgtcgcccagctggtaacagatttcttcgtgggtgcagtagtaccataactgacccaccctctaatctttactccgacctacaagggaaagaagtaatgccaatgaaacacagaagactacaaagtctgaacttagaagctgagacacaggaaaacgtggaacaacatgaagatgtccaagatccacaaccagagctcaccattgggtttcctgagggagaagcgccaacaaggaataagtcattcaaaataatatggcaaaatggagttgttcgggaggtttttagaaatttccgaacagctgaattgtgggatctgaaaggaggaagagtactagttgaaactgacaagaatggcattcccaatcagtggtctgaatccattctctcgtcataccttggtgagcttgcacagaattcatcatttgcaccattacacattccgagatgggacaacaaattattcaaaggtccaaaggaacgcatcatcaaagatgttgagaaaaaatttatctatagtagtgagacaaaatggtctactcgagattggattcttaagacagtgaataaaaggtggagagactacaagtcagacttgaagaaacaatacttcaatccagataagaggtcttttgaccagattgaaaaggatgtccctgatggtgtgaatgaaaatcaatggagttttctgttaggcatatggtgcagtgaagcacatcagaaattatgccggacaaatgcggaatctggaaagaagcagaggcatccacacactagcggtaggaaaagccatgctagacttaagaaggagatggaagacaagaagaaaggaagcatcactaaaattgatctttgggacgagtctcataagaagaggaatgggaactatgtcaatcaaaatgtgcaaacacttatgggtaaggccttcgatgaattagagaacaggaggaaaggacaaggggacactttctactagtgattatgatgatgtgtttgagaatgtcataagaaaagacttgaacattcgtgggtactatgatgatacacattggagcaatgaaactgattcacatgttcaatcagaggagaacaaaatgattagaagggacctagagcttgctatttctgggtttaggaacattagagcattcctagaaaaaagtttccagaagaggaattgctaagcacaattctagctactggatctggaagcactacagttgatactaaagacaatgaaaatgtctcattgcaatatgataatgtagaacgatccagttatgagaaatcaccttcaccatacaatgaacagatttatactagagattataatattgccaaggtgggttgctctgatcattcagtaccaaatgacaacatagctttcagggaatcacaagttacaaggtctagtgacttgaaccaggaactcaacaatggatcactatctctagataaagaaatgtctgataaggaaactcaaagcaagcaacaacaacaaagcaaattgcaacagaataaacagaagactgtcttgttgtactcaacaaggaaaagaaaactaggccaagtttttgctgttggtaatcttatatctagagatactactcatgaaattggaggaactgtacttggggatggatattatgctgttgcggttcattatcttaacaatgttgaagatgaaagattacctcgaccacacggagatcttaaaactttggaggatgctgtgggcatgtgtgttgcttggcctcgcacacatcttaaaagggtgaagccaactactgagaagcgcacttgaatggttagaagactgaagatgcaactaatgaatgagcaagtgttatagtggagagtagttctaggatcaaaagttctagttgtcaatctacttgtttaattgtgttaggaacctcattttattcactcttgtatgtctaatctacctcaagaccacttcgtttggattgaaaatacttatgtattgttgcttacacatgaagcatttaattgatctgttatatatatgaaccttgtgtcttgtatatatatgtgctcaaattgagtgtttgtgtataagcaaaaattagcaat

SEQ ID NO: 29198 - DNA, 4478 bp, Zea Mays
ccgcccccgaaaatatcaaggccatgtcagcagcgccaggatgcgggcgatctcccacagtcccaccccagctcggggcattcccggataagtatctccctcccccccgccgacgcgcgggcccagacgtgcctcgcgtccacctgtcggtgactgcagtgacccgcgtgggccttcacctgtggctcgcgggtgaaataacgcggccgcaccaccaccacccccggcccccgcatcgcgaaaaaatctttttctcgcctctcatcgctcctcgccatttctctctcctcccctccgtctcacccgccgcccgccgcgaaaatctgcgcacggacgcgccggctgcccgcggagagcctcgggtgggagcgcgccccgtcgagtgttgattacaggtgctcttattggttatgggatcaatgtgcaatttttttctttccgtttgagagcctttctagtttcttgggcaggctcttgagctaccaagcatgtcagaatcaaatgtgaagtggattgatgggcttcacttcacatcattgtactggcctccaccccaggatgtggagcagaagcaggcacaaatcttggcctacgtcgagtactttggccagtttacagctgacagtgagcagttccctgaagatgtagctcagctcattcaaagttcctatccatcaaaagaaagtcgcttgatagatgaagtattggcaacttttgttcttcatcatccggagcatggtcatgcagttgtacatccaattctttcacccatcatagatgggacactgtgctatgataggcatggtcctccattcagctccttcatctctttatttagccatacttctgagcaagagtactcagaacagtgggccttggcctgtggagaaattcttagagtcttaactcactacaataggccaattttcaaagttgaacgccaacacagtgaagctgaatgtagcaccacatctgatcaggcaacatctagtgattccacagataagaaatctaacaattctctaggaaatgaatctgaccggaagccattgaggccactaaccccgtggatcactgacatattgctagctgcacctttgggcattcgaagtgactattttcgatggtgtagcggtgtaatgggaaaatatgctgctggtggagagttgaagcctccaactactgcttacagccgaggatctggaaagcacccacaacttatgccttccacccccagatgggctgttgccaatggagctggagttatattaagtgtctgtgatgaggaggtagctcgttatgagacagcaaatttaacagcagcagctgttcctgcgcttctgctacctccgccaacgacacccttggacgagcatttggtggctggtctgccccctcttgaaccatatgctcgcttgttccatagatattatgcaattgctacaccaagtgctacacagaggttgctttttggtcttctcgaagcacctccatcatgggctccagatgcacttgatgcagcagtacagctagttgagctacttagagcagctgaagattatgcttctggcatgcggcttccaaagaattggatgcatctgcatttcttgcgtgccattggaactgcaatgtcaatgagagctggtattgctgctgatacagctgctgctctgcttttccgaatactttcccaaccaacgctgctttttccaccactgcgacatgctgaaggagttgacgtacatcatgaaccactaggtggctatgtatcatcatataagaaacagttggaagttcctgcatctgaggccactatcgatgccactgcacaaggcattgcttctttgttgtgtgctcatgggcctgatgttgagtggagaatatgtaccatctgggaagctgcctatggtttgctaccactaagttcatcagcagttgatttacctgaaattgttgtagctgccccgcttcagccacctacactgtcatggaacctgtacttaccattattaaaagtattcgagtatctacctcgtggaagtccatctgaagcatgcttgatgaggatatttgtggcaacagttgaagctatacttaggagagcttttccttctgaaacaccagagcaatccagaaagccaagaagtcaatctaagaatcttgctgttgctgaacttcacacaatgatacattcactctttgttgaatcctgtgcctcaatggaccttgcctcccggttgctatttgtggtgttaactgtttgtgtaagtcatcaagctttgccagggggcagcaaaagaccaactggtagcgataaccattccctcgaggaagccactgagcattcaagattaacaaatggaagaagcagatgtaagaagagacaaggccctgttgctacgtttgattcgtatgttctagctgcagtttgtgccttatcttgtgagcttcagctgttcccttgcatttctaagaatggatcacattcaaatttaaaggattccatgaagattatcatacctggaaaaaacaatgggatcaataatgagctacacagtagcatcagctcagcaattattcatactcgtagaattcttgccatcctcgaagcccttttctccttgaagccatcatcagttggtacctcatggagctatagctcaaatgaaatagttgcagcagctatggttgctgctcacgtttctgagttattccgtcggtccaggccatgccttaattcactctctgcactgatgagatgcaagcgggatgctgagatttctaccagggcatcatccctctaccatttgattgacttgcatggtaaaacagtgtcctccattgtgaacaaagctgagcctcttgaagctcacctgacccttacaccagtaaagaaggttaatcaacatcgctgtgaggaaaacaacaccaactcatcggatagtgccaagttggaaaacaagaatggttcaacacataagaaaaacggtttctcaaaaccacacttgaaatgtgcagaagaggttctgaacggcaatgttgcaagtacatctgggaaatccattgcaagcttacaggtggaagcatctgatttggcaaacttccttaccatggatcggaatggggggtaccgagatgtctgcagaaagcacatcagctcaccaaggatggaggaaggttgtggatgcactttgtgatgtcgtttcagcctcaccaaccaaggcctcagctgctatcgttctccaggccgagaaggacttgcagccttggattgctagagacgacgaacaaggccagaagatgtggagagtcaaccaacgtatagtgaagcttatagcggagctcatgaggaaccatgacagccctgaaaccttggtgatactcgctagtgcctctgaccttctacttcgtgctactgatggaatacttgttgacggtgaagcttgtactttgccacagcttgagcttctcgaagtaaccgctcgagcagtccatcttattattgaatggggagatccaggtttatcagttgctgatggcctttctaatctgctaaagtgccgtctttcaaccaccatccgctgcctttctcacccaagcgcgcacgtgcgcgcgctcagcatgtccgttctccgtgacatcctggaccacggatccgtgagccccaacaagatcagccgaggggaacagcagcggaatggcatccagagcccatcgtaccggtgcgtggccgcaggcatcctcaactggcaagcggacgtggagaggtgcatagagtgggaagcccacagccgccgcgccaccgggctgacgctcgccttcctcagtacggcggcgaaggagctcggctgccctctcccgtgctgacgaggccgctcccggatctgatctgacatcggcggccacttgacggccagtgctggcagcttgctgcgggaccggcgagtaggacgctaatctctcgaccaaggacgactcgccggtttgttcacgtgatatgtgatcaaactgatattagatggtgtttccaaagtatatatctactgaggggcttgctcccatgatgcgattttattccaatctgacgtcagatgctttacgagcatatttaactgcttgagctgtacgtagcttgtattacttgtaactttgtgtaatatggttattattgccgaagaagcagaacatagctttttcttttttttctctctcttttttagactgctgctagatccttatccatgcgttgcaacggagcgccatatagattgaagttccccttgcagggctccttgtacggtctataacatgaacataaagatggcatccagtagtcaatcagcaactatcgcaatgagattggtcttctgcacgtgacccagtttagctcccgtgcagggctctctgtaacctactgtgatgtcccatgacatgaacataaatgtggcaggtttatcattcaataaccaaacagcagc

SEQ ID NO: 29199 - DNA, 7429 bp, Zea Mays
ggcattcccggataagtatctccctcccccccgccgacgcgcgggcccagacgtgcctcgcgtccacctgtcggtgactgcagtgacccgcgtgggccttcacctgtggctcgcgggtgaaataacgcggccgcaccaccaccacccccggcccccgcatcgcgaaaaaatctttttctcgcctctcatcgctcctcgccatttctctctcctcccctccgtctcacccgccgcccgccgcgaaaatctgcgcacggacgcgccggctgcccgcggagagcctcgggtgggagcgcgccccgtcgaggctcttgagctaccaagcatgtcagaatcaaatgtgaagtggattgatgggcttcacttcacatcattgtactggcctccaccccaggatgtggagcagaagcaggcacaaatcttggcctacgtcgagtactttggccagtttacagctgacagtgagcagttccctgaagatgtagctcagctcattcaaagttcctatccatcaaaagaaagtcgcttgatagatgaagtattggcaacttttgttcttcatcatccggagcatggtcatgcagttgtacatccaattctttcacccatcatagatgggacactgtgctatgataggcatggtcctccattcagctccttcatctctttatttagccatacttctgagcaagagtactcagaacagtgggccttggcctgtggagaaattcttagagtcttaactcactacaataggccaattttcaaagttgaacgccaacacagtgaagctgaatgtagcaccacatctgatcaggcaacatctagtgattccacagataagaaatctaacaattctctaggaaatgaatctgaccggaagccattgaggccactaaccccgtggatcactgacatattgctagctgcacctttgggcattcgaagtgactattttcgatggtgtagcggtgtaatgggaaaatatgctgctggtggagagttgaagcctccaactactggttggtaaaatcaatccccaaatattttatcttgatattgtagatttgtagcattataaaaaactcgtccctccgtgcattatattaagaagaagatcttctcacacagtttgagaaaaccttcgaacccctgccccatccatacagcgcggtacgtagcccatgtgaaaatgatagcgaccaaggattaggccttagaccggtgctttggcgtgagactaacgaggtattttttttacccccaacctgaaatccgctcccatggggagttgaactcaggatctgagaggtgctactcacaccacctaaccaactcagctagtaactataaataaccattttcttatatgtagagattgttgggaaatgcacttgttttcattatgaggccctaaggcctgtatatatacatcggtacatgaggataaatatgcactaaacaccttattcaatggggatatataggtacatgaggataaatatgcactaaacaccttattcaatggggatatttaggaatacatatatatacatctaacaccccctctcaaactcaaggtggatcaatgacactaagtttggagagataaaactgatgctaagctctggtttgcgccctgatgaaggtaccagccaactgaagctctgaaggcacatggcgaagaacaatgacatcatcatcctgaatctgcgctcgtgtataagaagcatcaacaccaatatatgcttagtaagctcatgctttaccggatcacgaacaatactaatagcacatgtactatcagacaaatgagaagtcggtatagatacagaaactccaaaatcaacaagcaaccaccgtagccaagtcacctctgtcgtcgcaagagccatagcacacaactcagcctttgtactcgaacgagaaactgctaattgcttcttagtcttccaagcaatgagggaaccactaagaaaaacacaatggtcagaaagagattaaggatatgagaaataactagcccaagtcacatcaaaataggcatggagctgcaaggagctagaacgaggaaagaacagatgacaagagatagtcccacgaagataacatagaacacgaagaagatgattgtagtgaagttgagtgggggtagatacaaacatattcagaatatgcacatgatacgagatgtcatggtgagtaacaccaaggtaaaccagactaccttcaatgtgacgatatcgagtagaatccgaaagaggctcgccattagtggcacaaaggcaaacattgagctccatggggtcttaacagtgcaatgatcagagacacacaagggtgactagcaagtaactgggcacgaagaggctcaaacttttcacgcggatgggtaagcctagacattttacccgctacacgctacccgaacccggacccgaaatacccgaacccacagtacccaaaatctatttcggataaaaaatgctattacccaaaattagtttgggtagtttggctagcagcacctgatacccgaactacctgtaacaacgggtaatatgccctggcgtgcgaggtgtcggagtctgctatctgcgaaccgtggagacgtcagaagtggagtcatgcgacgacccatgagcccatcaagccaaggcgcattcgctttagcttcatctgatccgacgcccgacagtcgacgctgcataacctagcagtagccgccaactgtctccttgtcctcggtggcggtacccgcctgcgactacgccggacgccggttgcttcttcaccagtcaccacggccgtacactccgttgcacagtcgctgcccttactcccttcgtccctcgtccacggtccacctttgcccagttttgatgactggtagttctaaattcttttcctgtaaatcttcaagccgtatgtaatgtgctttggcctttgggcgtatggactctggaatgttgggtgtgtcactgtcagtgtgagcatgtaatgactgttgttcgatgagagcagatagcttctgtcaaatatgctttgggcttctgtcaaatatgcttttgatgagtgatgaccgctagttctattcaccggaaatatttcgggtaaatcgggtataccgaactcgaacccgaaattacgggtagagttttttcttggctgtaatggggtaacaatttctattacccgaatttatcaaagcccgaactacccgacccgaattaaacgggtaacccgaaggtcccgaacgccagtcttatggatgggtcaagaagtcatatgtgcgacgaaactcaagatcagtcttttgatccagacagaactcacatgtgctaggagacatctacagactaagagtatcaagctgacgctaggcgtcagacatctggctatagaattcatcaactgtagaatctccctgacgtaaagaccactcctgacgaatggcagcaagataagtagatgtccagcacacacaacaatcacgaagaagggtccacatctgatgagaactgtcactcaacaaactctgtagaaaagcgagcctccacactagcggtgagaatagaaccagctcaagcatcctcatccatccatatccgatatgcactctactgagcctcatatgatgccagctgatcatcataatctgcaagtagagtgcatcagctgctccctatactgctccattactcgtcttattaagaaaatggctttcatggttgaccttctagagttctaggcacgaaaccaaattggttaaaagagattctcattattcctctcaggcggcgctcgataactctcttccatatcttcatagtatggctcgtcaacttaatttctcggtaattagtacaactttgaatttattcttgtagatcggttccgatatactttaccactcagacatctttattttggacaaacccagccagaagtatctatattttgggatgtaggtagtagtcgataatgtttgttgtgtatggaaaaaaatcaacatatccctgggtgatttagcttacagccgaggatctggaaagcacccacaacttatgccttccacccccagatgggctgttgccaatggagctggagttatattaagtgtctgtgatgaggaggtagctcgttatgagacagcaaatttaacagcagcagctgttcctgcgcttctgctacctccgccaacgacacccttggacgagcatttggtggctggtctgccccctcttgaaccatatgctcgcttgttccatagatattatgcaattgctacaccaagtgctacacagaggttgctttttggtcttctcgaagcacctccatcatgggctccagatgcacttgatgcagcagtacagctagttgagctacttagagcagctgaagattatgcttctggcatgcggcttccaaagaattggatgcatctgcatttcttgcgtgccattggaactgcaatgtcaatgagagctggtattgctgctgatacagctgctgctctgcttttccgaatactttcccaaccaacgctgctttttccaccactgcgacatgctgaaggagttgacgtacatcatgaaccactaggtggctatgtatcatcatataagaaacagttggaagttcctgcatctgaggccactatcgatgccactgcacaaggcattgcttctttgttgtgtgctcatgggcctgatgttgagtggagaatatgtaccatctgggaagctgcctatggtttgctaccactaagttcatcagcagttgatttacctgaaattgttgtagctgccccgcttcagccacctacactgtcatggaacctgtacttaccattattaaaagtattcgagtatctacctcgtggaagtccatctgaagcatgcttgatgaggatatttgtggcaacagttgaagctatacttaggagagcttttccttctgaaacaccagagcaatccagaaagccaagaagtcaatctaagaatcttgctgttgctgaacttcacacaatgatacattcactctttgttgaatcctgtgcctcaatggaccttgcctcccggttgctatttgtggtgttaactgtttgtgtaagtcatcaagctttgccagggggcagcaaaagaccaactggtagcgataaccattccctcgaggaagccactgagcattcaagattaacaaatggaagaagcagatgtaagaagagacaaggccctgttgctacgtttgattcgtatgttctagctgcagtttgtgccttatcttgtgagcttcagctgttcccttgcatttctaagaatggatcacattcaaatttaaaggattccatgaagattatcatacctggaaaaaacaatgggatcaataatgagctacacagtagcatcagctcagcaattattcatactcgtagaattcttgccatcctcgaagcccttttctccttgaagccatcatcagttggtacctcatggagctatagctcaaatgaaatagttgcagcagctatggttgctgctcacgtttctgagttattccgtcggtccaggccatgccttaattcactctctgcactgatgagatgcaagcgggatgctgagatttctaccagggcatcatccctctaccatttgattgacttgcatggtaaaacagtgtcctccattgtgaacaaagctgagcctcttgaagctcacctgacccttacaccagtaaagaaggttaatcaacatcgctgtgaggaaaacaacaccaactcatcggatagtgccaagttggaaaacaagaatggttcaacacataagaaaaacggtttctcaaaaccacacttgaaatgtgcagaagaggttctgaacggcaatgttgcaagtacatctgggaaatccattgcaagcttacaggtggaagcatctgatttggcaaacttccttaccatggatcggaatggggggtaccgaggttcacaaactctcctaagatctgtattatcagagaaacaagagctgtgcttctctgttgtctcattgctctggcagaagctcatagcttctcccgaaatgcagatgtctgcagaaagcacatcagctcaccaaggatggaggaaggttgtggatgcactttgtgatgtcgtttcagcctcaccaaccaaggcctcagctgctatcgttctccaggccgagaaggacttgcagccttggattgctagagacgacgaacaaggccagaagatgtggagagtcaaccaacgtatagtgaagcttatagcggagctcatgaggaaccatgacagccctgaaaccttggtgatactcgctagtgcctctgaccttctacttcgtgctactgatggaatacttgttgacggtgaagcttgtactttgccacagcttgagcttctcgaagtaaccgctcgagcagtccatcttattattgaatggggagatccaggtttatcagttgctgatggcctttctaatctgctaaagtgccgtctttcaaccaccatccgctgcctttctcacccaagcgcgcacgtgcgcgcgctcagcatgtccgttctccgtgacatcctggaccacggatccgtgagccccaacaagatcagccgaggggaacagcagcggaatggcatccagagcccatcgtaccggtgcgtggccgcaggcatcctcaactggcaagcggacgtggagaggtgcatagagtgggaagcccacagccgccgcgccaccgggctgacgctcgccttcctcagtacggcggcgaaggagctcggctgccctctcccgtgctgacgaggccgctcccggatctgatctgacatcggcggccacttgacggccagtgctggcagcttgctgcgggaccggcgagtaggacgctaatctctcgaccaaggacgactcgccggtttgttcacgtgatatgtgatcaaactgatattagatggtgtttccaaagtatatatctactgaggggcttgctcccatgatgcgattttattccaatctgacgtcagatgctttacgagcatatttaactgcttgagctgtacgtagcttgtattacttgtaactttgtgtaatatggttattattgccgaagaagcagaacatagctttttcttttttttctctctcttttttagactgctgctagatccttatccatgcgttgcaacggagcgccatatagattgaagttccccttgcagggctccttgtacggtctataacatgaacataaagatggcatccagtagtcaatcagcaactatcgcaatgagattggtcttctgcacgtgacccagtttagctcccgtgcagggctctctgtaacctactgtgatgtcccatgacatgaacataaatgtggcaggtttatcattcaataaccaaacagcagc

SEQ ID NO: 29200 - DNA, 4254 bp, Zea Mays
ggataagtatctccctcccccccgccgacgcgcgggcccagacgtgcctcgcgtccacctgtcggtgactgcagtgacccgcgtgggccttcacctgtggctcgcgggtgaaataacgcggccgcaccaccaccacccccggcccccgcatcgcgaaaaaatctttttctcgcctctcatcgctcctcgccatttctctctcctcccctccgtctcacccgccgcccgccgcgaaaatctgcgcacggacgcgccggctgcccgcggagagcctcgggtgggagcgcgccccgtcgaggctcttgagctaccaagcatgtcagaatcaaatgtgaagtggattgatgggcttcacttcacatcattgtactggcctccaccccaggatgtggagcagaagcaggcacaaatcttggcctacgtcgagtactttggccagtttacagctgacagtgagcagttccctgaagatgtagctcagctcattcaaagttcctatccatcaaaagaaagtcgcttgatagatgaagtattggcaacttttgttcttcatcatccggagcatggtcatgcagttgtacatccaattctttcacccatcatagatgggacactgtgctatgataggcatggtcctccattcagctccttcatctctttatttagccatacttctgagcaagagtactcagaacagtgggccttggcctgtggagaaattcttagagtcttaactcactacaataggccaattttcaaagttgaacgccaacacagtgaagctgaatgtagcaccacatctgatcaggcaacatctagtgattccacagataagaaatctaacaattctctaggaaatgaatctgaccggaagccattgaggccactaaccccgtggatcactgacatattgctagctgcacctttgggcattcgaagtgactattttcgatggtgtagcggtgtaatgggaaaatatgctgctggtggagagttgaagcctccaactactgatgggctgttgccaatggagctggagttatattaagtgtctgtgatgaggaggtagctcgttatgagacagcaaatttaacagcagcagctgttcctgcgcttctgctacctccgccaacgacacccttggacgagcatttggtggctggtctgccccctcttgaaccatatgctcgcttgttccatagatattatgcaattgctacaccaagtgctacacagaggttgctttttggtcttctcgaagcacctccatcatgggctccagatgcacttgatgcagcagtacagctagttgagctacttagagcagctgaagattatgcttctggcatgcggcttccaaagaattggatgcatctgcatttcttgcgtgccattggaactgcaatgtcaatgagagctggtattgctgctgatacagctgctgctctgcttttccgaatactttcccaaccaacgctgctttttccaccactgcgacatgctgaaggagttgacgtacatcatgaaccactaggtggctatgtatcatcatataagaaacagttggaagttcctgcatctgaggccactatcgatgccactgcacaaggcattgcttctttgttgtgtgctcatgggcctgatgttgagtggagaatatgtaccatctgggaagctgcctatggtttgctaccactaagttcatcagcagttgatttacctgaaattgttgtagctgccccgcttcagccacctacactgtcatggaacctgtacttaccattattaaaagtattcgagtatctacctcgtggaagtccatctgaagcatgcttgatgaggatatttgtggcaacagttgaagctatacttaggagagcttttccttctgaaacaccagagcaatccagaaagccaagaagtcaatctaagaatcttgctgttgctgaacttcacacaatgatacattcactctttgttgaatcctgtgcctcaatggaccttgcctcccggttgctatttgtggtgttaactgtttgtgtaagtcatcaagctttgccagggggcagcaaaagaccaactggtagcgataaccattccctcgaggaagccactgagcattcaagattaacaaatggaagaagcagatgtaagaagagacaaggccctgttgctacgtttgattcgtatgttctagctgcagtttgtgccttatcttgtgagcttcagctgttcccttgcatttctaagaatggatcacattcaaatttaaaggattccatgaagattatcatacctggaaaaaacaatgggatcaataatgagctacacagtagcatcagctcagcaattattcatactcgtagaattcttgccatcctcgaagcccttttctccttgaagccatcatcagttggtacctcatggagctatagctcaaatgaaatagttgcagcagctatggttgctgctcacgtttctgagttattccgtcggtccaggccatgccttaattcactctctgcactgatgagatgcaagcgggatgctgagatttctaccagggcatcatccctctaccatttgattgacttgcatggtaaaacagtgtcctccattgtgaacaaagctgagcctcttgaagctcacctgacccttacaccagtaaagaaggttaatcaacatcgctgtgaggaaaacaacaccaactcatcggatagtgccaagttggaaaacaagaatggttcaacacataagaaaaacggtttctcaaaaccacacttgaaatgtgcagaagaggttctgaacggcaatgttgcaagtacatctgggaaatccattgcaagcttacaggtggaagcatctgatttggcaaacttccttaccatggatcggaatggggggtaccgagatgtctgcagaaagcacatcagctcaccaaggatggaggaaggttgtggatgcactttgtgatgtcgtttcagcctcaccaaccaaggcctcagctgctatcgttctccaggccgagaaggacttgcagccttggattgctagagacgacgaacaaggccagaagatgtggagagtcaaccaacgtatagtgaagcttatagcggagctcatgaggaaccatgacagccctgaaaccttggtgatactcgctagtgcctctgaccttctacttcgtgctactgatggaatacttgttgacggtgaagcttgtactttgccacagcttgagcttctcgaagtaaccgctcgagcagtccatcttattattgaatggggagatccaggtttatcagttgctgatggcctttctaatctgctaaagtgccgtctttcaaccaccatccgctgcctttctcacccaagcgcgcacgtgcgcgcgctcagcatgtccgttctccgtgacatcctggaccacggatccgtgagccccaacaagatcagccgaggggaacagcagcggaatggcatccagagcccatcgtaccggtgcgtggccgcaggcatcctcaactggcaagcggacgtggagaggtgcatagagtgggaagcccacagccgccgcgccaccgggctgacgctcgccttcctcagtacggcggcgaaggagctcggctgccctctcccgtgctgacgaggccgctcccggatctgatctgacatcggcggccacttgacggccagtgctggcagcttgctgcgggaccggcgagtaggacgctaatctctcgaccaaggacgactcgccggtttgttcacgtgatatgtgatcaaactgatattagatggtgtttccaaagtatatatctactgaggggcttgctcccatgatgcgattttattccaatctgacgtcagatgctttacgagcatatttaactgcttgagctgtacgtagcttgtattacttgtaactttgtgtaatatggttattattgccgaagaagcagaacatagctttttcttttttttctctctcttttttagactgctgctagatccttatccatgcgttgcaacggagcgccatatagattgaagttccccttgcagggctccttgtacggtctataacatgaacataaagatggcatccagtagtcaatcagcaactatcgcaatgagattggtcttctgcacgtgacccagtttagctcccgtgcagggctctctgtaacctactgtgatgtcccatgacatgaacataaatgtggcaggtttatcattcaataaccaaacagcagc

SEQ ID NO: 29201 - DNA, 6381 bp, Zea Mays
ccggcccccgcatcgcgaaaaaatctttttctcgcctctcatcgctcctcgccatttctctctcctcccctccgtctcacccgccgcccgccgcgaaaatctgcgcacggacgcgccggctgcccgcggagagcctcgggtgggagcgcgccccgtcgaggctcttgagctaccaagcatgtcagaatcaaatgtgaagtggattgatgggcttcacttcacatcattgtactggcctccaccccaggatgtggagcagaagcaggcacaaatcttggcctacgtcgagtactttggccagtttacagctgacagtgagcagttccctgaagatgtagctcagctcattcaaagttcctatccatcaaaagaaagtcgcttgatagatgaagtattggcaacttttgttcttcatcatccggagcatggtcatgcagttgtacatccaattctttcacccatcatagatgggacactgtgctatgataggcatggtcctccattcagctccttcatctctttatttagccatacttctgaggtgtagcggtgtaatgggaaaatatgctgctggtggagagttgaagcctccaactactggtaccagccaactgaagctctgaaggcacatggcgaagaacaatgacatcatcatcctgaatctgcgctcgtgtataagaagcatcaacaccaatatatgcttagtaagctcatgctttaccggatcacgaacaatactaatagcacatgtactatcagacaaatgagaagtcggtatagatacagaaactccaaaatcaacaagcaaccaccgtagccaagtcacctctgtcgtcgcaagagccatagcacacaactcagcctttgtactcgaacgagaaactgctaattgcttcttagtcttccaagcaatgagggaaccactaagaaaaacacaatggtcagaaagagattaaggatatgagaaataactagcccaagtcacatcaaaataggcatggagctgcaaggagctagaacgaggaaagaacagatgacaagagatagtcccacgaagataacatagaacacgaagaagatgattgtagtgaagttgagtgggggtagatacaaacatattcagaatatgcacatgatacgagatgtcatggtgagtaacaccaaggtaaaccagactaccttcaatgtgacgatatcgagtagaatccgaaagaggctcgccattagtggcacaaaggcaaacattgagctccatggggtcttaacagtgcaatgatcagagacacacaagggtgactagcaagtaactgggcacgaagaggctcaaacttttcacgcggatgggtaagcctagacattttacccgctacacgctacccgaacccggacccgaaatacccgaacccacagtacccaaaatctatttcggataaaaaatgctattacccaaaattagtttgggtagtttggctagcagcacctgatacccgaactacctgtaacaacgggtaatatgccctggcgtgcgaggtgtcggagtctgctatctgcgaaccgtggagacgtcagaagtggagtcatgcgacgacccatgagcccatcaagccaaggcgcattcgctttagcttcatctgatccgacgcccgacagtcgacgctgcataacctagcagtagccgccaactgtctccttgtcctcggtggcggtacccgcctgcgactacgccggacgccggttgcttcttcaccagtcaccacggccgtacactccgttgcacagtcgctgcccttactcccttcgtccctcgtccacggtccacctttgcccagttttgatgactggtagttctaaattcttttcctgtaaatcttcaagccgtatgtaatgtgctttggcctttgggcgtatggactctggaatgttgggtgtgtcactgtcagtgtgagcatgtaatgactgttgttcgatgagagcagatagcttctgtcaaatatgctttgggcttctgtcaaatatgcttttgatgagtgatgaccgctagttctattcaccggaaatatttcgggtaaatcgggtataccgaactcgaacccgaaattacgggtagagttttttcttggctgtaatggggtaacaatttctattacccgaatttatcaaagcccgaactacccgacccgaattaaacgggtaacccgaaggtcccgaacgccagtcttatggatgggtcaagaagtcatatgtgcgacgaaactcaagatcagtcttttgatccagacagaactcacatgtgctaggagacatctacagactaagagtatcaagctgacgctaggcgtcagacatctggctatagaattcatcaactgtagaatctccctgacgtaaagaccactcctgacgaatggcagcaagataagtagatgtccagcacacacaacaatcacgaagaagggtccacatctgatgagaactgtcactcaacaaactctgtagaaaagcgagcctccacactagcggtgagaatagaaccagctcaagcatcctcatccatccatatccgatatgcactctactgagcctcatatgatgccagctgatcatcataatctgcaagtagagtgcatcagctgctccctatactgctccattactcgtcttattaagaaaatggctttcatggttgaccttctagagttctaggcacgaaaccaaattggttaaaagagattctcattattcctctcaggcggcgctcgataactctcttccatatcttcatagtatggctcgtcaacttaatttctcggtaattagtacaactttgaatttattcttgtagatcggttccgatatactttaccactcagacatctttattttggacaaacccagccagaagtatctatattttgggatgtaggtagtagtcgataatgtttgttgtgtatggaaaaaaatcaacatatccctgggtgatttagcttacagccgaggatctggaaagcacccacaacttatgccttccacccccagatgggctgttgccaatggagctggagttatattaagtgtctgtgatgaggaggtagctcgttatgagacagcaaatttaacagcagcagctgttcctgcgcttctgctacctccgccaacgacacccttggacgagcatttggtggctggtctgccccctcttgaaccatatgctcgcttgttccatagatattatgcaattgctacaccaagtgctacacagaggttgctttttggtcttctcgaagcacctccatcatgggctccagatgcacttgatgcagcagtacagctagttgagctacttagagcagctgaagattatgcttctggcatgcggcttccaaagaattggatgcatctgcatttcttgcgtgccattggaactgcaatgtcaatgagagctggtattgctgctgatacagctgctgctctgcttttccgaatactttcccaaccaacgctgctttttccaccactgcgacatgctgaaggagttgacgtacatcatgaaccactaggtggctatgtatcatcatataagaaacagttggaagttcctgcatctgaggccactatcgatgccactgcacaaggcattgcttctttgttgtgtgctcatgggcctgatgttgagtggagaatatgtaccatctgggaagctgcctatggtttgctaccactaagttcatcagcagttgatttacctgaaattgttgtagctgccccgcttcagccacctacactgtcatggaacctgtacttaccattattaaaagtattcgagtatctacctcgtggaagtccatctgaagcatgcttgatgaggatatttgtggcaacagttgaagctatacttaggagagcttttccttctgaaacaccagagcaatccagaaagccaagaagtcaatctaagaatcttgctgttgctgaacttcacacaatgatacattcactctttgttgaatcctgtgcctcaatggaccttgcctcccggttgctatttgtggtgttaactgtttgtgtaagtcatcaagctttgccagggggcagcaaaagaccaactggtagcgataaccattccctcgaggaagccactgagcattcaagattaacaaatggaagaagcagatgtaagaagagacaaggccctgttgctacgtttgattcgtatgttctagctgcagtttgtgccttatcttgtgagcttcagctgttcccttgcatttctaagaatggatcacattcaaatttaaaggattccatgaagattatcatacctggaaaaaacaatgggatcaataatgagctacacagtagcatcagctcagcaattattcatactcgtagaattcttgccatcctcgaagcccttttctccttgaagccatcatcagttggtacctcatggagctatagctcaaatgaaatagttgcagcagctatggttgctgctcacgtttctgagttattccgtcggtccaggccatgccttaattcactctctgcactgatgagatgcaagcgggatgctgagatttctaccagggcatcatccctctaccatttgattgacttgcatggtaaaacagtgtcctccattgtgaacaaagctgagcctcttgaagctcacctgacccttacaccagtaaagaaggttaatcaacatcgctgtgaggaaaacaacaccaactcatcggatagtgccaagttggaaaacaagaatggttcaacacataagaaaaacggtttctcaaaaccacacttgaaatgtgcagaagaggttctgaacggcaatgttgcaagtacatctgggaaatccattgcaagcttacaggtggaagcatctgatttggcaaacttccttaccatggatcggaatggggggtaccgaggttcacaaactctcctaagatctgtattatcagagaaacaagagctgtgcttctctgttgtctcattgctctggcagaagctcatagcttctcccgaaatgcagatgtctgcagaaagcacatcagctcaccaaggatggaggaaggttgtggatgcactttgtgatgtcgtttcagcctcaccaaccaaggcctcagctgctatcgttctccaggccgagaaggacttgcagccttggattgctagagacgacgaacaaggccagaagatgtggagagtcaaccaacgtatagtgaagcttatagcggagctcatgaggaaccatgacagccctgaaaccttggtgatactcgctagtgcctctgaccttctacttcgtgctactgatggaatacttgttgacggtgaagcttgtactttgccacagcttgagcttctcgaagtaaccgctcgagcagtccatcttattattgaatggggagatccaggtttatcagttgctgatggcctttctaatctgctaaagtgccgtctttcaaccaccatccgctgcctttctcacccaagcgcgcacgtgcgcgcgctcagcatgtccgttctccgtgacatcctggaccacggatccgtgagccccaacaagatcagccgaggggaacagcagcggaatggcatccagagcccatcgtaccggtgcgtggccgcaggcatcctcaactggcaagcggacgtggagaggtgcatagagtgggaagcccacagccgccgcgccaccgggctgacgctcgccttcctcagtacggcggcgaaggagctcggctgccctctcccgtgctgacgaggccgctcccggatctgatctgacatcggcggccacttgacggccagtgctggcagcttgctgcgggaccggcgagtaggacgctaatctctcgaccaaggacgactcgccggtttgttcacgtgatatgtgatcaaactgatattagatggtgtttccaaagtatatatctactgaggggcttgctcccatgatgcgattttattccaatctgacgtcagatgctttacgagcatatttaactgcttgagctgtacgtagcttgtattacttgtaactttgtgtaatatggttattattgccgaagaagcagaacatagctttttcttttttttctctctcttttttagactgctgctagatccttatccatgcgttgcaacggagcgccatatagattgaagttccccttgcagggctccttgtacggtctataacatgaacataaagatggcatccagtagtcaatcagcaactatcgcaatgagattggtcttctgcacgtgacccagtttagctcccgtgcagggctctctgtaacctactgtgatgtcccatgacatgaacataaatgtggcaggtttatcattcaataaccaaacagcagc

SEQ ID NO: 29202 - DNA, 4151 bp, Zea Mays
aaaaaatctttttctcgcctctcatcgctcctcgccatttctctctcctcccctccgtctcacccgccgcccgccgcgaaaatctgcgcacggacgcgccggctgcccgcggagagcctcgggtgggagcgcgccccgtcgaggctcttgagctaccaagcatgtcagaatcaaatgtgaagtggattgatgggcttcacttcacatcattgtactggcctccaccccaggatgtggagcagaagcaggcacaaatcttggcctacgtcgagtactttggccagtttacagctgacagtgagcagttccctgaagatgtagctcagctcattcaaagttcctatccatcaaaagaaagtcgcttgatagatgaagtattggcaacttttgttcttcatcatccggagcatggtcatgcagttgtacatccaattctttcacccatcatagatgggacactgtgctatgataggcatggtcctccattcagctccttcatctctttatttagccatacttctgagcaagagtactcagaacagtgggccttggcctgtggagaaattcttagagtcttaactcactacaataggccaattttcaaagttgaacgccaacacagtgaagctgaatgtagcaccacatctgatcaggcaacatctagtgattccacagataagaaatctaacaattctctaggaaatgaatctgaccggaagccattgaggccactaaccccgtggatcactgacatattgctagctgcacctttgggcattcgaagtgactattttcgatggtgtagcggtgtaatgggaaaatatgctgctggtggagagttgaagcctccaactactgcttacagccgaggatctggaaagcacccacaacttatgccttccacccccagatgggctgttgccaatggagctggagttatattaagtgtctgtgatgaggaggtagctcgttatgagacagcaaatttaacagcagcagctgttcctgcgcttctgctacctccgccaacgacacccttggacgagcatttggtggctggtctgccccctcttgaaccatatgctcgcttgttccatagatattatgcaattgctacaccaagtgctacacagaggttgctttttggtcttctcgaagcacctccatcatgggctccagatgcacttgatgcagcagtacagctagttgagctacttagagcagctgaagattatgcttctggcatgcggcttccaaagaattggatgcatctgcatttcttgcgtgccattggaactgcaatgtcaatgagagctggtattgctgctgatacagctgctgctctgcttttccgaatactttcccaaccaacgctgctttttccaccactgcgacatgctgaaggagttgacgtacatcatgaaccactaggtggctatgtatcatcatataagaaacagttggaagttcctgcatctgaggccactatcgatgccactgcacaaggcattgcttctttgttgtgtgctcatgggcctgatgttgagtggagaatatgtaccatctgggaagctgcctatggtttgctaccactaagttcatcagcagttgatttacctgaaattgttgtagctgccccgcttcagccacctacactgtcatggaacctgtacttaccattattaaaagtattcgagtatctacctcgtggaagtccatctgaagcatgcttgatgaggatatttgtggcaacagttgaagctatacttaggagagcttttccttctgaaacaccagagcaatccagaaagccaagaagtcaatctaagaatcttgctgttgctgaacttcacacaatgatacattcactctttgttgaatcctgtgcctcaatggaccttgcctcccggttgctatttgtggtgttaactgtttgtgtaagtcatcaagctttgccagggggcagcaaaagaccaactggtagcgataaccattccctcgaggaagccactgagcattcaagattaacaaatggaagaagcagatgtaagaagagacaaggccctgttgctacgtttgattcgtatgttctagctgcagtttgtgccttatcttgtgagcttcagctgttcccttgcatttctaagaatggatcacattcaaatttaaaggattccatgaagattatcatacctggaaaaaacaatgggatcaataatgagctacacagtagcatcagctcagcaattattcatactcgtagaattcttgccatcctcgaagcccttttctccttgaagccatcatcagttggtacctcatggagctatagctcaaatgaaatagttgcagcagctatggttgctgctcacgtttctgagttattccgtcggtccaggccatgccttaattcactctctgcactgatgagatgcaagcgggatgctgagatttctaccagggcatcatccctctaccatttgattgacttgcatggtaaaacagtgtcctccattgtgaacaaagctgagcctcttgaagctcacctgacccttacaccagtaaagaaggttaatcaacatcgctgtgaggaaaacaacaccaactcatcggatagtgccaagttggaaaacaagaatggttcaacacataagaaaaacggtttctcaaaaccacacttgaaatgtgcagaagaggttctgaacggcaatgttgcaagtacatctgggaaatccattgcaagcttacaggtggaagcatctgatttggcaaacttccttaccatggatcggaatggggggtaccgagatgtctgcagaaagcacatcagctcaccaaggatggaggaaggttgtggatgcactttgtgatgtcgtttcagcctcaccaaccaaggcctcagctgctatcgttctccaggccgagaaggacttgcagccttggattgctagagacgacgaacaaggccagaagatgtggagagtcaaccaacgtatagtgaagcttatagcggagctcatgaggaaccatgacagccctgaaaccttggtgatactcgctagtgcctctgaccttctacttcgtgctactgatggaatacttgttgacggtgaagcttgtactttgccacagcttgagcttctcgaagtaaccgctcgagcagtccatcttattattgaatggggagatccaggtttatcagttgctgatggcctttctaatctgctaaagtgccgtctttcaaccaccatccgctgcctttctcacccaagcgcgcacgtgcgcgcgctcagcatgtccgttctccgtgacatcctggaccacggatccgtgagccccaacaagatcagccgaggggaacagcagcggaatggcatccagagcccatcgtaccggtgcgtggccgcaggcatcctcaactggcaagcggacgtggagaggtgcatagagtgggaagcccacagccgccgcgccaccgggctgacgctcgccttcctcagtacggcggcgaaggagctcggctgccctctcccgtgctgacgaggccgctcccggatctgatctgacatcggcggccacttgacggccagtgctggcagcttgctgcgggaccggcgagtaggacgctaatctctcgaccaaggacgactcgccggtttgttcacgtgatatgtgatcaaactgatattagatggtgtttccaaagtatatatctactgaggggcttgctcccatgatgcgattttattccaatctgacgtcagatgctttacgagcatatttaactgcttgagctgtacgtagcttgtattacttgtaactttgtgtaatatggttattattgccgaagaagcagaacatagctttttcttttttttctctctcttttttagactgctgctagatccttatccatgcgttgcaacggagcgccatatagattgaagttccccttgcagggctccttgtacggtctataacatgaacataaagatggcatccagtagtcaatcagcaactatcgcaatgagattggtcttctgcacgtgacccagtttagctcccgtgcagggctctctgtaacctactgtgatgtcccatgacatgaacataaatgtggcaggtttatcattcaataaccaaacagcagc

SEQ ID NO: 29203 - DNA, 3910 bp, Zea Mays
aaaaaatctttttctcgcctctcatcgctcctcgccatttctctctcctcccctccgtctcacccgccgcccgccgcgaaaatctgcgcacggacgcgccggctgcccgcggagagcctcgggtgggagcgcgccccgtcgaggctcttgagctaccaagcatgtcagaatcaaatgtgaagtggattgatgggcttcacttcacatcattgtactggcctccaccccaggatgtggagcagaagcaggcacaaatcttggcctacgtcgagtactttggccagtttacagctgacagtgagcagttccctgaagatgtagctcagctcattcaaagttcctatccatcaaaagaaagtcgcttgatagatgaagtattggcaacttttgttcttcatcatccggagcatggtcatgcagttgtacatccaattctttcacccatcatagatgggacactgtgctatgataggcatggtcctccattcagctccttcatctctttatttagccatacttctgagcaagagtactcagaacagtgggccttggcctgtggagaaattcttagagtcttaactcactacaataggccaattttcaaagttgaacgccaacacagtgaagctgaatgtagcaccacatctgatcaggcaacatctagtgattccacagataagaaatctaacaattctctaggaaatgaatctgaccggaagccattgaggccactaaccccgtggatcactgacatattgctagctgcacctttgggcattcgaagtgactattttcgatggtgtagcggtgtaatgggaaaatatgctgctggtggagagttgaagcctccaactactgatattatgcaattgctacaccaagtgctacacagaggttgctttttggtcttctcgaagcacctccatcatgggctccagatgcacttgatgcagcagtacagctagttgagctacttagagcagctgaagattatgcttctggcatgcggcttccaaagaattggatgcatctgcatttcttgcgtgccattggaactgcaatgtcaatgagagctggtattgctgctgatacagctgctgctctgcttttccgaatactttcccaaccaacgctgctttttccaccactgcgacatgctgaaggagttgacgtacatcatgaaccactaggtggctatgtatcatcatataagaaacagttggaagttcctgcatctgaggccactatcgatgccactgcacaaggcattgcttctttgttgtgtgctcatgggcctgatgttgagtggagaatatgtaccatctgggaagctgcctatggtttgctaccactaagttcatcagcagttgatttacctgaaattgttgtagctgccccgcttcagccacctacactgtcatggaacctgtacttaccattattaaaagtattcgagtatctacctcgtggaagtccatctgaagcatgcttgatgaggatatttgtggcaacagttgaagctatacttaggagagcttttccttctgaaacaccagagcaatccagaaagccaagaagtcaatctaagaatcttgctgttgctgaacttcacacaatgatacattcactctttgttgaatcctgtgcctcaatggaccttgcctcccggttgctatttgtggtgttaactgtttgtgtaagtcatcaagctttgccagggggcagcaaaagaccaactggtagcgataaccattccctcgaggaagccactgagcattcaagattaacaaatggaagaagcagatgtaagaagagacaaggccctgttgctacgtttgattcgtatgttctagctgcagtttgtgccttatcttgtgagcttcagctgttcccttgcatttctaagaatggatcacattcaaatttaaaggattccatgaagattatcatacctggaaaaaacaatgggatcaataatgagctacacagtagcatcagctcagcaattattcatactcgtagaattcttgccatcctcgaagcccttttctccttgaagccatcatcagttggtacctcatggagctatagctcaaatgaaatagttgcagcagctatggttgctgctcacgtttctgagttattccgtcggtccaggccatgccttaattcactctctgcactgatgagatgcaagcgggatgctgagatttctaccagggcatcatccctctaccatttgattgacttgcatggtaaaacagtgtcctccattgtgaacaaagctgagcctcttgaagctcacctgacccttacaccagtaaagaaggttaatcaacatcgctgtgaggaaaacaacaccaactcatcggatagtgccaagttggaaaacaagaatggttcaacacataagaaaaacggtttctcaaaaccacacttgaaatgtgcagaagaggttctgaacggcaatgttgcaagtacatctgggaaatccattgcaagcttacaggtggaagcatctgatttggcaaacttccttaccatggatcggaatggggggtaccgagatgtctgcagaaagcacatcagctcaccaaggatggaggaaggttgtggatgcactttgtgatgtcgtttcagcctcaccaaccaaggcctcagctgctatcgttctccaggccgagaaggacttgcagccttggattgctagagacgacgaacaaggccagaagatgtggagagtcaaccaacgtatagtgaagcttatagcggagctcatgaggaaccatgacagccctgaaaccttggtgatactcgctagtgcctctgaccttctacttcgtgctactgatggaatacttgttgacggtgaagcttgtactttgccacagcttgagcttctcgaagtaaccgctcgagcagtccatcttattattgaatggggagatccaggtttatcagttgctgatggcctttctaatctgctaaagtgccgtctttcaaccaccatccgctgcctttctcacccaagcgcgcacgtgcgcgcgctcagcatgtccgttctccgtgacatcctggaccacggatccgtgagccccaacaagatcagccgaggggaacagcagcggaatggcatccagagcccatcgtaccggtgcgtggccgcaggcatcctcaactggcaagcggacgtggagaggtgcatagagtgggaagcccacagccgccgcgccaccgggctgacgctcgccttcctcagtacggcggcgaaggagctcggctgccctctcccgtgctgacgaggccgctcccggatctgatctgacatcggcggccacttgacggccagtgctggcagcttgctgcgggaccggcgagtaggacgctaatctctcgaccaaggacgactcgccggtttgttcacgtgatatgtgatcaaactgatattagatggtgtttccaaagtatatatctactgaggggcttgctcccatgatgcgattttattccaatctgacgtcagatgctttacgagcatatttaactgcttgagctgtacgtagcttgtattacttgtaactttgtgtaatatggttattattgccgaagaagcagaacatagctttttcttttttttctctctcttttttagactgctgctagatccttatccatgcgttgcaacggagcgccatatagattgaagttccccttgcagggctccttgtacggtctataacatgaacataaagatggcatccagtagtcaatcagcaactatcgcaatgagattggtcttctgcacgtgacccagtttagctcccgtgcagggctctctgtaacctactgtgatgtcccatgacatgaacataaatgtggcaggtttatcattcaataaccaaacagcagc

SEQ ID NO: 29204 - DNA, 7696 bp, Zea Mays
aaatctttttctcgcctctcatcgctcctcgccatttctctctcctcccctccgtctcacccgccgcccgccgcgaaaatctgcgcacggacgcgccggctgcccgcggagagcctcgggtgggagcgcgccccgtcgaggctcttgagctaccaagcatgtcagaatcaaatgtgaagtggattgatgggcttcacttcacatcattgtactggcctccaccccaggatgtggagcagaagcaggcacaaatcttggcctacgtcgagtactttggccagtttacagctgacagtgagcagttccctgaagatgtagctcagctcattcaaagttcctatccatcaaaagaaagtcgcttgatagatgaagtattggcaacttttgttcttcatcatccggagcatggtcatgcagttgtacatccaattctttcacccatcatagatgggacactgtgctatgataggcatggtcctccattcagctccttcatctctttatttagccatacttctgagcaagagtactcagaacagtgggccttggcctgtggagaaattcttagagtcttaactcactacaataggccaattttcaaagttgaacgccaacacagtgaagctgaatgtagcaccacatctgatcaggcaacatctagtgattccacagataagaaatctaacaattctctaggaaatgaatctgaccggaagccattgaggccactaaccccgtggatcactgacatattgctagctgcacctttgggcattcgaagtgactattttcgatggtgagtaatattatttgtatttgacctttttctgattattgaattttcttagaacaacatattatgtatttttatatacaatgagtatatcatggactatatatacaaggaatgcaacaaacagctagttgataatacaggagtaagggaaggaattcattatccagctccagcccatactgcaacaatgtctgcaatttacttatttcaagcatgccccgctacgaatagtatgaggactcatagttcagaaataactggttactgtgatgtgatgcagatacatgaatggaattgtttgttctctgctgtgagatgcttttcagtttgttggaatatattaatttgctgctcaaagttaattgtttgctccaatcacttctagtaagtagtaacagaggctaagcacttcatttttatttcacatatatcaggtgtagcggtgtaatgggaaaatatgctgctggtggagagttgaagcctccaactactggttggtaaaatcaatccccaaatattttatcttgatattgtagatttgtagcattataaaaaactcgtccctccgtgcattatattaagaagaagatcttctcacacagtttgagaaaaccttcgaacccctgccccatccatacagcgcggtacgtagcccatgtgaaaatgatagcgaccaaggattaggccttagaccggtgctttggcgtgagactaacgaggtattttttttacccccaacctgaaatccgctcccatggggagttgaactcaggatctgagaggtgctactcacaccacctaaccaactcagctagtaactataaataaccattttcttatatgtagagattgttgggaaatgcacttgttttcattatgaggccctaaggcctgtatatatacatcggtacatgaggataaatatgcactaaacaccttattcaatggggatatataggtacatgaggataaatatgcactaaacaccttattcaatggggatatttaggaatacatatatatacatctaacaccccctctcaaactcaaggtggatcaatgacactaagtttggagagataaaactgatgctaagctctggtttgcgccctgatgaaggtaccagccaactgaagctctgaaggcacatggcgaagaacaatgacatcatcatcctgaatctgcgctcgtgtataagaagcatcaacaccaatatatgcttagtaagctcatgctttaccggatcacgaacaatactaatagcacatgtactatcagacaaatgagaagtcggtatagatacagaaactccaaaatcaacaagcaaccaccgtagccaagtcacctctgtcgtcgcaagagccatagcacacaactcagcctttgtactcgaacgagaaactgctaattgcttcttagtcttccaagcaatgagggaaccactaagaaaaacacaatggtcagaaagagattaaggatatgagaaataactagcccaagtcacatcaaaataggcatggagctgcaaggagctagaacgaggaaagaacagatgacaagagatagtcccacgaagataacatagaacacgaagaagatgattgtagtgaagttgagtgggggtagatacaaacatattcagaatatgcacatgatacgagatgtcatggtgagtaacaccaaggtaaaccagactaccttcaatgtgacgatatcgagtagaatccgaaagaggctcgccattagtggcacaaaggcaaacattgagctccatggggtcttaacagtgcaatgatcagagacacacaagggtgactagcaagtaactgggcacgaagaggctcaaacttttcacgcggatgggtaagcctagacattttacccgctacacgctacccgaacccggacccgaaatacccgaacccacagtacccaaaatctatttcggataaaaaatgctattacccaaaattagtttgggtagtttggctagcagcacctgatacccgaactacctgtaacaacgggtaatatgccctggcgtgcgaggtgtcggagtctgctatctgcgaaccgtggagacgtcagaagtggagtcatgcgacgacccatgagcccatcaagccaaggcgcattcgctttagcttcatctgatccgacgcccgacagtcgacgctgcataacctagcagtagccgccaactgtctccttgtcctcggtggcggtacccgcctgcgactacgccggacgccggttgcttcttcaccagtcaccacggccgtacactccgttgcacagtcgctgcccttactcccttcgtccctcgtccacggtccacctttgcccagttttgatgactggtagttctaaattcttttcctgtaaatcttcaagccgtatgtaatgtgctttggcctttgggcgtatggactctggaatgttgggtgtgtcactgtcagtgtgagcatgtaatgactgttgttcgatgagagcagatagcttctgtcaaatatgctttgggcttctgtcaaatatgcttttgatgagtgatgaccgctagttctattcaccggaaatatttcgggtaaatcgggtataccgaactcgaacccgaaattacgggtagagttttttcttggctgtaatggggtaacaatttctattacccgaatttatcaaagcccgaactacccgacccgaattaaacgggtaacccgaaggtcccgaacgccagtcttatggatgggtcaagaagtcatatgtgcgacgaaactcaagatcagtcttttgatccagacagaactcacatgtgctaggagacatctacagactaagagtatcaagctgacgctaggcgtcagacatctggctatagaattcatcaactgtagaatctccctgacgtaaagaccactcctgacgaatggcagcaagataagtagatgtccagcacacacaacaatcacgaagaagggtccacatctgatgagaactgtcactcaacaaactctgtagaaaagcgagcctccacactagcggtgagaatagaaccagctcaagcatcctcatccatccatatccgatatgcactctactgagcctcatatgatgccagctgatcatcataatctgcaagtagagtgcatcagctgctccctatactgctccattactcgtcttattaagaaaatggctttcatggttgaccttctagagttctaggcacgaaaccaaattggttaaaagagattctcattattcctctcaggcggcgctcgataactctcttccatatcttcatagtatggctcgtcaacttaatttctcggtaattagtacaactttgaatttattcttgtagatcggttccgatatactttaccactcagacatctttattttggacaaacccagccagaagtatctatattttgggatgtaggtagtagtcgataatgtttgttgtgtatggaaaaaaatcaacatatccctgggtgatttagcttacagccgaggatctggaaagcacccacaacttatgccttccacccccagatgggctgttgccaatggagctggagttatattaagtgtctgtgatgaggaggtagctcgttatgagacagcaaatttaacagcagcagctgttcctgcgcttctgctacctccgccaacgacacccttggacgagcatttggtggctggtctgccccctcttgaaccatatgctcgcttgttccatagatattatgcaattgctacaccaagtgctacacagaggttgctttttggtcttctcgaagcacctccatcatgggctccagatgcacttgatgcagcagtacagctagttgagctacttagagcagctgaagattatgcttctggcatgcggcttccaaagaattggatgcatctgcatttcttgcgtgccattggaactgcaatgtcaatgagagctggtattgctgctgatacagctgctgctctgcttttccgaatactttcccaaccaacgctgctttttccaccactgcgacatgctgaaggagttgacgtacatcatgaaccactaggtggctatgtatcatcatataagaaacagttggaagttcctgcatctgaggccactatcgatgccactgcacaaggcattgcttctttgttgtgtgctcatgggcctgatgttgagtggagaatatgtaccatctgggaagctgcctatggtttgctaccactaagttcatcagcagttgatttacctgaaattgttgtagctgccccgcttcagccacctacactgtcatggaacctgtacttaccattattaaaagtattcgagtatctacctcgtggaagtccatctgaagcatgcttgatgaggatatttgtggcaacagttgaagctatacttaggagagcttttccttctgaaacaccagagcaatccagaaagccaagaagtcaatctaagaatcttgctgttgctgaacttcacacaatgatacattcactctttgttgaatcctgtgcctcaatggaccttgcctcccggttgctatttgtggtgttaactgtttgtgtaagtcatcaagctttgccagggggcagcaaaagaccaactggtagcgataaccattccctcgaggaagccactgagcattcaagattaacaaatggaagaagcagatgtaagaagagacaaggccctgttgctacgtttgattcgtatgttctagctgcagtttgtgccttatcttgtgagcttcagctgttcccttgcatttctaagaatggatcacattcaaatttaaaggattccatgaagattatcatacctggaaaaaacaatgggatcaataatgagctacacagtagcatcagctcagcaattattcatactcgtagaattcttgccatcctcgaagcccttttctccttgaagccatcatcagttggtacctcatggagctatagctcaaatgaaatagttgcagcagctatggttgctgctcacgtttctgagttattccgtcggtccaggccatgccttaattcactctctgcactgatgagatgcaagcgggatgctgagatttctaccagggcatcatccctctaccatttgattgacttgcatggtaaaacagtgtcctccattgtgaacaaagctgagcctcttgaagctcacctgacccttacaccagtaaagaaggttaatcaacatcgctgtgaggaaaacaacaccaactcatcggatagtgccaagttggaaaacaagaatggttcaacacataagaaaaacggtttctcaaaaccacacttgaaatgtgcagaagaggttctgaacggcaatgttgcaagtacatctgggaaatccattgcaagcttacaggtggaagcatctgatttggcaaacttccttaccatggatcggaatggggggtaccgaggttcacaaactctcctaagatctgtattatcagagaaacaagagctgtgcttctctgttgtctcattgctctggcagaagctcatagcttctcccgaaatgcagatgtctgcagaaagcacatcagctcaccaaggatggaggaaggttgtggatgcactttgtgatgtcgtttcagcctcaccaaccaaggcctcagctgctatcgttctccaggccgagaaggacttgcagccttggattgctagagacgacgaacaaggccagaagatgtggagagtcaaccaacgtatagtgaagcttatagcggagctcatgaggaaccatgacagccctgaaaccttggtgatactcgctagtgcctctgaccttctacttcgtgctactgatggaatacttgttgacggtgaagcttgtactttgccacagcttgagcttctcgaagtaaccgctcgagcagtccatcttattattgaatggggagatccaggtttatcagttgctgatggcctttctaatctgctaaagtgccgtctttcaaccaccatccgctgcctttctcacccaagcgcgcacgtgcgcgcgctcagcatgtccgttctccgtgacatcctggaccacggatccgtgagccccaacaagatcagccgaggggaacagcagcggaatggcatccagagcccatcgtaccggtgcgtggccgcaggcatcctcaactggcaagcggacgtggagaggtgcatagagtgggaagcccacagccgccgcgccaccgggctgacgctcgccttcctcagtacggcggcgaaggagctcggctgccctctcccgtgctgacgaggccgctcccggatctgatctgacatcggcggccacttgacggccagtgctggcagcttgctgcgggaccggcgagtaggacgctaatctctcgaccaaggacgactcgccggtttgttcacgtgatatgtgatcaaactgatattagatggtgtttccaaagtatatatctactgaggggcttgctcccatgatgcgattttattccaatctgacgtcagatgctttacgagcatatttaactgcttgagctgtacgtagcttgtattacttgtaactttgtgtaatatggttattattgccgaagaagcagaacatagctttttcttttttttctctctcttttttagactgctgctagatccttatccatgcgttgcaacggagcgccatatagattgaagttccccttgcagggctccttgtacggtctataacatgaacataaagatggcatccagtagtcaatcagcaactatcgcaatgagattggtcttctgcacgtgacccagtttagctcccgtgcagggctctctgtaacctactgtgatgtcccatgacatgaacataaatgtggcaggtttatcattcaataaccaaacagcagc

SEQ ID NO: 29205 - DNA, 4874 bp, Zea Mays
ctttttctcgcctctcatcgctcctcgccatttctctctcctcccctccgtctcacccgccgcccgccgcgaaaatctgcgcacggacgcgccggctgcccgcggagagcctcgggtgggagcgcgccccgtcgaggctcttgagctaccaagcatgtcagaatcaaatgtgaagtggattgatgggcttcacttcacatcattgtactggcctccaccccaggatgtggagcagaagcaggcacaaatcttggcctacgtcgagtactttggccagtttacagctgacagtgagcagttccctgaagatgtagctcagctcattcaaagttcctatccatcaaaagaaagtcgcttgatagatgaagtattggcaacttttgttcttcatcatccggagcatggtcatgcagttgtacatccaattctttcacccatcatagatgggacactgtgctatgataggcatggtcctccattcagctccttcatctctttatttagccatacttctgagcaagagtactcagaacagtgggccttggcctgtggagaaattcttagagtcttaactcactacaataggccaattttcaaagttgaacgccaacacagtgaagctgaatgtagcaccacatctgatcaggcaacatctagtgattccacagataagaaatctaacaattctctaggaaatgaatctgaccggaagccattgaggccactaaccccgtggatcactgacatattgctagctgcacctttgggcattcgaagtgactattttcgatggtgtagcggtgtaatgggaaaatatgctgctggtggagagttgaagcctccaactactggttggtaaaatcaatccccaaatattttatcttgatattgtagatttgtagcattataaaaaactcgtccctccgtgcattatattaagaagaagatcttctcacacagtttgagaaaaccttcgaacccctgccccatccatacagcgcggtacgtagcccatgtgaaaatgatagcgaccaaggattaggccttagaccggtgctttggcgtgagactaacgaggtattttttttacccccaacctgaaatccgctcccatggggagttgaactcaggatctgagaggtgctactcacaccacctaaccaactcagctagtaactataaataaccattttcttatatgtagagattgttgggaaatgcacttgttttcattatgaggccctaaggcctgtatatatacatcggtacatgaggataaatatgcactaaacaccttattcaatggggatatataggtacatgaggataaatatgcactaaacaccttattcaatggggatatttaggaatacatatatatacatctaacaccccctctcaaactcaaggtggatcaatgacactaagtttggagagataaaactgatgctaagctctggtttgcgccctgatgaaggtaccagccaactgaagctctgaaggcacatggcgaagaacaatgacatcatcatcctgaatctgcgctcgtgtataagaagcatcaacaccaatatatgcttacttacagccgaggatctggaaagcacccacaacttatgccttccacccccagatgggctgttgccaatggagctggagttatattaagtgtctgtgatgaggaggtagctcgttatgagacagcaaatttaacagcagcagctgttcctgcgcttctgctacctccgccaacgacacccttggacgagcatttggtggctggtctgccccctcttgaaccatatgctcgcttgttccatagatattatgcaattgctacaccaagtgctacacagaggttgctttttggtcttctcgaagcacctccatcatgggctccagatgcacttgatgcagcagtacagctagttgagctacttagagcagctgaagattatgcttctggcatgcggcttccaaagaattggatgcatctgcatttcttgcgtgccattggaactgcaatgtcaatgagagctggtattgctgctgatacagctgctgctctgcttttccgaatactttcccaaccaacgctgctttttccaccactgcgacatgctgaaggagttgacgtacatcatgaaccactaggtggctatgtatcatcatataagaaacagttggaagttcctgcatctgaggccactatcgatgccactgcacaaggcattgcttctttgttgtgtgctcatgggcctgatgttgagtggagaatatgtaccatctgggaagctgcctatggtttgctaccactaagttcatcagcagttgatttacctgaaattgttgtagctgccccgcttcagccacctacactgtcatggaacctgtacttaccattattaaaagtattcgagtatctacctcgtggaagtccatctgaagcatgcttgatgaggatatttgtggcaacagttgaagctatacttaggagagcttttccttctgaaacaccagagcaatccagaaagccaagaagtcaatctaagaatcttgctgttgctgaacttcacacaatgatacattcactctttgttgaatcctgtgcctcaatggaccttgcctcccggttgctatttgtggtgttaactgtttgtgtaagtcatcaagctttgccagggggcagcaaaagaccaactggtagcgataaccattccctcgaggaagccactgagcattcaagattaacaaatggaagaagcagatgtaagaagagacaaggccctgttgctacgtttgattcgtatgttctagctgcagtttgtgccttatcttgtgagcttcagctgttcccttgcatttctaagaatggatcacattcaaatttaaaggattccatgaagattatcatacctggaaaaaacaatgggatcaataatgagctacacagtagcatcagctcagcaattattcatactcgtagaattcttgccatcctcgaagcccttttctccttgaagccatcatcagttggtacctcatggagctatagctcaaatgaaatagttgcagcagctatggttgctgctcacgtttctgagttattccgtcggtccaggccatgccttaattcactctctgcactgatgagatgcaagcgggatgctgagatttctaccagggcatcatccctctaccatttgattgacttgcatggtaaaacagtgtcctccattgtgaacaaagctgagcctcttgaagctcacctgacccttacaccagtaaagaaggttaatcaacatcgctgtgaggaaaacaacaccaactcatcggatagtgccaagttggaaaacaagaatggttcaacacataagaaaaacggtttctcaaaaccacacttgaaatgtgcagaagaggttctgaacggcaatgttgcaagtacatctgggaaatccattgcaagcttacaggtggaagcatctgatttggcaaacttccttaccatggatcggaatggggggtaccgagatgtctgcagaaagcacatcagctcaccaaggatggaggaaggttgtggatgcactttgtgatgtcgtttcagcctcaccaaccaaggcctcagctgctatcgttctccaggccgagaaggacttgcagccttggattgctagagacgacgaacaaggccagaagatgtggagagtcaaccaacgtatagtgaagcttatagcggagctcatgaggaaccatgacagccctgaaaccttggtgatactcgctagtgcctctgaccttctacttcgtgctactgatggaatacttgttgacggtgaagcttgtactttgccacagcttgagcttctcgaagtaaccgctcgagcagtccatcttattattgaatggggagatccaggtttatcagttgctgatggcctttctaatctgctaaagtgccgtctttcaaccaccatccgctgcctttctcacccaagcgcgcacgtgcgcgcgctcagcatgtccgttctccgtgacatcctggaccacggatccgtgagccccaacaagatcagccgaggggaacagcagcggaatggcatccagagcccatcgtaccggtgcgtggccgcaggcatcctcaactggcaagcggacgtggagaggtgcatagagtgggaagcccacagccgccgcgccaccgggctgacgctcgccttcctcagtacggcggcgaaggagctcggctgccctctcccgtgctgacgaggccgctcccggatctgatctgacatcggcggccacttgacggccagtgctggcagcttgctgcgggaccggcgagtaggacgctaatctctcgaccaaggacgactcgccggtttgttcacgtgatatgtgatcaaactgatattagatggtgtttccaaagtatatatctactgaggggcttgctcccatgatgcgattttattccaatctgacgtcagatgctttacgagcatatttaactgcttgagctgtacgtagcttgtattacttgtaactttgtgtaatatggttattattgccgaagaagcagaacatagctttttcttttttttctctctcttttttagactgctgctagatccttatccatgcgttgcaacggagcgccatatagattgaagttccccttgcagggctccttgtacggtctataacatgaacataaagatggcatccagtagtcaatcagcaactatcgcaatgagattggtcttctgcacgtgacccagtttagctcccgtgcagggctctctgtaacctactgtgatgtcccatgacatgaacataaatgtggcaggtttatcattcaataaccaaacagcagc

SEQ ID NO: 29206 - DNA, 7333 bp, Zea Mays
ctttttctcgcctctcatcgctcctcgccatttctctctcctcccctccgtctcacccgccgcccgccgcgaaaatctgcgcacggacgcgccggctgcccgcggagagcctcgggtgggagcgcgccccgtcgaggtgctcttattggttatgggatcaatgtgcaatttttttctttccgtttgagagcctttctagtttcttgggcaggctcttgagctaccaagcatgtcagaatcaaatgtgaagtggattgatgggcttcacttcacatcattgtactggcctccaccccaggatgtggagcagaagcaggcacaaatcttggcctacgtcgagtactttggccagtttacagctgacagtgagcagttccctgaagatgtagctcagctcattcaaagttcctatccatcaaaagaaagtcgcttgatagatgaagtattggcaacttttgttcttcatcatccggagcatggtcatgcagttgtacatccaattctttcacccatcatagatgggacactgtgctatgataggcatggtcctccattcagctccttcatctctttatttagccatacttctgagcaagagtactcagaacagtgggccttggcctgtggagaaattcttagagtcttaactcactacaataggccaattttcaaagttgaacgccaacacagtgaagctgaatgtagcaccacatctgatcaggcaacatctagtgattccacagataagaaatctaacaattctctaggaaatgaatctgaccggaagccattgaggccactaaccccgtggatcactgacatattgctagctgcacctttgggcattcgaagtgactattttcgatggtgtagcggtgtaatgggaaaatatgctgctggtggagagttgaagcctccaactactggttggtaaaatcaatccccaaatattttatcttgatattgtagatttgtagcattataaaaaactcgtccctccgtgcattatattaagaagaagatcttctcacacagtttgagaaaaccttcgaacccctgccccatccatacagcgcggtacgtagcccatgtgaaaatgatagcgaccaaggattaggccttagaccggtgctttggcgtgagactaacgaggtattttttttacccccaacctgaaatccgctcccatggggagttgaactcaggatctgagaggtgctactcacaccacctaaccaactcagctagtaactataaataaccattttcttatatgtagagattgttgggaaatgcacttgttttcattatgaggccctaaggcctgtatatatacatcggtacatgaggataaatatgcactaaacaccttattcaatggggatatataggtacatgaggataaatatgcactaaacaccttattcaatggggatatttaggaatacatatatatacatctaacaccccctctcaaactcaaggtggatcaatgacactaagtttggagagataaaactgatgctaagctctggtttgcgccctgatgaaggtaccagccaactgaagctctgaaggcacatggcgaagaacaatgacatcatcatcctgaatctgcgctcgtgtataagaagcatcaacaccaatatatgcttagtaagctcatgctttaccggatcacgaacaatactaatagcacatgtactatcagacaaatgagaagtcggtatagatacagaaactccaaaatcaacaagcaaccaccgtagccaagtcacctctgtcgtcgcaagagccatagcacacaactcagcctttgtactcgaacgagaaactgctaattgcttcttagtcttccaagcaatgagggaaccactaagaaaaacacaatggtcagaaagagattaaggatatgagaaataactagcccaagtcacatcaaaataggcatggagctgcaaggagctagaacgaggaaagaacagatgacaagagatagtcccacgaagataacatagaacacgaagaagatgattgtagtgaagttgagtgggggtagatacaaacatattcagaatatgcacatgatacgagatgtcatggtgagtaacaccaaggtaaaccagactaccttcaatgtgacgatatcgagtagaatccgaaagaggctcgccattagtggcacaaaggcaaacattgagctccatggggtcttaacagtgcaatgatcagagacacacaagggtgactagcaagtaactgggcacgaagaggctcaaacttttcacgcggatgggtaagcctagacattttacccgctacacgctacccgaacccggacccgaaatacccgaacccacagtacccaaaatctatttcggataaaaaatgctattacccaaaattagtttgggtagtttggctagcagcacctgatacccgaactacctgtaacaacgggtaatatgccctggcgtgcgaggtgtcggagtctgctatctgcgaaccgtggagacgtcagaagtggagtcatgcgacgacccatgagcccatcaagccaaggcgcattcgctttagcttcatctgatccgacgcccgacagtcgacgctgcataacctagcagtagccgccaactgtctccttgtcctcggtggcggtacccgcctgcgactacgccggacgccggttgcttcttcaccagtcaccacggccgtacactccgttgcacagtcgctgcccttactcccttcgtccctcgtccacggtccacctttgcccagttttgatgactggtagttctaaattcttttcctgtaaatcttcaagccgtatgtaatgtgctttggcctttgggcgtatggactctggaatgttgggtgtgtcactgtcagtgtgagcatgtaatgactgttgttcgatgagagcagatagcttctgtcaaatatgctttgggcttctgtcaaatatgcttttgatgagtgatgaccgctagttctattcaccggaaatatttcgggtaaatcgggtataccgaactcgaacccgaaattacgggtagagttttttcttggctgtaatggggtaacaatttctattacccgaatttatcaaagcccgaactacccgacccgaattaaacgggtaacccgaaggtcccgaacgccagtcttatggatgggtcaagaagtcatatgtgcgacgaaactcaagatcagtcttttgatccagacagaactcacatgtgctaggagacatctacagactaagagtatcaagctgacgctaggcgtcagacatctggctatagaattcatcaactgtagaatctccctgacgtaaagaccactcctgacgaatggcagcaagataagtagatgtccagcacacacaacaatcacgaagaagggtccacatctgatgagaactgtcactcaacaaactctgtagaaaagcgagcctccacactagcggtgagaatagaaccagctcaagcatcctcatccatccatatccgatatgcactctactgagcctcatatgatgccagctgatcatcataatctgcaagtagagtgcatcagctgctccctatactgctccattactcgtcttattaagaaaatggctttcatggttgaccttctagagttctaggcacgaaaccaaattggttaaaagagattctcattattcctctcaggcggcgctcgataactctcttccatatcttcatagtatggctcgtcaacttaatttctcggtaattagtacaactttgaatttattcttgtagatcggttccgatatactttaccactcagacatctttattttggacaaacccagccagaagtatctatattttgggatgtaggtagtagtcgataatgtttgttgtgtatggaaaaaaatcaacatatccctgggtgatttagcttacagccgaggatctggaaagcacccacaacttatgccttccacccccagatgggctgttgccaatggagctggagttatattaagtgtctgtgatgaggaggtagctcgttatgagacagcaaatttaacagcagcagctgttcctgcgcttctgctacctccgccaacgacacccttggacgagcatttggtggctggtctgccccctcttgaaccatatgctcgcttgttccatagatattatgcaattgctacaccaagtgctacacagaggttgctttttggtcttctcgaagcacctccatcatgggctccagatgcacttgatgcagcagtacagctagttgagctacttagagcagctgaagattatgcttctggcatgcggcttccaaagaattggatgcatctgcatttcttgcgtgccattggaactgcaatgtcaatgagagctggtattgctgctgatacagctgctgctctgcttttccgaatactttcccaaccaacgctgctttttccaccactgcgacatgctgaaggagttgacgtacatcatgaaccactaggtggctatgtatcatcatataagaaacagttggaagttcctgcatctgaggccactatcgatgccactgcacaaggcattgcttctttgttgtgtgctcatgggcctgatgttgagtggagaatatgtaccatctgggaagctgcctatggtttgctaccactaagttcatcagcagttgatttacctgaaattgttgtagctgccccgcttcagccacctacactgtcatggaacctgtacttaccattattaaaagtattcgagtatctacctcgtggaagtccatctgaagcatgcttgatgaggatatttgtggcaacagttgaagctatacttaggagagcttttccttctgaaacaccagagcaatccagaaagccaagaagtcaatctaagaatcttgctgttgctgaacttcacacaatgatacattcactctttgttgaatcctgtgcctcaatggaccttgcctcccggttgctatttgtggtgttaactgtttgtgtaagtcatcaagctttgccagggggcagcaaaagaccaactggtagcgataaccattccctcgaggaagccactgagcattcaagattaacaaatggaagaagcagatgtaagaagagacaaggccctgttgctacgtttgattcgtatgttctagctgcagtttgtgccttatcttgtgagcttcagctgttcccttgcatttctaagaatggatcacattcaaatttaaaggattccatgaagattatcatacctggaaaaaacaatgggatcaataatgagctacacagtagcatcagctcagcaattattcatactcgtagaattcttgccatcctcgaagcccttttctccttgaagccatcatcagttggtacctcatggagctatagctcaaatgaaatagttgcagcagctatggttgctgctcacgtttctgagttattccgtcggtccaggccatgccttaattcactctctgcactgatgagatgcaagcgggatgctgagatttctaccagggcatcatccctctaccatttgattgacttgcatggtaaaacagtgtcctccattgtgaacaaagctgagcctcttgaagctcacctgacccttacaccagtaaagaaggttaatcaacatcgctgtgaggaaaacaacaccaactcatcggatagtgccaagttggaaaacaagaatggttcaacacataagaaaaacggtttctcaaaaccacacttgaaatgtgcagaagaggttctgaacggcaatgttgcaagtacatctgggaaatccattgcaagcttacaggtggaagcatctgatttggcaaacttccttaccatggatcggaatggggggtaccgaggttcacaaactctcctaagatctgtattatcagagaaacaagagctgtgcttctctgttgtctcattgctctggcagaagctcatagcttctcccgaaatgcagatgtctgcagaaagcacatcagctcaccaaggatggaggaaggttgtggatgcactttgtgatgtcgtttcagcctcaccaaccaaggcctcagctgctatcgttctccaggccgagaaggacttgcagccttggattgctagagacgacgaacaaggccagaagatgtggagagtcaaccaacgtatagtgaagcttatagcggagctcatgaggaaccatgacagccctgaaaccttggtgatactcgctagtgcctctgaccttctacttcgtgctactgatggaatacttgttgacggtgaagcttgtactttgccacagcttgagcttctcgaagtaaccgctcgagcagtccatcttattattgaatggggagatccaggtttatcagttgctgatggcctttctaatctgctaaagtgccgtctttcaaccaccatccgctgcctttctcacccaagcgcgcacgtgcgcgcgctcagcatgtccgttctccgtgacatcctggaccacggatccgtgagccccaacaagatcagccgaggggaacagcagcggaatggcatccagagcccatcgtaccggtgcgtggccgcaggcatcctcaactggcaagcggacgtggagaggtgcatagagtgggaagcccacagccgccgcgccaccgggctgacgctcgccttcctcagtacggcggcgaaggagctcggctgccctctcccgtgctgacgaggccgctcccggatctgatctgacatcggcggccacttgacggccagtgctggcagcttgctgcgggaccggcgagtaggacgctaatctctcgaccaaggacgactcgccggtttgttcacgtgatatgtgatcaaactgatattagatggtgtttccaaagtatatatctactgaggggcttgctcccatgatgcgattttattccaatctgacgtcagatgctttacgagcatatttaactgcttgagctgtacgtagcttgtattacttgtaactttgtgtaatatggttattattgccgaagaagcagaacatagctttttcttttttttctctctcttttttagactgctgctagatccttatccatgcgttgcaacggagcgccatatagattgaagttccccttgcagggctccttgtacggtctataacatgaacataaagatggcatccagtagtcaatcagcaactatcgcaatgagattggtcttctgcacgtgacccagtttagctcccgtgcagggctctctgtaacctactgtgatgtcccatgacatgaacataaatgtggcaggtttatcattcaataaccaaacagcagc

SEQ ID NO: 29207 - DNA, 7278 bp, Zea Mays
ctttttctcgcctctcatcgctcctcgccatttctctctcctcccctccgtctcacccgccgcccgccgcgaaaatctgcgcacggacgcgccggctgcccgcggagagcctcgggtgggagcgcgccccgtcgaggctcttgagctaccaagcatgtcagaatcaaatgtgaagtggattgatgggcttcacttcacatcattgtactggcctccaccccaggatgtggagcagaagcaggcacaaatcttggcctacgtcgagtactttggccagtttacagctgacagtgagcagttccctgaagatgtagctcagctcattcaaagttcctatccatcaaaagaaagtcgcttgatagatgaagtattggcaacttttgttcttcatcatccggagcatggtcatgcagttgtacatccaattctttcacccatcatagatgggacactgtgctatgataggcatggtcctccattcagctccttcatctctttatttagccatacttctgagcaagagtactcagaacagtgggccttggcctgtggagaaattcttagagtcttaactcactacaataggccaattttcaaagttgaacgccaacacagtgaagctgaatgtagcaccacatctgatcaggcaacatctagtgattccacagataagaaatctaacaattctctaggaaatgaatctgaccggaagccattgaggccactaaccccgtggatcactgacatattgctagctgcacctttgggcattcgaagtgactattttcgatggtgtagcggtgtaatgggaaaatatgctgctggtggagagttgaagcctccaactactggttggtaaaatcaatccccaaatattttatcttgatattgtagatttgtagcattataaaaaactcgtccctccgtgcattatattaagaagaagatcttctcacacagtttgagaaaaccttcgaacccctgccccatccatacagcgcggtacgtagcccatgtgaaaatgatagcgaccaaggattaggccttagaccggtgctttggcgtgagactaacgaggtattttttttacccccaacctgaaatccgctcccatggggagttgaactcaggatctgagaggtgctactcacaccacctaaccaactcagctagtaactataaataaccattttcttatatgtagagattgttgggaaatgcacttgttttcattatgaggccctaaggcctgtatatatacatcggtacatgaggataaatatgcactaaacaccttattcaatggggatatataggtacatgaggataaatatgcactaaacaccttattcaatggggatatttaggaatacatatatatacatctaacaccccctctcaaactcaaggtggatcaatgacactaagtttggagagataaaactgatgctaagctctggtttgcgccctgatgaaggtaccagccaactgaagctctgaaggcacatggcgaagaacaatgacatcatcatcctgaatctgcgctcgtgtataagaagcatcaacaccaatatatgcttagtaagctcatgctttaccggatcacgaacaatactaatagcacatgtactatcagacaaatgagaagtcggtatagatacagaaactccaaaatcaacaagcaaccaccgtagccaagtcacctctgtcgtcgcaagagccatagcacacaactcagcctttgtactcgaacgagaaactgctaattgcttcttagtcttccaagcaatgagggaaccactaagaaaaacacaatggtcagaaagagattaaggatatgagaaataactagcccaagtcacatcaaaataggcatggagctgcaaggagctagaacgaggaaagaacagatgacaagagatagtcccacgaagataacatagaacacgaagaagatgattgtagtgaagttgagtgggggtagatacaaacatattcagaatatgcacatgatacgagatgtcatggtgagtaacaccaaggtaaaccagactaccttcaatgtgacgatatcgagtagaatccgaaagaggctcgccattagtggcacaaaggcaaacattgagctccatggggtcttaacagtgcaatgatcagagacacacaagggtgactagcaagtaactgggcacgaagaggctcaaacttttcacgcggatgggtaagcctagacattttacccgctacacgctacccgaacccggacccgaaatacccgaacccacagtacccaaaatctatttcggataaaaaatgctattacccaaaattagtttgggtagtttggctagcagcacctgatacccgaactacctgtaacaacgggtaatatgccctggcgtgcgaggtgtcggagtctgctatctgcgaaccgtggagacgtcagaagtggagtcatgcgacgacccatgagcccatcaagccaaggcgcattcgctttagcttcatctgatccgacgcccgacagtcgacgctgcataacctagcagtagccgccaactgtctccttgtcctcggtggcggtacccgcctgcgactacgccggacgccggttgcttcttcaccagtcaccacggccgtacactccgttgcacagtcgctgcccttactcccttcgtccctcgtccacggtccacctttgcccagttttgatgactggtagttctaaattcttttcctgtaaatcttcaagccgtatgtaatgtgctttggcctttgggcgtatggactctggaatgttgggtgtgtcactgtcagtgtgagcatgtaatgactgttgttcgatgagagcagatagcttctgtcaaatatgctttgggcttctgtcaaatatgcttttgatgagtgatgaccgctagttctattcaccggaaatatttcgggtaaatcgggtataccgaactcgaacccgaaattacgggtagagttttttcttggctgtaatggggtaacaatttctattacccgaatttatcaaagcccgaactacccgacccgaattaaacgggtaacccgaaggtcccgaacgccagtcttatggatgggtcaagaagtcatatgtgcgacgaaactcaagatcagtcttttgatccagacagaactcacatgtgctaggagacatctacagactaagagtatcaagctgacgctaggcgtcagacatctggctatagaattcatcaactgtagaatctccctgacgtaaagaccactcctgacgaatggcagcaagataagtagatgtccagcacacacaacaatcacgaagaagggtccacatctgatgagaactgtcactcaacaaactctgtagaaaagcgagcctccacactagcggtgagaatagaaccagctcaagcatcctcatccatccatatccgatatgcactctactgagcctcatatgatgccagctgatcatcataatctgcaagtagagtgcatcagctgctccctatactgctccattactcgtcttattaagaaaatggctttcatggttgaccttctagagttctaggcacgaaaccaaattggttaaaagagattctcattattcctctcaggcggcgctcgataactctcttccatatcttcatagtatggctcgtcaacttaatttctcggtaattagtacaactttgaatttattcttgtagatcggttccgatatactttaccactcagacatctttattttggacaaacccagccagaagtatctatattttgggatgtaggtagtagtcgataatgtttgttgtgtatggaaaaaaatcaacatatccctgggtgatttagcttacagccgaggatctggaaagcacccacaacttatgccttccacccccagatgggctgttgccaatggagctggagttatattaagtgtctgtgatgaggaggtagctcgttatgagacagcaaatttaacagcagcagctgttcctgcgcttctgctacctccgccaacgacacccttggacgagcatttggtggctggtctgccccctcttgaaccatatgctcgcttgttccatagatattatgcaattgctacaccaagtgctacacagaggttgctttttggtcttctcgaagcacctccatcatgggctccagatgcacttgatgcagcagtacagctagttgagctacttagagcagctgaagattatgcttctggcatgcggcttccaaagaattggatgcatctgcatttcttgcgtgccattggaactgcaatgtcaatgagagctggtattgctgctgatacagctgctgctctgcttttccgaatactttcccaaccaacgctgctttttccaccactgcgacatgctgaaggagttgacgtacatcatgaaccactaggtggctatgtatcatcatataagaaacagttggaagttcctgcatctgaggccactatcgatgccactgcacaaggcattgcttctttgttgtgtgctcatgggcctgatgttgagtggagaatatgtaccatctgggaagctgcctatggtttgctaccactaagttcatcagcagttgatttacctgaaattgttgtagctgccccgcttcagccacctacactgtcatggaacctgtacttaccattattaaaagtattcgagtatctacctcgtggaagtccatctgaagcatgcttgatgaggatatttgtggcaacagttgaagctatacttaggagagcttttccttctgaaacaccagagcaatccagaaagccaagaagtcaatctaagaatcttgctgttgctgaacttcacacaatgatacattcactctttgttgaatcctgtgcctcaatggaccttgcctcccggttgctatttgtggtgttaactgtttgtgtaagtcatcaagctttgccagggggcagcaaaagaccaactggtagcgataaccattccctcgaggaagccactgagcattcaagattaacaaatggaagaagcagatgtaagaagagacaaggccctgttgctacgtttgattcgtatgttctagctgcagtttgtgccttatcttgtgagcttcagctgttcccttgcatttctaagaatggatcacattcaaatttaaaggattccatgaagattatcatacctggaaaaaacaatgggatcaataatgagctacacagtagcatcagctcagcaattattcatactcgtagaattcttgccatcctcgaagcccttttctccttgaagccatcatcagttggtacctcatggagctatagctcaaatgaaatagttgcagcagctatggttgctgctcacgtttctgagttattccgtcggtccaggccatgccttaattcactctctgcactgatgagatgcaagcgggatgctgagatttctaccagggcatcatccctctaccatttgattgacttgcatggtaaaacagtgtcctccattgtgaacaaagctgagcctcttgaagctcacctgacccttacaccagtaaagaaggttaatcaacatcgctgtgaggaaaacaacaccaactcatcggatagtgccaagttggaaaacaagaatggttcaacacataagaaaaacggtttctcaaaaccacacttgaaatgtgcagaagaggttctgaacggcaatgttgcaagtacatctgggaaatccattgcaagcttacaggtggaagcatctgatttggcaaacttccttaccatggatcggaatggggggtaccgaggttcacaaactctcctaagatctgtattatcagagaaacaagagctgtgcttctctgttgtctcattgctctggcagaagctcatagcttctcccgaaatgcagatgtctgcagaaagcacatcagctcaccaaggatggaggaaggttgtggatgcactttgtgatgtcgtttcagcctcaccaaccaaggcctcagctgctatcgttctccaggtcaagatattgctatattcgccgagaaggacttgcagccttggattgctagagacgacgaacaaggccagaagatgtggagagtcaaccaacgtatagtgaagcttatagcggagctcatgaggaaccatgacagccctgaaaccttggtgatactcgctagtgcctctgaccttctacttcgtgctactgatggaatacttgttgacggtgaagcttgtactttgccacagcttgagcttctcgaagtaaccgctcgagcagtccatcttattattgaatggggagatccaggtttatcagttgctgatggcctttctaatctgctaaagtgccgtctttcaaccaccatccgctgcctttctcacccaagcgcgcacgtgcgcgcgctcagcatgtccgttctccgtgacatcctggaccacggatccgtgagccccaacaagatcagccgaggggaacagcagcggaatggcatccagagcccatcgtaccggtgcgtggccgcaggcatcctcaactggcaagcggacgtggagaggtgcatagagtgggaagcccacagccgccgcgccaccgggctgacgctcgccttcctcagtacggcggcgaaggagctcggctgccctctcccgtgctgacgaggccgctcccggatctgatctgacatcggcggccacttgacggccagtgctggcagcttgctgcgggaccggcgagtaggacgctaatctctcgaccaaggacgactcgccggtttgttcacgtgatatgtgatcaaactgatattagatggtgtttccaaagtatatatctactgaggggcttgctcccatgatgcgattttattccaatctgacgtcagatgctttacgagcatatttaactgcttgagctgtacgtagcttgtattacttgtaactttgtgtaatatggttattattgccgaagaagcagaacatagctttttcttttttttctctctcttttttagactgctgctagatccttatccatgcgttgcaacggagcgccatatagattgaagttccccttgcagggctccttgtacggtctataacatgaacataaagatggcatccagtagtcaatcagcaactatcgcaatgagattggtcttctgcacgtgacccagtttagctcccgtgcagggctctctgtaacctactgtgatgtcccatgacatgaacataaatgtggcaggtttatcattcaataaccaaacagcagc

SEQ ID NO: 29208 - DNA, 4386 bp, Zea Mays
ttctcgcctctcatcgctcctcgccatttctctctcctcccctccgtctcacccgccgcccgccgcgaaaatctgcgcacggacgcgccggctgcccgcggagagcctcgggtgggagcgcgccccgtcgaggctcttgagctaccaagcatgtcagaatcaaatgtgaagtggattgatgggcttcacttcacatcattgtactggcctccaccccaggatgtggagcagaagcaggcacaaatcttggcctacgtcgagtactttggccagtttacagctgacagtgagcagttccctgaagatgtagctcagctcattcaaagttcctatccatcaaaagaaagtcgcttgatagatgaagtattggcaacttttgttcttcatcatccggagcatggtcatgcagttgtacatccaattctttcacccatcatagatgggacactgtgctatgataggcatggtcctccattcagctccttcatctctttatttagccatacttctgagcaagagtactcagaacagtgggccttggcctgtggagaaattcttagagtcttaactcactacaataggccaattttcaaagttgaacgccaacacagtgaagctgaatgtagcaccacatctgatcaggcaacatctagtgattccacagataagaaatctaacaattctctaggaaatgaatctgaccggaagccattgaggccactaaccccgtggatcactgacatattgctagctgcacctttgggcattcgaagtgactattttcgatggtgtagcggtgtaatgggaaaatatgctgctggtggagagttgaagcctccaactactgatcggttccgatatactttaccactcagacatctttattttggacaaacccagccagaagtatctatattttgggatgtaggtagtagtcgataatgtttgttgtgtatggaaaaaaatcaacatatccctgggtgatttagcttacagccgaggatctggaaagcacccacaacttatgccttccacccccagatgggctgttgccaatggagctggagttatattaagtgtctgtgatgaggaggtagctcgttatgagacagcaaatttaacagcagcagctgttcctgcgcttctgctacctccgccaacgacacccttggacgagcatttggtggctggtctgccccctcttgaaccatatgctcgcttgttccatagatattatgcaattgctacaccaagtgctacacagaggttgctttttggtcttctcgaagcacctccatcatgggctccagatgcacttgatgcagcagtacagctagttgagctacttagagcagctgaagattatgcttctggcatgcggcttccaaagaattggatgcatctgcatttcttgcgtgccattggaactgcaatgtcaatgagagctggtattgctgctgatacagctgctgctctgcttttccgaatactttcccaaccaacgctgctttttccaccactgcgacatgctgaaggagttgacgtacatcatgaaccactaggtggctatgtatcatcatataagaaacagttggaagttcctgcatctgaggccactatcgatgccactgcacaaggcattgcttctttgttgtgtgctcatgggcctgatgttgagtggagaatatgtaccatctgggaagctgcctatggtttgctaccactaagttcatcagcagttgatttacctgaaattgttgtagctgccccgcttcagccacctacactgtcatggaacctgtacttaccattattaaaagtattcgagtatctacctcgtggaagtccatctgaagcatgcttgatgaggatatttgtggcaacagttgaagctatacttaggagagcttttccttctgaaacaccagagcaatccagaaagccaagaagtcaatctaagaatcttgctgttgctgaacttcacacaatgatacattcactctttgttgaatcctgtgcctcaatggaccttgcctcccggttgctatttgtggtgttaactgtttgtgtaagtcatcaagctttgccagggggcagcaaaagaccaactggtagcgataaccattccctcgaggaagccactgagcattcaagattaacaaatggaagaagcagatgtaagaagagacaaggccctgttgctacgtttgattcgtatgttctagctgcagtttgtgccttatcttgtgagcttcagctgttcccttgcatttctaagaatggatcacattcaaatttaaaggattccatgaagattatcatacctggaaaaaacaatgggatcaataatgagctacacagtagcatcagctcagcaattattcatactcgtagaattcttgccatcctcgaagcccttttctccttgaagccatcatcagttggtacctcatggagctatagctcaaatgaaatagttgcagcagctatggttgctgctcacgtttctgagttattccgtcggtccaggccatgccttaattcactctctgcactgatgagatgcaagcgggatgctgagatttctaccagggcatcatccctctaccatttgattgacttgcatggtaaaacagtgtcctccattgtgaacaaagctgagcctcttgaagctcacctgacccttacaccagtaaagaaggttaatcaacatcgctgtgaggaaaacaacaccaactcatcggatagtgccaagttggaaaacaagaatggttcaacacataagaaaaacggtttctcaaaaccacacttgaaatgtgcagaagaggttctgaacggcaatgttgcaagtacatctgggaaatccattgcaagcttacaggtggaagcatctgatttggcaaacttccttaccatggatcggaatggggggtaccgaggttcacaaactctcctaagatctgtattatcagagaaacaagagctgtgcttctctgttgtctcattgctctggcagaagctcatagcttctcccgaaatgcagatgtctgcagaaagcacatcagctcaccaaggatggaggaaggttgtggatgcactttgtgatgtcgtttcagcctcaccaaccaaggcctcagctgctatcgttctccaggccgagaaggacttgcagccttggattgctagagacgacgaacaaggccagaagatgtggagagtcaaccaacgtatagtgaagcttatagcggagctcatgaggaaccatgacagccctgaaaccttggtgatactcgctagtgcctctgaccttctacttcgtgctactgatggaatacttgttgacggtgaagcttgtactttgccacagcttgagcttctcgaagtaaccgctcgagcagtccatcttattattgaatggggagatccaggtttatcagttgctgatggcctttctaatctgctaaagtgccgtctttcaaccaccatccgctgcctttctcacccaagcgcgcacgtgcgcgcgctcagcatgtccgttctccgtgacatcctggaccacggatccgtgagccccaacaagatcagccgaggggaacagcagcggaatggcatccagagcccatcgtaccggtgcgtggccgcaggcatcctcaactggcaagcggacgtggagaggtgcatagagtgggaagcccacagccgccgcgccaccgggctgacgctcgccttcctcagtacggcggcgaaggagctcggctgccctctcccgtgctgacgaggccgctcccggatctgatctgacatcggcggccacttgacggccagtgctggcagcttgctgcgggaccggcgagtaggacgctaatctctcgaccaaggacgactcgccggtttgttcacgtgatatgtgatcaaactgatattagatggtgtttccaaagtatatatctactgaggggcttgctcccatgatgcgattttattccaatctgacgtcagatgctttacgagcatatttaactgcttgagctgtacgtagcttgtattacttgtaactttgtgtaatatggttattattgccgaagaagcagaacatagctttttcttttttttctctctcttttttagactgctgctagatccttatccatgcgttgcaacggagcgccatatagattgaagttccccttgcagggctccttgtacggtctataacatgaacataaagatggcatccagtagtcaatcagcaactatcgcaatgagattggtcttctgcacgtgacccagtttagctcccgtgcagggctctctgtaacctactgtgatgtcccatgacatgaacataaatgtggcaggtttatcattcaataaccaaacagcagc

SEQ ID NO: 29209 - DNA, 4317 bp, Zea Mays
ctcgcctctcatcgctcctcgccatttctctctcctcccctccgtctcacccgccgcccgccgcgaaaatctgcgcacggacgcgccggctgcccgcggagagcctcgggtgggagcgcgccccgtcgaggtgctcttattggttatgggatcaatgtgcaatttttttctttccgtttgagagcctttctagtttcttgggcaggctcttgagctaccaagcatgtcagaatcaaatgtgaagtggattgatgggcttcacttcacatcattgtactggcctccaccccaggatgtggagcagaagcaggcacaaatcttggcctacgtcgagtactttggccagtttacagctgacagtgagcagttccctgaagatgtagctcagctcattcaaagttcctatccatcaaaagaaagtcgcttgatagatgaagtattggcaacttttgttcttcatcatccggagcatggtcatgcagttgtacatccaattctttcacccatcatagatgggacactgtgctatgataggcatggtcctccattcagctccttcatctctttatttagccatacttctgagcaagagtactcagaacagtgggccttggcctgtggagaaattcttagagtcttaactcactacaataggccaattttcaaagttgaacgccaacacagtgaagctgaatgtagcaccacatctgatcaggcaacatctagtgattccacagataagaaatctaacaattctctaggaaatgaatctgaccggaagccattgaggccactaaccccgtggatcactgacatattgctagctgcacctttgggcattcgaagtgactattttcgatggtgtagcggtgtaatgggaaaatatgctgctggtggagagttgaagcctccaactactgcttacagccgaggatctggaaagcacccacaacttatgccttccacccccagatgggctgttgccaatggagctggagttatattaagtgtctgtgatgaggaggtagctcgttatgagacagcaaatttaacagcagcagctgttcctgcgcttctgctacctccgccaacgacacccttggacgagcatttggtggctggtctgccccctcttgaaccatatgctcgcttgttccatagatattatgcaattgctacaccaagtgctacacagaggttgctttttggtcttctcgaagcacctccatcatgggctccagatgcacttgatgcagcagtacagctagttgagctacttagagcagctgaagattatgcttctggcatgcggcttccaaagaattggatgcatctgcatttcttgcgtgccattggaactgcaatgtcaatgagagctggtattgctgctgatacagctgctgctctgcttttccgaatactttcccaaccaacgctgctttttccaccactgcgacatgctgaaggagttgacgtacatcatgaaccactaggtggctatgtatcatcatataagaaacagttggaagttcctgcatctgaggccactatcgatgccactgcacaaggcattgcttctttgttgtgtgctcatgggcctgatgttgagtggagaatatgtaccatctgggaagctgcctatggtttgctaccactaagttcatcagcagttgatttacctgaaattgttgtagctgccccgcttcagccacctacactgtcatggaacctgtacttaccattattaaaagtattcgagtatctacctcgtggaagtccatctgaagcatgcttgatgaggatatttgtggcaacagttgaagctatacttaggagagcttttccttctgaaacaccagagcaatccagaaagccaagaagtcaatctaagaatcttgctgttgctgaacttcacacaatgatacattcactctttgttgaatcctgtgcctcaatggaccttgcctcccggttgctatttgtggtgttaactgtttgtgtaagtcatcaagctttgccagggggcagcaaaagaccaactggtagcgataaccattccctcgaggaagccactgagcattcaagattaacaaatggaagaagcagatgtaagaagagacaaggccctgttgctacgtttgattcgtatgttctagctgcagtttgtgccttatcttgtgagcttcagctgttcccttgcatttctaagaatggatcacattcaaatttaaaggattccatgaagattatcatacctggaaaaaacaatgggatcaataatgagctacacagtagcatcagctcagcaattattcatactcgtagaattcttgccatcctcgaagcccttttctccttgaagccatcatcagttggtacctcatggagctatagctcaaatgaaatagttgcagcagctatggttgctgctcacgtttctgagttattccgtcggtccaggccatgccttaattcactctctgcactgatgagatgcaagcgggatgctgagatttctaccagggcatcatccctctaccatttgattgacttgcatggtaaaacagtgtcctccattgtgaacaaagctgagcctcttgaagctcacctgacccttacaccagtaaagaaggttaatcaacatcgctgtgaggaaaacaacaccaactcatcggatagtgccaagttggaaaacaagaatggttcaacacataagaaaaacggtttctcaaaaccacacttgaaatgtgcagaagaggttctgaacggcaatgttgcaagtacatctgggaaatccattgcaagcttacaggtggaagcatctgatttggcaaacttccttaccatggatcggaatggggggtaccgaggttcacaaactctcctaagatctgtattatcagagaaacaagagctgtgcttctctgttgtctcattgctctggcagaagctcatagcttctcccgaaatgcagatgtctgcagaaagcacatcagctcaccaaggatggaggaaggttgtggatgcactttgtgatgtcgtttcagcctcaccaaccaaggcctcagctgctatcgttctccaggccgagaaggacttgcagccttggattgctagagacgacgaacaaggccagaagatgtggagagtcaaccaacgtatagtgaagcttatagcggagctcatgaggaaccatgacagccctgaaaccttggtgatactcgctagtgcctctgaccttctacttcgtgctactgatggaatacttgttgacggtgaagcttgtactttgccacagcttgagcttctcgaagtaaccgctcgagcagtccatcttattattgaatggggagatccaggtttatcagttgctgatggcctttctaatctgctaaagtgccgtctttcaaccaccatccgctgcctttctcacccaagcgcgcacgtgcgcgcgctcagcatgtccgttctccgtgacatcctggaccacggatccgtgagccccaacaagatcagccgaggggaacagcagcggaatggcatccagagcccatcgtaccggtgcgtggccgcaggcatcctcaactggcaagcggacgtggagaggtgcatagagtgggaagcccacagccgccgcgccaccgggctgacgctcgccttcctcagtacggcggcgaaggagctcggctgccctctcccgtgctgacgaggccgctcccggatctgatctgacatcggcggccacttgacggccagtgctggcagcttgctgcgggaccggcgagtaggacgctaatctctcgaccaaggacgactcgccggtttgttcacgtgatatgtgatcaaactgatattagatggtgtttccaaagtatatatctactgaggggcttgctcccatgatgcgattttattccaatctgacgtcagatgctttacgagcatatttaactgcttgagctgtacgtagcttgtattacttgtaactttgtgtaatatggttattattgccgaagaagcagaacatagctttttcttttttttctctctcttttttagactgctgctagatccttatccatgcgttgcaacggagcgccatatagattgaagttccccttgcagggctccttgtacggtctataacatgaacataaagatggcatccagtagtcaatcagcaactatcgcaatgagattggtcttctgcacgtgacccagtttagctcccgtgcagggctctctgtaacctactgtgatgtcccatgacatgaacataaatgtggcaggtttatcattcaataaccaaacagcagc

SEQ ID NO: 29210 - DNA, 4248 bp, Zea Mays
ctcctcgccatttctctctcctcccctccgtctcacccgccgcccgccgcgaaaatctgcgcacggacgcgccggctgcccgcggagagcctcgggtgggagcgcgccccgtcgaggctcttgagctaccaagcatgtcagaatcaaatgtgaagtggattgatgggcttcacttcacatcattgtactggcctccaccccaggatgtggagcagaagcaggcacaaatcttggcctacgtcgagtactttggccagtttacagctgacagtgagcagttccctgaagatgtagctcagctcattcaaagttcctatccatcaaaagaaagtcgcttgatagatgaagtattggcaacttttgttcttcatcatccggagcatggtcatgcagttgtacatccaattctttcacccatcatagatgggacactgtgctatgataggcatggtcctccattcagctccttcatctctttatttagccatacttctgagcaagagtactcagaacagtgggccttggcctgtggagaaattcttagagtcttaactcactacaataggccaattttcaaagttgaacgccaacacagtgaagctgaatgtagcaccacatctgatcaggcaacatctagtgattccacagataagaaatctaacaattctctaggaaatgaatctgaccggaagccattgaggccactaaccccgtggatcactgacatattgctagctgcacctttgggcattcgaagtgactattttcgatggtgtagcggtgtaatgggaaaatatgctgctggtggagagttgaagcctccaactactgcttacagccgaggatctggaaagcacccacaacttatgccttccacccccagatgggctgttgccaatggagctggagttatattaagtgtctgtgatgaggaggtagctcgttatgagacagcaaatttaacagcagcagctgttcctgcgcttctgctacctccgccaacgacacccttggacgagcatttggtggctggtctgccccctcttgaaccatatgctcgcttgttccatagatattatgcaattgctacaccaagtgctacacagaggttgctttttggtcttctcgaagcacctccatcatgggctccagatgcacttgatgcagcagtacagctagttgagctacttagagcagctgaagattatgcttctggcatgcggcttccaaagaattggatgcatctgcatttcttgcgtgccattggaactgcaatgtcaatgagagctggtattgctgctgatacagctgctgctctgcttttccgaatactttcccaaccaacgctgctttttccaccactgcgacatgctgaaggagttgacgtacatcatgaaccactaggtggctatgtatcatcatataagaaacagttggaagttcctgcatctgaggccactatcgatgccactgcacaaggcattgcttctttgttgtgtgctcatgggcctgatgttgagtggagaatatgtaccatctgggaagctgcctatggtttgctaccactaagttcatcagcagttgatttacctgaaattgttgtagctgccccgcttcagccacctacactgtcatggaacctgtacttaccattattaaaagtattcgagtatctacctcgtggaagtccatctgaagcatgcttgatgaggatatttgtggcaacagttgaagctatacttaggagagcttttccttctgaaacaccagagcaatccagaaagccaagaagtcaatctaagaatcttgctgttgctgaacttcacacaatgatacattcactctttgttgaatcctgtgcctcaatggaccttgcctcccggttgctatttgtggtgttaactgtttgtgtaagtcatcaagctttgccagggggcagcaaaagaccaactggtagcgataaccattccctcgaggaagccactgagcattcaagattaacaaatggaagaagcagatgtaagaagagacaaggccctgttgctacgtttgattcgtatgttctagctgcagtttgtgccttatcttgtgagcttcagctgttcccttgcatttctaagaatggatcacattcaaatttaaaggattccatgaagattatcatacctggaaaaaacaatgggatcaataatgagctacacagtagcatcagctcagcaattattcatactcgtagaattcttgccatcctcgaagcccttttctccttgaagccatcatcagttggtacctcatggagctatagctcaaatgaaatagttgcagcagctatggttgctgctcacgtttctgagttattccgtcggtccaggccatgccttaattcactctctgcactgatgagatgcaagcgggatgctgagatttctaccagggcatcatccctctaccatttgattgacttgcatggtaaaacagtgtcctccattgtgaacaaagctgagcctcttgaagctcacctgacccttacaccagtaaagaaggttaatcaacatcgctgtgaggaaaacaacaccaactcatcggatagtgccaagttggaaaacaagaatggttcaacacataagaaaaacggtttctcaaaaccacacttgaaatgtgcagaagaggttctgaacggcaatgttgcaagtacatctgggaaatccattgcaagcttacaggtggaagcatctgatttggcaaacttccttaccatggatcggaatggggggtaccgaggttcacaaactctcctaagatctgtattatcagagaaacaagagctgtgcttctctgttgtctcattgctctggcagaagctcatagcttctcccgaaatgcagatgtctgcagaaagcacatcagctcaccaaggatggaggaaggttgtggatgcactttgtgatgtcgtttcagcctcaccaaccaaggcctcagctgctatcgttctccaggtcaagatattgctatattcgccgagaaggacttgcagccttggattgctagagacgacgaacaaggccagaagatgtggagagtcaaccaacgtatagtgaagcttatagcggagctcatgaggaaccatgacagccctgaaaccttggtgatactcgctagtgcctctgaccttctacttcgtgctactgatggaatacttgttgacggtgaagcttgtactttgccacagcttgagcttctcgaagtaaccgctcgagcagtccatcttattattgaatggggagatccaggtttatcagttgctgatggcctttctaatctgctaaagtgccgtctttcaaccaccatccgctgcctttctcacccaagcgcgcacgtgcgcgcgctcagcatgtccgttctccgtgacatcctggaccacggatccgtgagccccaacaagatcagccgaggggaacagcagcggaatggcatccagagcccatcgtaccggtgcgtggccgcaggcatcctcaactggcaagcggacgtggagaggtgcatagagtgggaagcccacagccgccgcgccaccgggctgacgctcgccttcctcagtacggcggcgaaggagctcggctgccctctcccgtgctgacgaggccgctcccggatctgatctgacatcggcggccacttgacggccagtgctggcagcttgctgcgggaccggcgagtaggacgctaatctctcgaccaaggacgactcgccggtttgttcacgtgatatgtgatcaaactgatattagatggtgtttccaaagtatatatctactgaggggcttgctcccatgatgcgattttattccaatctgacgtcagatgctttacgagcatatttaactgcttgagctgtacgtagcttgtattacttgtaactttgtgtaatatggttattattgccgaagaagcagaacatagctttttcttttttttctctctcttttttagactgctgctagatccttatccatgcgttgcaacggagcgccatatagattgaagttccccttgcagggctccttgtacggtctataacatgaacataaagatggcatccagtagtcaatcagcaactatcgcaatgagattggtcttctgcacgtgacccagtttagctcccgtgcagggctctctgtaacctactgtgatgtcccatgacatgaacataaatgtggcaggtttatcattcaataaccaaacagcagc

SEQ ID NO: 29211 - DNA, 4204 bp, Zea Mays
ccgccgcccgccgcgaaaatctgcgcacggacgcgccggctgcccgcggagagcctcgggtgggagcgcgccccgtcgagtttcttgggcaggctcttgagctaccaagcatgtcagaatcaaatgtgaagtggattgatgggcttcacttcacatcattgtactggcctccaccccaggatgtggagcagaagcaggcacaaatcttggcctacgtcgagtactttggccagtttacagctgacagtgagcagttccctgaagatgtagctcagctcattcaaagttcctatccatcaaaagaaagtcgcttgatagatgaagtattggcaacttttgttcttcatcatccggagcatggtcatgcagttgtacatccaattctttcacccatcatagatgggacactgtgctatgataggcatggtcctccattcagctccttcatctctttatttagccatacttctgagcaagagtactcagaacagtgggccttggcctgtggagaaattcttagagtcttaactcactacaataggccaattttcaaagttgaacgccaacacagtgaagctgaatgtagcaccacatctgatcaggcaacatctagtgattccacagataagaaatctaacaattctctaggaaatgaatctgaccggaagccattgaggccactaaccccgtggatcactgacatattgctagctgcacctttgggcattcgaagtgactattttcgatggtgtagcggtgtaatgggaaaatatgctgctggtggagagttgaagcctccaactactgcttacagccgaggatctggaaagcacccacaacttatgccttccacccccagatgggctgttgccaatggagctggagttatattaagtgtctgtgatgaggaggtagctcgttatgagacagcaaatttaacagcagcagctgttcctgcgcttctgctacctccgccaacgacacccttggacgagcatttggtggctggtctgccccctcttgaaccatatgctcgcttgttccatagatattatgcaattgctacaccaagtgctacacagaggttgctttttggtcttctcgaagcacctccatcatgggctccagatgcacttgatgcagcagtacagctagttgagctacttagagcagctgaagattatgcttctggcatgcggcttccaaagaattggatgcatctgcatttcttgcgtgccattggaactgcaatgtcaatgagagctggtattgctgctgatacagctgctgctctgcttttccgaatactttcccaaccaacgctgctttttccaccactgcgacatgctgaaggagttgacgtacatcatgaaccactaggtggctatgtatcatcatataagaaacagttggaagttcctgcatctgaggccactatcgatgccactgcacaaggcattgcttctttgttgtgtgctcatgggcctgatgttgagtggagaatatgtaccatctgggaagctgcctatggtttgctaccactaagttcatcagcagttgatttacctgaaattgttgtagctgccccgcttcagccacctacactgtcatggaacctgtacttaccattattaaaagtattcgagtatctacctcgtggaagtccatctgaagcatgcttgatgaggatatttgtggcaacagttgaagctatacttaggagagcttttccttctgaaacaccagagcaatccagaaagccaagaagtcaatctaagaatcttgctgttgctgaacttcacacaatgatacattcactctttgttgaatcctgtgcctcaatggaccttgcctcccggttgctatttgtggtgttaactgtttgtgtaagtcatcaagctttgccagggggcagcaaaagaccaactggtagcgataaccattccctcgaggaagccactgagcattcaagattaacaaatggaagaagcagatgtaagaagagacaaggccctgttgctacgtttgattcgtatgttctagctgcagtttgtgccttatcttgtgagcttcagctgttcccttgcatttctaagaatggatcacattcaaatttaaaggattccatgaagattatcatacctggaaaaaacaatgggatcaataatgagctacacagtagcatcagctcagcaattattcatactcgtagaattcttgccatcctcgaagcccttttctccttgaagccatcatcagttggtacctcatggagctatagctcaaatgaaatagttgcagcagctatggttgctgctcacgtttctgagttattccgtcggtccaggccatgccttaattcactctctgcactgatgagatgcaagcgggatgctgagatttctaccagggcatcatccctctaccatttgattgacttgcatggtaaaacagtgtcctccattgtgaacaaagctgagcctcttgaagctcacctgacccttacaccagtaaagaaggttaatcaacatcgctgtgaggaaaacaacaccaactcatcggatagtgccaagttggaaaacaagaatggttcaacacataagaaaaacggtttctcaaaaccacacttgaaatgtgcagaagaggttctgaacggcaatgttgcaagtacatctgggaaatccattgcaagcttacaggtggaagcatctgatttggcaaacttccttaccatggatcggaatggggggtaccgaggttcacaaactctcctaagatctgtattatcagagaaacaagagctgtgcttctctgttgtctcattgctctggcagaagctcatagcttctcccgaaatgcagatgtctgcagaaagcacatcagctcaccaaggatggaggaaggttgtggatgcactttgtgatgtcgtttcagcctcaccaaccaaggcctcagctgctatcgttctccaggccgagaaggacttgcagccttggattgctagagacgacgaacaaggccagaagatgtggagagtcaaccaacgtatagtgaagcttatagcggagctcatgaggaaccatgacagccctgaaaccttggtgatactcgctagtgcctctgaccttctacttcgtgctactgatggaatacttgttgacggtgaagcttgtactttgccacagcttgagcttctcgaagtaaccgctcgagcagtccatcttattattgaatggggagatccaggtttatcagttgctgatggcctttctaatctgctaaagtgccgtctttcaaccaccatccgctgcctttctcacccaagcgcgcacgtgcgcgcgctcagcatgtccgttctccgtgacatcctggaccacggatccgtgagccccaacaagatcagccgaggggaacagcagcggaatggcatccagagcccatcgtaccggtgcgtggccgcaggcatcctcaactggcaagcggacgtggagaggtgcatagagtgggaagcccacagccgccgcgccaccgggctgacgctcgccttcctcagtacggcggcgaaggagctcggctgccctctcccgtgctgacgaggccgctcccggatctgatctgacatcggcggccacttgacggccagtgctggcagcttgctgcgggaccggcgagtaggacgctaatctctcgaccaaggacgactcgccggtttgttcacgtgatatgtgatcaaactgatattagatggtgtttccaaagtatatatctactgaggggcttgctcccatgatgcgattttattccaatctgacgtcagatgctttacgagcatatttaactgcttgagctgtacgtagcttgtattacttgtaactttgtgtaatatggttattattgccgaagaagcagaacatagctttttcttttttttctctctcttttttagactgctgctagatccttatccatgcgttgcaacggagcgccatatagattgaagttccccttgcagggctccttgtacggtctataacatgaacataaagatggcatccagtagtcaatcagcaactatcgcaatgagattggtcttctgcacgtgacccagtttagctcccgtgcagggctctctgtaacctactgtgatgtcccatgacatgaacataaatgtggcaggtttatcattcaataaccaaacagcagc

SEQ ID NO: 29212 - DNA, 7074 bp, Zea Mays
ctgcgcacggacgcgccggctgcccgcggagagcctcgggtgggagcgcgccccgtcgaggctcttgagctaccaagcatgtcagaatcaaatgtgaagtggattgatgggcttcacttcacatcattgtactggcctccaccccaggatgtggagcagaagcaggcacaaatcttggcctacgtcgagtactttggccagtttacagctgacagtgagcagttccctgaagatgtagctcagctcattcaaagttcctatccatcaaaagaaagtcgcttgatagatgaagtattggcaacttttgttcttcatcatccggagcatggtcatgcagttgtacatccaattctttcacccatcatagatgggacactgtgctatgataggcatggtcctccattcagctccttcatctctttatttagccatacttctgagagtactcagaacagtgggccttggcctgtggagaaattcttagagtcttaactcactacaataggccaattttcaaagttgaacgccaacacagtgaagctgaatgtagcaccacatctgatcaggcaacatctagtgattccacagataagaaatctaacaattctctaggaaatgaatctgaccggaagccattgaggccactaaccccgtggatcactgacatattgctagctgcacctttgggcattcgaagtgactattttcgatggtgtagcggtgtaatgggaaaatatgctgctggtggagagttgaagcctccaactactggttggtaaaatcaatccccaaatattttatcttgatattgtagatttgtagcattataaaaaactcgtccctccgtgcattatattaagaagaagatcttctcacacagtttgagaaaaccttcgaacccctgccccatccatacagcgcggtacgtagcccatgtgaaaatgatagcgaccaaggattaggccttagaccggtgctttggcgtgagactaacgaggtattttttttacccccaacctgaaatccgctcccatggggagttgaactcaggatctgagaggtgctactcacaccacctaaccaactcagctagtaactataaataaccattttcttatatgtagagattgttgggaaatgcacttgttttcattatgaggccctaaggcctgtatatatacatcggtacatgaggataaatatgcactaaacaccttattcaatggggatatataggtacatgaggataaatatgcactaaacaccttattcaatggggatatttaggaatacatatatatacatctaacaccccctctcaaactcaaggtggatcaatgacactaagtttggagagataaaactgatgctaagctctggtttgcgccctgatgaaggtaccagccaactgaagctctgaaggcacatggcgaagaacaatgacatcatcatcctgaatctgcgctcgtgtataagaagcatcaacaccaatatatgcttagtaagctcatgctttaccggatcacgaacaatactaatagcacatgtactatcagacaaatgagaagtcggtatagatacagaaactccaaaatcaacaagcaaccaccgtagccaagtcacctctgtcgtcgcaagagccatagcacacaactcagcctttgtactcgaacgagaaactgctaattgcttcttagtcttccaagcaatgagggaaccactaagaaaaacacaatggtcagaaagagattaaggatatgagaaataactagcccaagtcacatcaaaataggcatggagctgcaaggagctagaacgaggaaagaacagatgacaagagatagtcccacgaagataacatagaacacgaagaagatgattgtagtgaagttgagtgggggtagatacaaacatattcagaatatgcacatgatacgagatgtcatggtgagtaacaccaaggtaaaccagactaccttcaatgtgacgatatcgagtagaatccgaaagaggctcgccattagtggcacaaaggcaaacattgagctccatggggtcttaacagtgcaatgatcagagacacacaagggtgactagcaagtaactgggcacgaagaggctcaaacttttcacgcggatgggtaagcctagacattttacccgctacacgctacccgaacccggacccgaaatacccgaacccacagtacccaaaatctatttcggataaaaaatgctattacccaaaattagtttgggtagtttggctagcagcacctgatacccgaactacctgtaacaacgggtaatatgccctggcgtgcgaggtgtcggagtctgctatctgcgaaccgtggagacgtcagaagtggagtcatgcgacgacccatgagcccatcaagccaaggcgcattcgctttagcttcatctgatccgacgcccgacagtcgacgctgcataacctagcagtagccgccaactgtctccttgtcctcggtggcggtacccgcctgcgactacgccggacgccggttgcttcttcaccagtcaccacggccgtacactccgttgcacagtcgctgcccttactcccttcgtccctcgtccacggtccacctttgcccagttttgatgactggtagttctaaattcttttcctgtaaatcttcaagccgtatgtaatgtgctttggcctttgggcgtatggactctggaatgttgggtgtgtcactgtcagtgtgagcatgtaatgactgttgttcgatgagagcagatagcttctgtcaaatatgctttgggcttctgtcaaatatgcttttgatgagtgatgaccgctagttctattcaccggaaatatttcgggtaaatcgggtataccgaactcgaacccgaaattacgggtagagttttttcttggctgtaatggggtaacaatttctattacccgaatttatcaaagcccgaactacccgacccgaattaaacgggtaacccgaaggtcccgaacgccagtcttatggatgggtcaagaagtcatatgtgcgacgaaactcaagatcagtcttttgatccagacagaactcacatgtgctaggagacatctacagactaagagtatcaagctgacgctaggcgtcagacatctggctatagaattcatcaactgtagaatctccctgacgtaaagaccactcctgacgaatggcagcaagataagtagatgtccagcacacacaacaatcacgaagaagggtccacatctgatgagaactgtcactcaacaaactctgtagaaaagcgagcctccacactagcggtgagaatagaaccagctcaagcatcctcatccatccatatccgatatgcactctactgagcctcatatgatgccagctgatcatcataatctgcaagtagagtgcatcagctgctccctatactgctccattactcgtcttattaagaaaatggctttcatggttgaccttctagagttctaggcacgaaaccaaattggttaaaagagattctcattattcctctcaggcggcgctcgataactctcttccatatcttcatagtatggctcgtcaacttaatttctcggtaattagtacaactttgaatttattcttgtagatcggttccgatatactttaccactcagacatctttattttggacaaacccagccagaagtatctatattttgggatgtaggtagtagtcgataatgtttgttgtgtatggaaaaaaatcaacatatccctgggtgatttagcttacagccgaggatctggaaagcacccacaacttatgccttccacccccagatgggctgttgccaatggagctggagttatattaagtgtctgtgatgaggaggtagctcgttatgagacagcaaatttaacagcagcagctgttcctgcgcttctgctacctccgccaacgacacccttggacgagcatttggtggctggtctgccccctcttgaaccatatgctcgcttgttccatagatattatgcaattgctacaccaagtgctacacagaggttgctttttggtcttctcgaagcacctccatcatgggctccagatgcacttgatgcagcagtacagctagttgagctacttagagcagctgaagattatgcttctggcatgcggcttccaaagaattggatgcatctgcatttcttgcgtgccattggaactgcaatgtcaatgagagctggtattgctgctgatacagctgctgctctgcttttccgaatactttcccaaccaacgctgctttttccaccactgcgacatgctgaaggagttgacgtacatcatgaaccactaggtggctatgtatcatcatataagaaacagttggaagttcctgcatctgaggccactatcgatgccactgcacaaggcattgcttctttgttgtgtgctcatgggcctgatgttgagtggagaatatgtaccatctgggaagctgcctatggtttgctaccactaagttcatcagcagttgatttacctgaaattgttgtagctgccccgcttcagccacctacactgtcatggaacctgtacttaccattattaaaagtattcgagtatctacctcgtggaagtccatctgaagcatgcttgatgaggatatttgtggcaacagttgaagctatacttaggagagcttttccttctgaaacaccagagcaatccagaaagccaagaagtcaatctaagaatcttgctgttgctgaacttcacacaatgatacattcactctttgttgaatcctgtgcctcaatggaccttgcctcccggttgctatttgtggtgttaactgtttgtgtaagtcatcaagctttgccagggggcagcaaaagaccaactggtagcgataaccattccctcgaggaagccactgagcattcaagattaacaaatggaagaagcagatgtaagaagagacaaggccctgttgctacgtttgattcgtatgttctagctgcagtttgtgccttatcttgtgagcttcagctgttcccttgcatttctaagaatggatcacattcaaatttaaaggattccatgaagattatcatacctggaaaaaacaatgggatcaataatgagctacacagtagcatcagctcagcaattattcatactcgtagaattcttgccatcctcgaagcccttttctccttgaagccatcatcagttggtacctcatggagctatagctcaaatgaaatagttgcagcagctatggttgctgctcacgtttctgagttattccgtcggtccaggccatgccttaattcactctctgcactgatgagatgcaagcgggatgctgagatttctaccagggcatcatccctctaccatttgattgacttgcatggtaaaacagtgtcctccattgtgaacaaagctgagcctcttgaagctcacctgacccttacaccagtaaagaaggttaatcaacatcgctgtgaggaaaacaacaccaactcatcggatagtgccaagttggaaaacaagaatggttcaacacataagaaaaacggtttctcaaaaccacacttgaaatgtgcagaagaggttctgaacggcaatgttgcaagtacatctgggaaatccattgcaagcttacaggtggaagcatctgatttggcaaacttccttaccatggatcggaatggggggtaccgagatgtctgcagaaagcacatcagctcaccaaggatggaggaaggttgtggatgcactttgtgatgtcgtttcagcctcaccaaccaaggcctcagctgctatcgttctccaggccgagaaggacttgcagccttggattgctagagacgacgaacaaggccagaagatgtggagagtcaaccaacgtatagtgaagcttatagcggagctcatgaggaaccatgacagccctgaaaccttggtgatactcgctagtgcctctgaccttctacttcgtgctactgatggaatacttgttgacggtgaagcttgtactttgccacagcttgagcttctcgaagtaaccgctcgagcagtccatcttattattgaatggggagatccaggtttatcagttgctgatggcctttctaatctgctaaagtgccgtctttcaaccaccatccgctgcctttctcacccaagcgcgcacgtgcgcgcgctcagcatgtccgttctccgtgacatcctggaccacggatccgtgagccccaacaagatcagccgaggggaacagcagcggaatggcatccagagcccatcgtaccggtgcgtggccgcaggcatcctcaactggcaagcggacgtggagaggtgcatagagtgggaagcccacagccgccgcgccaccgggctgacgctcgccttcctcagtacggcggcgaaggagctcggctgccctctcccgtgctgacgaggccgctcccggatctgatctgacatcggcggccacttgacggccagtgctggcagcttgctgcgggaccggcgagtaggacgctaatctctcgaccaaggacgactcgccggtttgttcacgtgatatgtgatcaaactgatattagatggtgtttccaaagtatatatctactgaggggcttgctcccatgatgcgattttattccaatctgacgtcagatgctttacgagcatatttaactgcttgagctgtacgtagcttgtattacttgtaactttgtgtaatatggttattattgccgaagaagcagaacatagctttttcttttttttctctctcttttttagactgctgctagatccttatccatgcgttgcaacggagcgccatatagattgaagttccccttgcagggctccttgtacggtctataacatgaacataaagatggcatccagtagtcaatcagcaactatcgcaatgagattggtcttctgcacgtgacccagtttagctcccgtgcagggctctctgtaacctactgtgatgtcccatgacatgaacataaatgtggcaggtttatcattcaataaccaaacagcagc

SEQ ID NO: 29213 - DNA, 1587 bp, Zea Mays
attggtgtgccatatgtgcaagctttttccaattagggtgatttggatcaatgacatacttaacaagtttagagccacatgtgtgtttaggagtttattgggatttagatgacattgctacttgctaggtatggttggtttggacctgatttgaaccaacaaagtagtgaaccatccttggcatcagcgtactctgcagacaagattattggcagcaggcctcctgatcttgttttcaatgaacaaaaacatatggctggttcagatgaatttgcaaatcattttgtgacaccctccattgtggatgaaataaatacatcacaaatggcggagaatccaagcaaggtggcacaactttcatggcttgactccatatctaatattagttttggagcactgttatctgaagctgcgccttctcaagacaccaaacaaccgccttcacaaaatagcatttgtctccagcagatccctcccacatgtgattcatttgatgctgctattgcttcgctgattgcccgtcagcaaccaagtaaccaaccaaaagtgttaaatccatccctttgggaagccgaagaaacttgccatgcatttcccttccagaatcaaactccacatgcatcaagttcagttcctggcaacagctttgctgctatgacctcatcagtcttgtgcgccattccagaaactggcacagatgatcagcaatgtgctacggatggtaggaaagaggaactaaacagtcaaacatcagtagagggcgatggtattaatgcaaagccagagatttcaatggagtcagctggtgacccagagcgtgaagcatcttgccccagactcttgggtggaaccgacagtataggactaagctctttgctcactgacagcctggatgcgttccagaaattctctgttttctgaagctcagaaatccataaagaacgacgggcttatacaatatgaactaagcggagttgttgggccagagagacgtctgaacagcgcccagccctcttccgaattgaaagcaaaaaaaggcatgatgactcggctcgagcgatctggagtcaaacaagtttgaaagaattcggttgcaacttgccacgaatctggcctgcttcgtttgaccgtcagatactgtgggatcctatcctttccctcattggatacgcccacgggccacgtacagacctgcctggagatctgcatgccacgcagcaacacatgcttggagagttggagatccagtcagtcaagtttggcgctctcaagtctgaactgttcctgctacgcggctacgccatttaaaaaaaaacaaaaactctcctagaaagagagatttcattatggtggctgacaggaccatgtaactgccgtctccctcccaactgactcgttgtagctgatgcagcagtctcactcaactcctgtttggtgaaacaacaacggagattatggggtgtttaaatacattagagttaatagcctaatagttagttggctaaaaaattatagacaaattagctagctaactatttgctaatatgctaaaaacaactaattgctgaactattaggtattttgttt

SEQ ID NO: 29214 - DNA, 947 bp, Zea Mays
acgaaacaagtccatctagaccgttcctcctctaatccccatcctcgctccccccaaccctcaccgccatggcgaccaccgaggactccgccgccgcgggcgaggcccgacgcctgttcgccctcctcgagtcccagcagcagatattgttgaggaactaataaagtcagggaatgctatagaggctatatatgttgcccatgaggctgatttgcttgggaaatttccacctgtgcctctcttcaaatcttatctgcagaattccactgataaggctcaggcagtgttgaaaagtggaagacattccagttctgcacttgaagaggcaaacagcttggagggcaatgcatacaggtccgtcataaggtgcgtcgagtcctgccagctacaatcggtgtttcctttagaggtcctgaggaagaagttagggaagttggagaaagagaagtctgataggaagaaggcagctggtccaagcagattcccgaacaagcgatcccgcggcgcagctggaccctatcccttccctgctgccaaggctgctaggggctcaagctttggtccgcgtttccagaacccagtctcacgttccttaaactacgcacctcatgctggatatataaacccagcagctgcatcaccattctctgtccctgggagcgtgtcggggagacgaggtggtgtaccatatggcggacctggagccacgtatggtggctcccctagctttgcaaccggtggtgggcagcaaccattccgtcgttaggtctagggctgtttgttgtaactgaatgctccttgttttctggctaatagggataatgtatgcctccagctattcaagcatacttgttcagttcttgatggatgctggatattgaacgtcgtgtagtacacattctatggtactgtgtttgctttgttaaatttgaactgtgtcttccata

SEQ ID NO: 29215 - DNA, 2070 bp, Zea Mays
acgaaacaagtccatctagaccgttcctcctctaatccccatcctcgctccccccaaccctcaccgccatggcgaccaccgaggactccgccgccgcgggcgaggcccgacgcctgttcgccctcctcgagtcccagcagcaggtactctctgactgccacggcgcctggtcgcgcgccctcgcacactttgcctcgcgcgaggaggacctcgcctcccgctccgctgcactcgacgaagccctagccgccgccgacgtttccacttccgagactctcgcagcgctcgaggcccgcgagtcctccattcccgcgcgcctcgctgaggcctccgccgcgctctccgccgccgtcgctgaggccgagactgaatccaccgggccaccacccaccgacatcaagggcgcgctccggtggatatgccgccgcatggacgctgctgcgctctggcgcttcatggccgcacgccgccgggagctcgcggtagtccggagggaggccggccccgccgtcgccatggccgtcgacccgccccgccttgtcctcgacgtggtaagcgatttcttagccgctggcgacggcgtcggcggggaccaatgctgggtgctcggcatgttgctgcgctctttgttcgatttggatggcaggaagcctcccgagataggagatacattggttgagagggcgtttgcagtaaccaaagagtggcaagagcgctttgggatcaatatggacaatttgtcttctgaagacaaggaggtggagatggccgaagctgatgggtcagagaactcaggagcaacagagaagaaagaaggaaaagaagatgaggagcaggaggaggtggaggaagaggacgaggaagaggaagaggaggaagacccagaggaggaggaggaagaggaggaggaggatgacccagaggaagtagaggaacctgaggcaccaggaaaggaagggaatgaggtgaagggagaaggggcagagggaaaggtgtctcaggagggacaaggggcagagaaaataggacatgaggatgagaagaagggagcagcagtgggcaccatgaaagtgaagacgggagaagaaggtaataagggtgcatcagagcaatcggaggcacagatatttgtgcagatggtagcggcatttggattgaaggataagttcgatgaggagttcttgagaaggctgtttgttgctaatggacggaagagggagcttgctaggattgcatgcgtgcttggatttgaggaaagccttggagatattgttgaggaactaataaagtcagggaatgctatagaggctatatatgttgcccatgaggctgatttgcttgggaaatttccacctgtgcctctcttcaaatcttatctgcagaattccactgataaggctcaggcagtgttgaaaagtggaagacattccagttctgcacttgaagaggcaaacagcttggagggcaatgcatacaggtccgtcataaggtgcgtcgagtcctgccagctacaatcggtgtttcctttagaggtcctgaggaagaagttagggaagttggagaaagagaagtctgataggaagaaggcagctggtccaagcagattcccgaacaagcgatcccgcggcgcagctggaccctatcccttccctgctgccaaggctgctaggggctcaagctttggtccgcgtttccagaacccagtctcacgttccttaaactacgcacctcatgctggatatataaacccagcagctgcatcaccattctctgtccctgggagcgtgtcggggagacgaggtggtgtaccatatggcggacctggagccacgtatggtggctcccctagctttgcaaccggtggtgggcagcaaccattccgtcgttaggtctagggctgtttgttgtaactgaatgctccttgttttctggctaatagggataatgtatgcctccagctattcaagcatacttgttcagttcttgatggatgctggatattgaacgtcgtgtagtacacattctatggtactgtgtttgctttgttaaatttgaactgtgtcttccata

SEQ ID NO: 29216 - DNA, 1992 bp, Zea Mays
acgaaacaagtccatctagaccgttcctcctctaatccccatcctcgctccccccaaccctcaccgccatggcgaccaccgaggactccgccgccgcgggcgaggcccgacgcctgttcgccctcctcgagtcccagcagcaggtactctctgactgccacggcgcctggtcgcgcgccctcgcacactttgcctcgcgcgaggaggacctcgcctcccgctccgctgcactcgacgaagccctagccgccgccgacgtttccacttccgagactctcgcagcgctcgaggcccgcgagtcctccattcccgcgcgcctcgctgaggcctccgccgcgctctccgccgccgtcgctgaggccgagactgaatccaccgggccaccacccaccgacatcaagggcgcgctccggtggatatgccgccgcatggacgctgctgcgctctggcgcttcatggccgcacgccgccgggagctcgcggtagtccggagggaggccggccccgccgtcgccatggccgtcgacccgccccgccttgtcctcgacgtggtaagcgatttcttagccgctggcgacggcgtcggcggggaccaatgctgggtgctcggcatgttgctgcgctctttgttcgatttggatggcaggaagcctcccgagataggagatacattggttgagagggcgtttgcagtaaccaaagagtggcaagagcgctttgggatcaatatggacaatttgtcttctgaagacaaggaggtggagatggccgaagctgatgggtcagagaactcaggagcaacagagaagaaagaaggaaaagaagatgaggagcaggaggaggtggaggaagaggacgaggaagaggaagaggaggaagacccagaggaggaggaggaagaggaggaggaggatgacccagaggaaggacaaggggcagagaaaataggacatgaggatgagaagaagggagcagcagtgggcaccatgaaagtgaagacgggagaagaaggtaataagggtgcatcagagcaatcggaggcacagatatttgtgcagatggtagcggcatttggattgaaggataagttcgatgaggagttcttgagaaggctgtttgttgctaatggacggaagagggagcttgctaggattgcatgcgtgcttggatttgaggaaagccttggagatattgttgaggaactaataaagtcagggaatgctatagaggctatatatgttgcccatgaggctgatttgcttgggaaatttccacctgtgcctctcttcaaatcttatctgcagaattccactgataaggctcaggcagtgttgaaaagtggaagacattccagttctgcacttgaagaggcaaacagcttggagggcaatgcatacaggtccgtcataaggtgcgtcgagtcctgccagctacaatcggtgtttcctttagaggtcctgaggaagaagttagggaagttggagaaagagaagtctgataggaagaaggcagctggtccaagcagattcccgaacaagcgatcccgcggcgcagctggaccctatcccttccctgctgccaaggctgctaggggctcaagctttggtccgcgtttccagaacccagtctcacgttccttaaactacgcacctcatgctggatatataaacccagcagctgcatcaccattctctgtccctgggagcgtgtcggggagacgaggtggtgtaccatatggcggacctggagccacgtatggtggctcccctagctttgcaaccggtggtgggcagcaaccattccgtcgttaggtctagggctgtttgttgtaactgaatgctccttgttttctggctaatagggataatgtatgcctccagctattcaagcatacttgttcagttcttgatggatgctggatattgaacgtcgtgtagtacacattctatggtactgtgtttgctttgttaaatttgaactgtgtcttccata

SEQ ID NO: 29217 - DNA, 2028 bp, Zea Mays
ctcgcccccgcccgccactcaagcactcccttcccctgaactaactccctcccgcctcacgcccacaaaaaatttctccgcttcccgccctcctccccaatggcctcgccggcgaagcgtgccaagccctcgtcgccggccaagccctcgagttcgccgcctcaggaagaggcgaccgccgccgccgtctctgaggaccccgtcgtcctcctccgccgccgctgggaacttgcatccgtgctccactttctcagggtgtttgagccggtgatcgaggcgaacttggggctatccgcggatgagatcgagatggcactcgcgtccaacaaccgcgacctagctcgcatacacattgcccttttgaagggaatacctccagttaacaaacatctaaaagatgaggatggatggattattgtaactgccaaaaagctaacagattggtggtcgtgggttgctgaaggagcaaaccctttcagaaataattcagggaaagaagtcgagatgtataagcagcaagatccaatcaagcggttgttgatactaaaagcgctttgtgaagtccgatctgagcaagatgatgcggtgtggtatgttaatgatgaaatgaagaaaggaactcatatttccaactttcggaaagataaactaggcagtggcagtagtgggactacatactggtatgacggtgattcaactattggccatagattatacacagaagacgtaacagttaattttaagcagaattggatgggaaagggtggccgtttgacaaaaccagttaccaatatttactgggaaacagttgcaactaaccttgacgagtttcttgaaatatcattatccagaaagggtcgtgctgaatctgctattgcagattatcttaagacagaagttattccagctgtggagaattttcaaaagaaaaaagagagacgtttaaaacggcaggagaagaaggacaaacttttagcttttactaacacattccaaacccgttcattgcgggaacgtcggcctgtcagctacaattactctgattttgatcgttccattgaggaggcgataagagctgtacagaaaggaaaagtacaaggttcacgtgaggcaggaacagaagagaaacctgcttcacatcatggagacaaaggtgccgatggaagatctgacatcaattctgaaaacaacaaaaatggaggacaggaggatgccaagtacctaagtgacctgagctctggcgatgaggaagacggagactacagtgacaggggtgtcagctccgctgacagtgacggagacaataatgcttctgattcctacaagagcgacatggaggaggatgtgtctgtaccacgcaagagaacccgtcttgctgcccgtttggcaaatgacaagcctcggccagggcttcgtcggagccaacgaaacatgaagaatgatgaagagactatgcatccaggtcaggtcacccctccaccaatggcgaagaaaacactgaggcaaaggcccacgcctgtctccaagcagcctgacattactttctcgagctctgaagatgatcttgcacaggttgttgcagactcagaggatgaaagtgggtaatttggcagaggttcggttgcatgcggtattttggattttgccttgtgggagccggttgaattccacaggtttagcgtcactaggcacttccatagtttcacttctaccggctggccggaatcagacgcagacagcaccggcgttttccccatatccgatgtgttatcttcacgaagtcattgggacacctctgacccacttgtatggtgatttgtacatatgcatttagacactatactgcgatgcatcaccactggagcacccaaaaatcttgctgatgaaatgcttctgatgtgaactatgttatccatgcattcgaagagaaatggtgcttatgtttgctttagacagcttgcctctctaagactctaacttaagataagcaggtttatgtcagcctgcgatattttatgttgattgcca

SEQ ID NO: 29218 - DNA, 986 bp, Zea Mays
ggaaaatatgcatagaaaactctgggaagtgggaatttaggaaaggaaaagtacaaggttcacgtgaggcaggaacagaagagaaacctgcttcacatcatggagacaaaggtgccgatggaagatctgacatcaattctgaaaacaacaaaaatggaggacaggaggatgccaagtacctaagtgacctgagctctggcgatgaggaagacggagactacagtgacaggggtgtcagctccgctgacagtgacggagacaataatgcttctgattcctacaagagcgacatggaggaggatgtgtctgtaccacgcaagagaacccgtcttgctgcccgtttggcaaatgacaagcctcggccagggcttcgtcggagccaacgaaacatgaagaatgatgaagagactatgcatccaggtcaggtcacccctccaccaatggcgaagaaaacactgaggcaaaggcccacgcctgtctccaagcagcctgacattactttctcgagctctgaagatgatcttgcacaggttgttgcagactcagaggatgaaagtgggtaatttggcagaggttcggttgcatgcggtattttggattttgccttgtgggagccggttgaattccacaggtttagcgtcactaggcacttccatagtttcacttctaccggctggccggaatcagacgcagacagcaccggcgttttccccatatccgatgtgttatcttcacgaagtcattgggacacctctgacccacttgtatggtgatttgtacatatgcatttagacactatactgcgatgcatcaccactggagcacccaaaaatcttgctgatgaaatgcttctgatgtgaactatgttatccatgcattcgaagagaaatggtgcttatgtttgctttagacagcttgcctctctaagactctaacttaagataagcaggtttatgtcagcctgcgatattttatgttgattgcca

SEQ ID NO: 29219 - DNA, 4247 bp, Zea Mays
ctttgggcggcctctctcgctccctctagccagatttcccgctcgaagtttcaccccaaacaatcagcttccctcgtctccccgcctcgtcgctgcctctcctcccattttcccgaccccgagctcgtcgaccccgcgtctacgcttctcggcctgctggtctcccttatcgattgggcacagccgccgccgcagccaccagatcgctttagggccttaggggggaggggagagggtgtgtctgtgcaccgccggtagctggggtaactgccccacccgccgtaggagcttcagcgagcgatggaaccgaggcggcgccagcagcagcagtcgatcctctcatttctccagaagcagccgccgtcatggagggatccctccggggagggcacgcctcccgagaagccaccgcggccccctatggggtccgtcgccgggatcatggagaggctagtgcgccctcctcctcctccgcaggccagtcacggatgggcgcgaaatcaatacgattcccaggttagacattcagaggggaaaaacttgcctgtggaaaatcaagttctctcaaatgagtgcttaggtgcattgttctcaagacctatttacggcgaacacagcagaacaatcctttccccagaaggaggtgcagatatgtctccctctcaggagccccaaaagcactcactgaggtcttccactgatgaatctacaagagcaaccaaagaagttattctggagcatccaaagaagttattctcagagtctcatactaattgcattcatgctacagccttaaatgagaactttggtgtgcaaactccttcccaggttgcctcaaagaaaatcttcccagggcttgctcatggtgctgatacacctttaactggatatggttcagaacaaactcttttgcagcattcatcaaagaagttctcattggtttctgctaatggtaaatacactagagcagcggtgacaccgtttgagcaaaattcaaataatacccgtgcagaggaactttcaaagatgcgctcagggtcttcagacatgttgtatcttaaaccaacaaatttgtctgcagaactcgagacaaatggaaccccattgaagaatcactcaaagaattcctccttgcttatggacggtaaatataacataacatctgctgcactatttccagaacttgactctagtcctctgaaaccagaaacaccagcaatgcaggcagctattcctcgcctgaagcgagttcaggaagaccaaggtgtggatgccaacaaccaatgccctcctttgtgggccatgaacaagaagatgaaatcagctcattgttctattgaaaagaaggatcatgatgaaatggctggtagcgcgcgtagcaaatttgagtggctgaattcatttgccatcagagatgcaaataaaaggcggccaaatgatccactttatgacaagagtacccttttcattccacctgatgcattgagaaaaatgtcaacatctcaaaagcaatactggaatattaagtgcaaatatatggatgttgtcctctttttcaaagtggggaaattttatgagctctatgagctagatgctgagattggccaaaaagaacttgactggaaaatgactgttagtggggtgggcaagtgcagacaggttggtatttcagaaagtggtatagatgatgctgttgataagcttatagctcgggggtataaagttggaagaatagaacaaatggaatctgcaaaccaggccaaagctagaggagtacattctgttattgaaagaaagttggttcatgtgtccacaccatcaaccgcggttgataacattggtactgatgctgttcaccttctggcactgaaagaggtgaccctagcttctagcggtttccaggtctttggatttgctttcctagactatgctgcccttaaaatttgggtgggttcagtccaagatgatgactcgtctgcagctttgggtgctttgttgatgcaggtttctcctagagaattaatctatgaaacctcaggcatctcaaaagaaactcaaaggacaataagaaaatatgcctcagcaggatctgtgaagatgcagctgacccccctctccgggatagatttctctgatgctgcacagattcgaaatttaatacattctaaagggttctttaatgcatcaacagagtcatggttatctgctttggattgcacaatgaatcaagatgtagttatttgtgcacttggtggacttattggccatttgactaggctcatgttacatgatgccctgaaaaatggggaagtcttaccataccatgtgtacaaaacatgtttaaggatggatggccagactcttgtgaacctcgagattttcagcaacaatttcaatggtggttcatctggtactttatataagcaccttaatcactgtgtcacagcatctggtaagcggatgctaagaaggtggatttgtcatccacttaaagacattgatgctatcaataaaaggcttgatgttgttgaggggtttatccaaaactgtggactaggccctacaacacttgggtatctccagaaaattcctgatcttgagagattattaggacaagttagatccactgttgggttatcatctttgcttcaactgccctttattggagaaaaaataataaagaaacggattaaaacatttataatgcttatcaatggcctccgcaatggtattgacttgctaaatgatttacaaagagcggaccatggtatcttggcgctttataagattgtggatattccatcattgagctatcttcctgagttaatccataagtttgaagagagaatgcaaaatgagtttccatgtggccaggtttctgatgtcaatgccaatggtgccaacgatttggctgctctgatggacgtttttatcggaaaggcttctgaatggtctttggtgatcaatgccgtcagcactattgatgtgcttaggtcctttgctgcaatgacattgtcatcatttggtgccatgtgcagaccacaagttctgctgaaagatgatgtgcctgtacttcgtatgaagggtctgtggcatccctacgcttttgcgggaaatgcaaatagtctggtaccaaatgatttaacccttggtcaggatttatctggtctcaatcgttttgcattgctgttaactggtccaaatatgggtgggaaatccacaatcatgcgtgccacctgcctggctgttgtacttgctcagcttggctgttatgtcccctgcacgtcatgtgagttgacccttgcggattccatctttacgcgcctcggtgcaacagatcggattatgactggggaaagtacttttctcgttgaatgtactgagactgcctctgttcttcagaaagcaactgtggactcgcttgtcttgcttgatgagcttggcagaggaactagcacatttgatggatatgcaatcgcatatgctgtgtttcgccacctagtggagcgagtgcgatgccgtcagctctttgctacccactaccattctcttacaaaggagttcgcctcgcaccctcacgtgagcctccagcacatggcctgcatgttcaagccaaggagcgacggcaacggccagaaggagctgaccttcctataccggctgacctcgggggcctgtccagaaagctacggcctgcaggtcgccgcaatggcagggatcccgaagtcgatagtggagaaggcgtctgtcgcgggccaggtgatgagggctaagatcgccgggaacttcaagtcgagcgaacagcgagctgagttctcgaccctccacgaggaatggctgagggcggccctggcggtgagcgcgatggacggacaaccggacgacgacgacgtcatggacacgctgttctgcatccagcaagagctgaagtctcacttcaggaaggcgagatgagcattcgccgccgccgctgatcgcgtacgtgggagtactaattatcaatgcctagattcttcagtgatgtcgtatctttacaaccatggtagatataatgtaatccgcgttttttttccatggcacgaatcctgtactttaaacaaagtatcttgtgtatatatgttctgtgctatgtcttgtttgcattgggcagcaaggaccactatccttaatcacttccaccgtttatgtgcatcatatacatttgtgtttggtttgaggaataaaatagtttattatcttttcacttt

SEQ ID NO: 29220 - DNA, 4105 bp, Zea Mays
ctttgggcggcctctctcgctccctctagccagatttcccgctcgaagtttcaccccaaacaatcagcttccctcgtctccccgcctcgtcgctgcctctcctcccattttcccgaccccgagctcgtcgaccccgcgtctacgcttctcggcctgctggtctcccttatcgattgggcacagccgccgccgcagccaccagatcgctttagggccttaggggggaggggagagggtgtgtctgtgcaccgccggtagctggggtaactgccccacccgccgtaggagcttcagcgagcgatggaaccgaggcggcgccagcagcagcagtcgatcctctcatttctccagaagcagccgccgtcatggagggatccctccggggagggcacgcctcccgagaagccaccgcggccccctatggggtccgtcgccgggatcatggagaggctagtgcgccctcctcctcctccgcaggccagtcacggatgggcgcgaaatcaatacgattcccaggttagacattcagaggggaaaaacttgcctgtggaaaatcaagttctctcaaatgagtgcttaggtgcattgttctcaagacctatttacggcgaacacagcagaacaatcctttccccagaaggaggtgcagatatgtctccctctcaggagccccaaaagcactcactgaggtcttccactgatgaatctacaagagcaaccaaagaagttattctggagcatccaaagaagttattctcagagtctcatactaattgcattcatgctacagccttaaatgagaactttggtgtgcaaactccttcccaggttgcctcaaagaaaatcttcccagggcttgctcatggtgctgatacacctttaactggatatggttcagaacaaactcttttgcagcattcatcaaagaagttctcattggtttctgctaatggtaaatacactagagcagcggtgacaccgtttgagcaaaattcaaataatacccgtgcagaggaactttcaaagatgcgctcagggtcttcagacatgttgtatcttaaaccaacaaatttgtctgcagaactcgagacaaatggaaccccattgaagaatcactcaaagaattcctccttgcttatggacggtaaatataacataacatctgctgcactatttccagaacttgactctagtcctctgaaaccagaaacaccagcaatgcaggcagctattcctcgcctgaagcgagttcaggaagaccaaggtgtggatgccaacaaccaatgccctcctttgtgggccatgaacaagaagatgaaatcagctcattgttctattgaaaagaaggatcatgatgaaatggctggtagcgcgcgtagcaaatttgagtggctgaattcatttgccatcagagatgcaaataaaaggcggccaaatgatccactttatgacaagagtacccttttcattccacctgatgcattgagaaaaatgtcaacatctcaaaagcaatactggaatattaagtgcaaatatatggatgttgtcctctttttcaaagtggggaaattttatgagctctatgagctagatgctgagattggccaaaaagaacttgactggaaaatgactgttagtggggtgggcaagtgcagacaggttggtatttcagaaagtggtatagatgatgctgttgataagcttatagctcgggggtataaagttggaagaatagaacaaatggaatctgcaaaccaggccaaagctagaggagtacattctgttattgaaagaaagttggttcatgtgtccacaccatcaaccgcggttgataacattggtactgatgctgttcaccttctggcactgaaagaggtgaccctagcttctagcggtttccaggtctttggatttgctttcctagactatgctgcccttaaaatttgggtgggttcagtccaagatgatgactcgtctgcagctttgggtgctttgttgatgcaggtttctcctagagaattaatctatgaaacctcaggcatctcaaaagaaactcaaaggacaataagaaaatatgcctcagcaggatctgtgaagatgcagctgacccccctctccgggatagatttctctgatgctgcacagattcgaaatttaatacattctaaagggttctttaatgcatcaacagagtcatggttatctgctttggattgcacaatgaatcaagatgtagttatttgtgcacttggtggacttattggccatttgactaggctcatgttacatgatgccctgaaaaatggggaagtcttaccataccatgtgtacaaaacatgtttaaggatggatggccagactcttgtgaacctcgagattttcagcaacaatttcaatggtggttcatctggtactttatataagcaccttaatcactgtgtcacagcatctggtaagcggatgctaagaaggtggatttgtcatccacttaaagacattgatgctatcaataaaaggcttgatgttgttgaggggtttatccaaaactgtggactaggccctacaacacttgggtatctccagaaaattcctgatcttgagagattattaggacaagttagatccactgttgggttatcatctttgcttcaactgccctttattggagaaaaaataataaagaaacggattaaaacatttataatgcttatcaatggcctccgcaatggtattgacttgctaaatgatttacaaagagcggaccatggtatcttggcgctttataagattgtggatattccatcattgagctatcttcctgagttaatccataagtttgaagagagaatgcaaaatgagtttccatgtggccaggtttctgatgtcaatgccaatggtgccaacgatttggctgctctgatggacgtttttatcggaaaggcttctgaatggtctttggtgatcaatgccgtcagcactattgatgtgcttaggtcctttgctgcaatgacattgtcatcatttggtgccatgtgcagaccacaagttctgctgaaagatgatgtgcctgtacttcgtatgaagggtctgtggcatccctacgcttttgcgggaaatgcaaatagtctggtaccaaatgatttaacccttggtcaggatttatctggtctcaatcgttttgcattgctgttaactggtccaaatatgggtgggaaatccacaatcatgcgtgccacctgcctggctgttgtacttgctcagcttggctgttatgtcccctgcacgtcatgtgagttgacccttgcggattccatctttacgcgcctcggtgcaacagatcggattatgactggggaaagtacttttctcgttgaatgtactgagactgcctctgttcttcagaaagcaactgtggactcgcttgtcttgcttgatgagcttggcagaggaactagcacatttgatggatatgcaatcgcatatgctgtgtttcgccacctagtggagcgagtgcgatgccgtcagctctttgctacccactaccattctcttacaaaggagttcgcctcgcaccctcacgtgagcctccagcacatggcctgcatgttcaagccaaggagcgacggcaacggccagaaggagctgaccttcctataccggctgacctcgggggcctgtccagaaagctacggcctgcaggtcgccgcaatggcagggatcccgaagtcgatagtggagaaggcgtctgtcgcgggccaggtgatgagggctaagatcgccgggaacttcaagtcgagcgaacagcgagctgagttctcgaccctccacgaggaatggctgagggcggccctggcggtgagcgcgatggacggacaaccggacgacgacgacgtcatggacacgctgttctgcatccagcaagagctgaagtctcacttcaggaaggcgagatgagcattcgccgccgccgctgatcgcaggattgcaaaccaaagcacggataaatgagtacgaggttatggagcagatcggtcgcagcggtgctgccattctcgtcgaccacaggacagaggaaaagtatgatgcgctggttcaggtcagtgac

SEQ ID NO: 29221 - DNA, 4160 bp, Zea Mays
ctccctctagccagatttcccgctcgaagtttcaccccaaacaatcagcttccctcgtctccccgcctcgtcgctgcctctcctcccattttcccgaccccgagctcgtcgaccccgcgtctacgcttctcggcctgctggtctcccttatcgattgggcacagccgccgccgcagccaccagatcgctttagggccttaggggggaggggagagggtgtgtctgtgcaccgccggtagctggggtaactgccccacccgccgtaggagcttcagcgagcgatggaaccgaggcggcgccagcagcagcagtcgatcctctcatttctccagaagcagccgccgtcatggagggatccctccggggagggcacgcctcccgagaagccaccgcggccccctatggggtccgtcgccgggatcatggagaggctagtgcgccctcctcctcctccgcaggccagtcacggatgggcgcgaaatcaatacgattcccaggttagacattcagaggggaaaaacttgcctgtggaaaatcaagttctctcaaatgagtgcttaggtgcattgttctcaagacctatttacggcgaacacagcagaacaatcctttccccagaaggaggtgcagatatgtctccctctcaggagccccaaaagcactcactgaggtcttccactgatgaatctacaagagcaaccaaagaagttattctggagcatccaaagaagttattctcagagtctcatactaattgcattcatgctacagccttaaatgagaactttggtgtgcaaactccttcccaggttgcctcaaagaaaatcttcccagggcttgctcatggtgctgatacacctttaactggatatggttcagaacaaactcttttgcagcattcatcaaagaagttctcattggtttctgctaatggtaaatacactagagcagcggtgacaccgtttgagcaaaattcaaataatacccgtgcagaggaactttcaaagatgcgctcagggtcttcagacatgttgtatcttaaaccaacaaatttgtctgcagaactcgagacaaatggaaccccattgaagaatcactcaaagaattcctccttgcttatggacggtaaatataacataacatctgctgcactatttccagaacttgactctagtcctctgaaaccagaaacaccagcaatgcaggcagctattcctcgcctgaagcgagttcaggaagaccaaggtgtggatgccaacaaccaatgccctcctttgtgggccatgaacaagaagatgaaatcagctcattgttctattgaaaagaaggatcatgatgaaatggctggtagcgcgcgtagcaaatttgagtggctgaattcatttgccatcagagatgcaaataaaaggcggccaaatgatccactttatgacaagagtacccttttcattccacctgatgcattgagaaaaatgtcaacatctcaaaagcaatactggaatattaagtgcaaatatatggatgttgtcctctttttcaaagtggggaaattttatgagctctatgagctagatgctgagattggccaaaaagaacttgactggaaaatgactgttagtggggtgggcaagtgcagacaggttggtatttcagaaagtggtatagatgatgctgttgataagcttatagctcgggggtataaagttggaagaatagaacaaatggaatctgcaaaccaggccaaagctagaggagtacattctgttattgaaagaaagttggttcatgtgtccacaccatcaaccgcggttgataacattggtactgatgctgttcaccttctggcactgaaagaggtgaccctagcttctagcggtttccaggtctttggatttgctttcctagactatgctgcccttaaaatttgggtgggttcagtccaagatgatgactcgtctgcagctttgggtgctttgttgatgcaggtttctcctagagaattaatctatgaaacctcaggcatctcaaaagaaactcaaaggacaataagaaaatatgcctcagcaggatctgtgaagatgcagctgacccccctctccgggatagatttctctgatgctgcacagattcgaaatttaatacattctaaagggttctttaatgcatcaacagagtcatggttatctgctttggattgcacaatgaatcaagatgtagttatttgtgcacttggtggacttattggccatttgactaggctcatgttacatgatgccctgaaaaatggggaagtcttaccataccatgtgtacaaaacatgtttaaggatggatggccagactcttgtgaacctcgagattttcagcaacaatttcaatggtggttcatctggtactttatataagcaccttaatcactgtgtcacagcatctggtaagcggatgctaagaaggtggatttgtcatccacttaaagacattgatgctatcaataaaaggcttgatgttgttgaggggtttatccaaaactgtggactaggccctacaacacttgggtatctccagaaaattcctgatcttgagagattattaggacaagttagatccactgttgggttatcatctttgcttcaactgccctttattggagaaaaaataataaagaaacggagcggaccatggtatcttggcgctttataagattgtggatattccatcattgagctatcttcctgagttaatccataagtttgaagagagaatgcaaaatgagtttccatgtggccaggtttctgatgtcaatgccaatggtgccaacgatttggctgctctgatggacgtttttatcggaaaggcttctgaatggtctttggtgatcaatgccgtcagcactattgatgtgcttaggtcctttgctgcaatgacattgtcatcatttggtgccatgtgcagaccacaagttctgctgaaagatgatgtgcctgtacttcgtatgaagggtctgtggcatccctacgcttttgcgggaaatgcaaatagtctggtaccaaatgatttaacccttggtcaggatttatctggtctcaatcgttttgcattgctgttaactggtccaaatatgggtgggaaatccacaatcatgcgtgccacctgcctggctgttgtacttgctcagcttggctgttatgtcccctgcacgtcatgtgagttgacccttgcggattccatctttacgcgcctcggtgcaacagatcggattatgactggggaaagtacttttctcgttgaatgtactgagactgcctctgttcttcagaaagcaactgtggactcgcttgtcttgcttgatgagcttggcagaggaactagcacatttgatggatatgcaatcgcatatgctgtgtttcgccacctagtggagcgagtgcgatgccgtcagctctttgctacccactaccattctcttacaaaggagttcgcctcgcaccctcacgtgagcctccagcacatggcctgcatgttcaagccaaggagcgacggcaacggccagaaggagctgaccttcctataccggctgacctcgggggcctgtccagaaagctacggcctgcaggtcgccgcaatggcagggatcccgaagtcgatagtggagaaggcgtctgtcgcgggccaggtgatgagggctaagatcgccgggaacttcaagtcgagcgaacagcgagctgagttctcgaccctccacgaggaatggctgagggcggccctggcggtgagcgcgatggacggacaaccggacgacgacgacgtcatggacacgctgttctgcatccagcaagagctgaagtctcacttcaggaaggcgagatgagcattcgccgccgccgctgatcgcgtacgtgggagtactaattatcaatgcctagattcttcagtgatgtcgtatctttacaaccatggtagatataatgtaatccgcgttttttttccatggcacgaatcctgtactttaaacaaagtatcttgtgtatatatgttctgtgctatgtcttgtttgcattgggcagcaaggaccactatccttaatcacttccaccgtttatgtgcatcatatacatttgtgtttggtttgaggaataaaatagtttattatcttttcacttt

SEQ ID NO: 29222 - DNA, 3833 bp, Zea Mays
atgccattaactcctaggcagaccaagcatttgctgaattatctttctcttgcaccttattttgctatcctgaatatgcttgattctcttttatgcagaaatcaatacgattcccaggttagacattcagaggggaaaaacttgcctgtggaaaatcaagttctctcaaatgagtgcttaggtgcattgttctcaagacctatttacggcgaacacagcagaacaatcctttccccagaaggaggtgcagatatgtctccctctcaggagccccaaaagcactcactgaggtcttccactgatgaatctacaagagcaaccaaagaagttattctggagcatccaaagaagttattctcagagtctcatactaattgcattcatgctacagccttaaatgagaactttggtgtgcaaactccttcccaggttgcctcaaagaaaatcttcccagggcttgctcatggtgctgatacacctttaactggatatggttcagaacaaactcttttgcagcattcatcaaagaagttctcattggtttctgctaatggtaaatacactagagcagcggtgacaccgtttgagcaaaattcaaataatacccgtgcagaggaactttcaaagatgcgctcagggtcttcagacatgttgtatcttaaaccaacaaatttgtctgcagaactcgagacaaatggaaccccattgaagaatcactcaaagaattcctccttgcttatggacggtaaatataacataacatctgctgcactatttccagaacttgactctagtcctctgaaaccagaaacaccagcaatgcaggcagctattcctcgcctgaagcgagttcaggaagaccaaggtgtggatgccaacaaccaatgccctcctttgtgggccatgaacaagaagatgaaatcagctcattgttctattgaaaagaaggatcatgatgaaatggctggtagcgcgcgtagcaaatttgagtggctgaattcatttgccatcagagatgcaaataaaaggcggccaaatgatccactttatgacaagagtacccttttcattccacctgatgcattgagaaaaatgtcaacatctcaaaagcaatactggaatattaagtgcaaatatatggatgttgtcctctttttcaaagtgctctatgagctagatgctgagattggccaaaaagaacttgactggaaaatgactgttagtggggtgggcaagtgcagacaggttggtatttcagaaagtggtatagatgatgctgttgataagcttatagctcgggggtataaagttggaagaatagaacaaatggaatctgcaaaccaggccaaagctagaggagtacattctgttattgaaagaaagttggttcatgtgtccacaccatcaaccgcggttgataacattggtactgatgctgttcaccttctggcactgaaagaggtgaccctagcttctagcggtttccaggtctttggatttgctttcctagactatgctgcccttaaaatttgggtgggttcagtccaagatgatgactcgtctgcagctttgggtgctttgttgatgcaggtttctcctagagaattaatctatgaaacctcaggcatctcaaaagaaactcaaaggacaataagaaaatatgcctcagcaggatctgtgaagatgcagctgacccccctctccgggatagatttctctgatgctgcacagattcgaaatttaatacattctaaagggttctttaatgcatcaacagagtcatggttatctgctttggattgcacaatgaatcaagatgtagttatttgtgcacttggtggacttattggccatttgactaggctcatgttacatgatgccctgaaaaatggggaagtcttaccataccatgtgtacaaaacatgtttaaggatggatggccagactcttgtgaacctcgagattttcagcaacaatttcaatggtggttcatctggtactttatataagcaccttaatcactgtgtcacagcatctggtaagcggatgctaagaaggtggatttgtcatccacttaaagacattgatgctatcaataaaaggcttgatgttgttgaggggtttatccaaaactgtggactaggccctacaacacttgggtatctccagaaaattcctgatcttgagagattattaggacaagttagatccactgttgggttatcatctttgcttcaactgccctttattggagaaaaaataataaagaaacggattaaaacatttataatgcttatcaatggcctccgcaatggtattgacttgctaaatgatttacaaagagcggaccatggtatcttggcgctttataagattgtggatattccatcattgagctatcttcctgagttaatccataagtttgaagagagaatgcaaaatgagtttccatgtggccaggtttctgatgtcaatgccaatggtgccaacgatttggctgctctgatggacgtttttatcggaaaggcttctgaatggtctttggtgatcaatgccgtcagcactattgatgtgcttaggtcctttgctgcaatgacattgtcatcatttggtgccatgtgcagaccacaagttctgctgaaagatgatgtgcctgtacttcgtatgaagggtctgtggcatccctacgcttttgcgggaaatgcaaatagtctggtaccaaatgatttaacccttggtcaggatttatctggtctcaatcgttttgcattgctgttaactggtccaaatatgggtgggaaatccacaatcatgcgtgccacctgcctggctgttgtacttgctcagcttggctgttatgtcccctgcacgtcatgtgagttgacccttgcggattccatctttacgcgcctcggtgcaacagatcggattatgactggggaaagtacttttctcgttgaatgtactgagactgcctctgttcttcagaaagcaactgtggactcgcttgtcttgcttgatgagcttggcagaggaactagcacatttgatggatatgcaatcgcatatgctgtgtttcgccacctagtggagcgagtgcgatgccgtcagctctttgctacccactaccattctcttacaaaggagttcgcctcgcaccctcacgtgagcctccagcacatggcctgcatgttcaagccaaggagcgacggcaacggccagaaggagctgaccttcctataccggctgacctcgggggcctgtccagaaagctacggcctgcaggtcgccgcaatggcagggatcccgaagtcgatagtggagaaggcgtctgtcgcgggccaggtgatgagggctaagatcgccgggaacttcaagtcgagcgaacagcgagctgagttctcgaccctccacgaggaatggctgagggcggccctggcggtgagcgcgatggacggacaaccggacgacgacgacgtcatggacacgctgttctgcatccagcaagagctgaagtctcacttcaggaaggcgagatgagcattcgccgccgccgctgatcgcgtacgtgggagtactaattatcaatgcctagattcttcagtgatgtcgtatctttacaaccatggtagatataatgtaatccgcgttttttttccatggcacgaatcctgtactttaaacaaagtatcttgtgtatatatgttctgtgctatgtcttgtttgcattgggcagcaaggaccactatccttaatcacttccaccgtttatgtgcatcatatacatttgtgtttggtttgaggaataaaatagtttattatcttttcacttt

SEQ ID NO: 29223 - DNA, 1973 bp, Zea Mays
caagaagaaaaaggccctgcaatcaattgtctcctcaatggagagcaaattggctgaaaatgaggcagcactttcattgatgagggataattatgagaaacggttactggagcagcaagcagcacaaaagaagcaatctatgaagttccaggagcaggaagtttctctttcaggaaaaggtaagtttactcaaccaagaaattgatgataaggagaagcacatcagggaactcagtgcatcactttcctcgaaggaagtagactaccaaaagctgaccgctttcacaaatcaaactaaaaagagccttgagcttgcaaattctagagtacaacaactcgaggaagaactaagtacaactaagaacgctctcgtttctaagatatcttctattgattcactcaatgctaaacttgaaaccttgaactctgaaaaggaagaagctgacaaaaaaataaatgagttaatacaagagtatacagacctgaaggttgcttcagagacaagggcaagccatgattccaaactactgtcagaaagagatgatctgataaaacagcttgaggaaaaactgtctgttgcattaactgattctagcaaagatcaagaaacaattgttgagttgaacaaggagttggatgctaccaaaatgatgctaaagaatgaacttaagtccatggaagctttaaaagattcaattcgatcatctgaagaggctctaaagacttcaagaagtgaggtttccaaactttccaaggagcttgaggaggcaaatgaattgaatgaggacctggtatcacaaatttctaaactccgagaggaatccaatgaaatgcaagtagatctcactaataaactaggagaggcagaatcactatctaaagctctgtcagaagatttggcttcagtaaatgaaatggttcagaagggacaagaagaactcgaagccacctctattgagctggcatctattgctgaagctcgtgacaacttgaagaaagaattgctggatgcgtacaagaatttggagtcaaccacacatgagcttgtcgaggaaagaaaaattgtgacagccttaaacaaggaacttgaagcgttagcgaaacagttgcaggttgattctgaagcaagaaaaagtctcgaatcagacctggaggaggcaacaaagtcactagatgaaatgaacaatagcgcgctgttactgtctaaagaacttgagagcactcattctaggagtgccactcttgaatctgagaaggaaatgctacgcaaggctctagctgaacaaacgaaaatcacaaccgaagctaaggaaaacacagaggatgctcagaaccttatcacaaggcttgagacagagaaggagagctttgaattgaggtgtagacatcttgaagaggaattggcgttagcaaaaggtgagatactgcgcctaaggaggcagattagcacaaacagttctcagaaaccaagagcaagaggaccaccagaggccagtgaaactctgaaggagcaacctgtgaatgattataatcagaagaccagtggagttgttgctggaactccacagcctgtgaaaaggactgtaaggagaagaaaaggtggcgcataaacatgtgtgtgactgtgtgtattggaagccctagccagagccatcgttttcccataccttcctatttagtaatttcattgttactcatttttttcaaaaaaatggcatcctttgcaaaatagcatcaatagctattcaagtgttatttacaccccccccccccctagtatttcagttagtcgatgtattttgtttacgttttttgaaaattgaggtctgtatgtgtataaatgagttattgaatggccaacacgatgaaattaaggtatctgcacctatgccgagtgctccatacaccatatcattgcttggtttggtaccagtcgttgatttgaatctcaataacattaataatacttcgtg

SEQ ID NO: 29224 - DNA, 2182 bp, Zea Mays
aagaagaaaaaggccctgcaatcaattgtctcctcagtaaatcatctacaaagctgcaatggagagcaaattggctgaaaatgaggcagcactttcattgatgagggataattatgagaaacggttactggagcagcaagcagcacaaaagaagcaatctatgaagttccaggagcaggaagtttctctttcaggtcagttggcttcagcaacaaagactttgacatcactgagtgaagaattcagaaaggagaagaaattagctgaggaacttagggatgaaatacagagattagagagtagtatcacacaagctggcattgataatgatgtgcttgaaactaaattggaagaaaagcttggtgagattaattttttgcaggaaaaggtaagtttactcaaccaagaaattgatgataaggagaagcacatcagggaactcagtgcatcactttcctcgaaggaagtagactaccaaaagctgaccgctttcacaaatcaaactaaaaagagccttgagcttgcaaattctagagtacaacaactcgaggaagaactaagtacaactaagaacgctctcgtttctaagatatcttctattgattcactcaatgctaaacttgaaaccttgaactctgaaaaggaagaagctgacaaaaaaataaatgagttaatacaagagtatacagacctgaaggttgcttcagagacaagggcaagccatgattccaaactactgtcagaaagagatgatctgataaaacagcttgaggaaaaactgtctgttgcattaactgattctagcaaagatcaagaaacaattgttgagttgaacaaggagttggatgctaccaaaatgatgctaaagaatgaacttaagtccatggaagctttaaaagattcaattcgatcatctgaagaggctctaaagacttcaagaagtgaggtttccaaactttccaaggagcttgaggaggcaaatgaattgaatgaggacctggtatcacaaatttctaaactccgagaggaatccaatgaaatgcaagtagatctcactaataaactaggagaggcagaatcactatctaaagctctgtcagaagatttggcttcagtaaatgaaatggttcagaagggacaagaagaactcgaagccacctctattgagctggcatctattgctgaagctcgtgacaacttgaagaaagaattgctggatgcgtacaagaatttggagtcaaccacacatgagcttgtcgaggaaagaaaaattgtgacagccttaaacaaggaacttgaagcgttagcgaaacagttgcaggttgattctgaagcaagaaaaagtctcgaatcagacctggaggaggcaacaaagtcactagatgaaatgaacaatagcgcgctgttactgtctaaagaacttgagagcactcattctaggagtgccactcttgaatctgagaaggaaatgctacgcaaggctctagctgaacaaacgaaaatcacaaccgaagctaaggaaaacacagaggatgctcagaaccttatcacaaggcttgagacagagaaggagagctttgaattgaggtgtagacatcttgaagaggaattggcgttagcaaaaggtgagatactgcgcctaaggaggcagattagcacaaacagttctcagaaaccaagagcaagaggaccaccagaggccagtgaaactctgaaggagcaacctgtgaatgattataatcagaagaccagtggagttgttgctggaactccacagcctgtgaaaaggactgtaaggagaagaaaaggtggcgcataaacatgtgtgtgactgtgtgtattggaagccctagccagagccatcgttttcccataccttcctatttagtaatttcattgttactcatttttttcaaaaaaatggcatcctttgcaaaatagcatcaatagctattcaagtgttatttacaccccccccccccctagtatttcagttagtcgatgtattttgtttacgttttttgaaaattgaggtctgtatgtgtataaatgagttattgaatggccaacacgatgaaattaaggtatctgcacctatgccgagtgctccatacaccatatcattgcttggtttggtaccagtcgttgatttgaatctcaataacattaataatacttcgtg

SEQ ID NO: 29225 - DNA, 3685 bp, Zea Mays
ctcccaaaagcaaagcacgttggtaatctaaccaatcccctccgcttccttccttccttccttccaccaccaccagcaccaccactccaccagcgttccacccgtcctctccccccctgcccgcccctttccctccctccccaaatcccttgccccgtcttgatcgggcggcgggggggcggccaggctggcaagtcgcgcggcgatgatctcctcgccctctccgtcgccgtcgtcgtcccggacgtccaagggtggctccgcgacgccgccgagtcgggccagcaagtggcgcagcggcgcggtgcgcggggtgtacgggcggcgcctgctggacgcgctccgcgccacgggcggtggccagccgcgcgccgtgaaggcggcggccgactcggcgctggcgctgaccgcgcgcggccagacgcggtggagccgcgccatcctgctcgccggcgcggtctgcagccgccgccgcgtcctcgtcaaggcgggcggcaaggtccggcggcggcgccgcccgcctccgccggtgcaggccagagacaaggcggcggcggcggcggcgctaaagggtaaggagggtaaggtgcaggagcggctccgcgtgctgggccgcctcgtcccgggctgccggaagctacccacgcccgcgctgctggaggaggccgccgactacgtggccgcgctgcagatgcaggtcagcgccatgcgcgcgctcgccgacgcgttggcggccgcgcagctgtcgtcgccggcggacgcggaggcggaggcggaggcggagaggtgaggcgtgaccacgtgggtgggtgggattgactgcttgattggcctagccgcctggccccatgacatgattgatcaccagctccagcttccagctcgctcccccacctgccggattccgatggggggatcgggggaggggaagaaaacaataatcatttgcggtgcgttcgtgggttgctcttgtcgggagagattggtggtgggactagcagagtgatgaccatttcgttctatgcagcctgaattgctgctgctcgtgatttgttgtaaattccgtacaccttactcctactaccccagctgcctgctacttgtgcataaagcaaatgctgctcctctcatcgcctgttctgctgcgctgtggtactttactcttgtgtcagtacaaaagatttggtggataattgtgtctggcatgccatgattcttgtaccagggaaatgaatgatccgaattagtgttgtgctgtgactgagccgagtccccccctttcatcggaaatgctttggccctgtgccttctatggctctatcatcatctatacttttgtggttgggacaaaaaataaagaatttgaatcctgtacgaaaaattccccgcgtagtggtttggaccacaacgtgaaggtcctgtttgattagcgcccgagtggcatgaacgagctccaacctgtgatgcttcaagttggtttattagttttttttatcaaagttggtttattagttgggtcgtaacacaactggcattttcatttccaaacaaacaaaaaaaaaacgctgggcttgacaacaaaaggcccaacattaggaaccaggcccggccaacccccgcacgtgactgccgtccgccgttccggtcctcgcccggtcgcccctccccgcgtcgtgctcgtgtcgtgtcggccgtcggtggttcctggaactggaaggaaggagacccggcccctcgcctcgtctgacctctctcgtcccctccgccatctcatttcgcttccctttacctccctccccggtggatgtggatccataccgtgtcctagccctacatcgcagcgcgaagcaaggagccatggcggcggcccagcatcatcagttgtggtggccggggcggatggcagcggcgttcgggccctccttcctctgcctcgtctgcctcatctacttcatccagggtttcaggtctttcgtctggacagctgtctcctaccaaatgaaggacgtgatgaagctatcgccctctacatcgcagtttctggtctcccttgcatatttcccttggagcatcaaacctatatatgggatcttgtcagattgcgttccaattaaacagaggaagcgtataccctatttgatcatttctagttgcctttctctacttccgtggcttatcctaggactatcacaagctttaaggagctcagccaatatgctcactgccttgctcatagtacagaatctgggatctgcgatggcggatgttgttatagatgcaatggttgcggaagcagttcgatcagccgggtaggcttcttgatgtttcctgtgtccctatttggcatgctgctatggagtattgtgaaaacctactaattttatttccaggccggagtttgctggcgatctacagtcattatcttggtcatcgatggctgtaggtgggatttttgggagtttactgggaggatatgcattatccaatctcccaatacatgcaatatatattgttttctcagtcctcccattcttccaattagtttcctgcatgtttgttgaggattctccaaaagggttccacaacgccagtgatgaacataagtatgtagacaaccagagttctgttactgttttttctggaaaaggctctagtgagggcactagaaggcgaaagggaacttctaaaagtaacaacagaagtccacaggcaaagcgaactgagtctaatgaaaaacacaacgggtcaattaattcgttgccatgtttgtctctgaggtcagccttcttcagtctctgcacagcttttaagcagccaaatattctgcgggactgcacgtgtgattgggtggttcagtctgatgcttggcacctacacctacaaccgctattttaaacagaagaagctcaggaatattcttgtgtttgctcatgttggtcttgccgtaattaccctactggacattgttttggtgtcacggttacatgttcagtatggaattgccgataagtacatggtgctgtggggttccgcgttggctgatgcaatcaaccagttcaagatgatgccgttcctgatcctgtcaggacagctttgcccacctggaatcgagggcacactgtttgctctcttcatgtcaatcaacaaccttggttcaacactaggctcattcctgggggctgctatggcatcagctttgaacctctccacagcacagtttgacaatcttgctctgggtttgggtgtacagatgatttgtactctcttgccgattgggttcctatctctgattccaaaggaagtcacagggctaacatcataggttgaggtacgggcctgatcatacttgttctattcctgccggaaggtaatggtctgtgctcgaacctcaaatttctgactcacgtaaagcacgcatacttacagctgtgtaccagagagagaggaatatacacatcataggaaggaaattcaagatagttggaaaatagacagttgtgttgacagtatatgtacaagctctgtaccaggacgagagaaaaatagagtgcaatagatctgtaggcaaagattaaaatcacttgatgttgacagatgttgatgttacttgacatgtgtagaaatgagaacaaacatgaaagtgacgttgctaatgaatgaatctgtgcatgtcttttgttttcat

SEQ ID NO: 29226 - DNA, 2008 bp, Zea Mays
tggtttattagttttttttatcaaagttggtttattagttgggtcgtaacacaactggcattttcatttccaaacaaacaaaaaaaaaacgctgggcttgacaacaaaaggcccaacattaggaaccaggcccggccaacccccgcacgtgactgccgtccgccgttccggtcctcgcccggtcgcccctccccgcgtcgtgctcgtgtcgtgtcggccgtcggtggttcctggaactggaaggaaggagacccggcccctcgcctcgtctgacctctctcgtcccctccgccatctcatttcgcttccctttacctccctccccggtggatgtggatccataccgtgtcctagccctacatcgcagcgcgaagcaaggagccatggcggcggcccagcatcatcagttgtggtggccggggcggatggcagcggcgttcgggccctccttcctctgcctcgtctgcctcatctacttcatccaggatcttgtcagattgcgttccaattaaacagaggaagcgtataccctatttgatcatttctagttgcctttctctacttccgtggcttatcctaggactatcacaagctttaaggagctcagccaatatgctcactgccttgctcatagtacagaatctgggatctgcgatggcggatgttgttatagatgcaatggttgcggaagcagttcgatcagccgggccggagtttgctggcgatctacagtcattatcttggtcatcgatggctgtaggtgggatttttgggagtttactgggaggatatgcattatccaatctcccaatacatgcaatatatattgttttctcagtcctcccattcttccaattagtttcctgcatgtttgttgaggattctccaaaagggttccacaacgccagtgatgaacataagtatgtagacaaccagagttctgttactgttttttctggaaaaggctctagtgagggcactagaaggcgaaagggaacttctaaaagtaacaacagaagtccacaggcaaagcgaactgagtctaatgaaaaacacaacgggtcaattaattcgttgccatgtttgtctctgaggtcagccttcttcagtctctgcacagcttttaagcagccaaatattctgcggcctatggcatggtttttcttttcaaatgttacaattccaaatatctccacagttatgttctattatcaaacagaggacctaaatttggaggcatcctttctagggactgcacgtgtgattgggtggttcagtctgatgcttggcacctacacctacaaccgctattttaaacagaagaagctcaggaatattcttgtgtttgctcatgttggtcttgccgtaattaccctactggacattgttttggtgtcacggttacatgttcagtatggaattgccgataagtacatggtgctgtggggttccgcgttggctgatgcaatcaaccagttcaagatgatgccgttcctgatcctgtcaggacagctttgcccacctggaatcgagggcacactgtttgctctcttcatgtcaatcaacaaccttggttcaacactaggctcattcctgggggctgctatggcatcagctttgaacctctccacagcacagtttgacaatcttgctctgggtttgggtgtacagatgatttgtactctcttgccgattgggttcctatctctgattccaaaggaagtcacagggctaacatcataggttgagctgtgtaccagagagagaggaatatacacatcataggaaggaaattcaagatagttggaaaatagacagttgtgttgacagtatatgtacaagctctgtaccaggacgagagaaaaatagagtgcaatagatctgtaggcaaagattaaaatcacttgatgttgacagatgttgatgttacttgacatgtgtagaaatgagaacaaacatgaaagtgacgttgctaatgaatgaatctgtgcatgtcttttgttttcat

SEQ ID NO: 29227 - DNA, 2800 bp, Zea Mays
aacaaacaaaaaaaaaacgctgggcttgacaacaaaaggcccaacattaggaaccaggcccggccaacccccgcacgtgactgccgtccgccgttccggtcctcgcccggtcgcccctccccgcgtcgtgctcgtgtcgtgtcggccgtcggtggttcctggaactggaaggaaggagacccggcccctcgcctcgtctgacctctctcgtcccctccgccatctcatttcgcttccctttacctccctccccggtggatgtggatccataccgtgtcctagccctacatcgcagcgcgaagcaaggagccatggcggcggcccagcatcatcagttgtggtggccggggcggatggcagcggcgttcgggccctccttcctctgcctcgtctgcctcatctacttcatccagggtttcaggtctttcgtctggacagctgtctcctaccaaatgaaggacgtgatgaagctatcgccctctacatcgcagtttctggtctcccttgcatatttcccttggagcatcaaacctatatatgggatcttgtcagattgcgttccaattaaacagaggaagcgtataccctatttgatcatttctagttgcctttctctacttccgtggcttatcctaggactatcacaagctttaaggagctcagccaatatgctcactgccttgctcatagtacagaatctgggatctgcgatggcggatgttgttatagatgcaatggttgcggaagcagttcgatcagccgggtaggcttcttgatgtttcctgtgtccctatttggcatgctgctatggagtattgtgaaaacctactaattttatttccaggccggagtttgctggcgatctacagtcattatcttggtcatcgatggctgtaggtgggatttttgggagtttactgggaggatatgcattatccaatctcccaatacatgcaatatatattgttttctcagtcctcccattcttccaattagtttcctgcatgtttgttgaggattctccaaaagggttccacaacgccagtgatgaacataagtatgtagacaaccagagttctgttactgttttttctggaaaaggctctagtgagggcactagaaggcgaaagggaacttctaaaagtaacaacagaagtccacaggcaaagcgaactgagtctaatgaaaaacacaacgggtcaattaattcgttgccatgtttgtctctgaggtcagccttcttcagtctctgcacagcttttaagcagccaaatattctgcggcctatggcatggtttttcttttcaaatgttacaattccaaatatctccacagttatgttctattatcaaacagaggacctaaatttggaggcatcctttctagggactgcacgtgtgattgggtggttcagtctgatgcttggcacctacacctacaaccgctattttaaacagaagaagctcaggaatattcttgtgtaagttattcattgaagtttctatgtctgatagttatccttttgtcatcgtgtcccatatagattaacaggacaaagtagctttactgtaagggtattatttgtcttgacaaatatatggttaatgtacttgagaataacttgtcaccctattcttttttgagctaagtttcaacacctttgtcctgcaccagcctggttcctacatatttgcataatacaggttttgtcccacctgtacatgttttgtcttcttttcctgtaactccctttttcttctttccttctataataaaataaattgcacagtaggggcctcccctactgtatttcccctaaaacaaattgctcttgtgcattgaactgaatgtgtgctggattacatcctctcttccattatatgcattaggctatgcttgatgcttctataagccacagctggtcgcatttagttgtactattaagccccttagcccaactttgctattttggtaaacaaataatgtctgtagtttttgttattacttattagttactcttgttccaagacaccaactttaaatttttagaagtcattgccacagtaaaaatttataaatatctaatcaaagctgttatgtttgctacttcaaacatgtgctgttgatttttccaggtttgctcatgttggtcttgccgtaattaccctactggacattgttttggtgtcacggttacatgttcagtatggaattgccgataagtacatggtgctgtggggttccgcgttggctgatgcaatcaaccagttcaagatgatgccgttcctgatcctgtcaggacagctttgcccacctggaatcgagggcacactgtttgctctcttcatgtcaatcaacaaccttggttcaacactaggctcattcctgggggctgctatggcatcagctttgaacctctccacagcacagtttgacaatcttgctctgggtttgggtgtacagatgatttgtactctcttgccgattgggttcctatctctgattccaaaggaagtcacagggctaacatcataggttgagctgtgtaccagagagagaggaatatacacatcataggaaggaaattcaagatagttggaaaatagacagttgtgttgacagtatatgtacaagctctgtaccaggacgagagaaaaatagagtgcaatagatctgtaggcaaagattaaaatcacttgatgttgacagatgttgatgttacttgacatgtgtagaaatgagaacaaacatgaaagtgacgttgctaatgaatgaatctgtgcatgtcttttgttttcat

SEQ ID NO: 29228 - DNA, 2225 bp, Zea Mays
aacaaacaaaaaaaaaacgctgggcttgacaacaaaaggcccaacattaggaaccaggcccggccaacccccgcacgtgactgccgtccgccgttccggtcctcgcccggtcgcccctccccgcgtcgtgctcgtgtcgtgtcggccgtcggtggttcctggaactggaaggaaggagacccggcccctcgcctcgtctgacctctctcgtcccctccgccatctcatttcgcttccctttacctccctccccggtggatgtggatccataccgtgtcctagccctacatcgcagcgcgaagcaaggagccatggcggcggcccagcatcatcagttgtggtggccggggcggatggcagcggcgttcgggccctccttcctctgcctcgtctgcctcatctacttcatccaggccacggaaaatacattccttagcatacctagttacctgcaagagctcctcgtttcatcagtcaatcaacagaccaagagcctagcctttctgcaaatctaaatgagccccaacctgttcacacgcgtgctaaatcaatcacgttccttcgaacattctagggtttcaggtctttcgtctggacagctgtctcctaccaaatgaaggacgtgatgaagctatcgccctctacatcgcagtttctggtctcccttgcatatttcccttggagcatcaaacctatatatgggatcttgtcagattgcgttccaattaaacagaggaagcgtataccctatttgatcatttctagttgcctttctctacttccgtggcttatcctaggactatcacaagctttaaggagctcagccaatatgctcactgccttgctcatagtacagaatctgggatctgcgatggcggatgttgttatagatgcaatggttgcggaagcagttcgatcagccgggccggagtttgctggcgatctacagtcattatcttggtcatcgatggctgtaggtgggatttttgggagtttactgggaggatatgcattatccaatctcccaatacatgcaatatatattgttttctcagtcctcccattcttccaattagtttcctgcatgtttgttgaggattctccaaaagggttccacaacgccagtgatgaacataagtatgtagacaaccagagttctgttactgttttttctggaaaaggctctagtgagggcactagaaggcgaaagggaacttctaaaagtaacaacagaagtccacaggcaaagcgaactgagtctaatgaaaaacacaacgggtcaattaattcgttgccatgtttgtctctgaggtcagccttcttcagtctctgcacagcttttaagcagccaaatattctgcggcctatggcatggtttttcttttcaaatgttacaattccaaatatctccacagttatgttctattatcaaacagaggacctaaatttggaggcatcctttctagggactgcacgtgtgattgggtggttcagtctgatgcttggcacctacacctacaaccgctattttaaacagaagaagctcaggaatattcttgtgtttgctcatgttggtcttgccgtaattaccctactggacattgttttggtgtcacggttacatgttcagtatggaattgccgataagtacatggtgctgtggggttccgcgttggctgatgcaatcaaccagttcaagatgatgccgttcctgatcctgtcaggacagctttgcccacctggaatcgagggcacactgtttgctctcttcatgtcaatcaacaaccttggttcaacactaggctcattcctgggggctgctatggcatcagctttgaacctctccacagcacagtttgacaatcttgctctgggtttgggtgtacagatgatttgtactctcttgccgattgggttcctatctctgattccaaaggaagtcacagggctaacatcataggttgagctgtgtaccagagagagaggaatatacacatcataggaaggaaattcaagatagttggaaaatagacagttgtgttgacagtatatgtacaagctctgtaccaggacgagagaaaaatagagtgcaatagatctgtaggcaaagattaaaatcacttgatgttgacagatgttgatgttacttgacatgtgtagaaatgagaacaaacatgaaagtgacgttgctaatgaatgaatctgtgcatgtcttttgttttcat

SEQ ID NO: 29229 - DNA, 2437 bp, Zea Mays
aacaaacaaaaaaaaaacgctgggcttgacaacaaaaggcccaacattaggaaccaggcccggccaacccccgcacgtgactgccgtccgccgttccggtcctcgcccggtcgcccctccccgcgtcgtgctcgtgtcgtgtcggccgtcggtggttcctggaactggaaggaaggagacccggcccctcgcctcgtctgacctctctcgtcccctccgccatctcatttcgcttccctttacctccctccccggtggatgtggatccataccgtgtcctagccctacatcgcagcgcgaagcaaggagccatggcggcggcccagcatcatcagttgtggtggccggggcggatggcagcggcgttcgggccctccttcctctgcctcgtctgcctcatctacttcatccaggtctctctctctctctcacattttccctagtctacgatcctaggcttctattcccttaatagcctgtataattacgattagtaattgtccgcatgttgattgtttagatctgaaacttatcgcatcccacaccacgccgtttgggagaaatgacatatcagatagtcatacgcagaaatgccttactagcttctaatatagttctgatacaggccacggaaaatacattccttagcatacctagttacctgcaagagctcctcgtttcatcagtcaatcaacagaccaagagcctagcctttctgcaaatctaaatgagccccaacctgttcacacgcgtgctaaatcaatcacgttccttcgaacattctagggtttcaggtctttcgtctggacagctgtctcctaccaaatgaaggacgtgatgaagctatcgccctctacatcgcagtttctggtctcccttgcatatttcccttggagcatcaaacctatatatgggatcttgtcagattgcgttccaattaaacagaggaagcgtataccctatttgatcatttctagttgcctttctctacttccgtggcttatcctaggactatcacaagctttaaggagctcagccaatatgctcactgccttgctcatagtacagaatctgggatctgcgatggcggatgttgttatagatgcaatggttgcggaagcagttcgatcagccgggccggagtttgctggcgatctacagtcattatcttggtcatcgatggctgtaggtgggatttttgggagtttactgggaggatatgcattatccaatctcccaatacatgcaatatatattgttttctcagtcctcccattcttccaattagtttcctgcatgtttgttgaggattctccaaaagggttccacaacgccagtgatgaacataagtatgtagacaaccagagttctgttactgttttttctggaaaaggctctagtgagggcactagaaggcgaaagggaacttctaaaagtaacaacagaagtccacaggcaaagcgaactgagtctaatgaaaaacacaacgggtcaattaattcgttgccatgtttgtctctgaggtcagccttcttcagtctctgcacagcttttaagcagccaaatattctgcggcctatggcatggtttttcttttcaaatgttacaattccaaatatctccacagttatgttctattatcaaacagaggacctaaatttggaggcatcctttctagggactgcacgtgtgattgggtggttcagtctgatgcttggcacctacacctacaaccgctattttaaacagaagaagctcaggaatattcttgtgtttgctcatgttggtcttgccgtaattaccctactggacattgttttggtgtcacggttacatgttcagtatggaattgccgataagtacatggtgctgtggggttccgcgttggctgatgcaatcaaccagttcaagatgatgccgttcctgatcctgtcaggacagctttgcccacctggaatcgagggcacactgtttgctctcttcatgtcaatcaacaaccttggttcaacactaggctcattcctgggggctgctatggcatcagctttgaacctctccacagcacagtttgacaatcttgctctgggtttgggtgtacagatgatttgtactctcttgccgattgggttcctatctctgattccaaaggaagtcacagggctaacatcataggttgagctgtgtaccagagagagaggaatatacacatcataggaaggaaattcaagatagttggaaaatagacagttgtgttgacagtatatgtacaagctctgtaccaggacgagagaaaaatagagtgcaatagatctgtaggcaaagattaaaatcacttgatgttgacagatgttgatgttacttgacatgtgtagaaatgagaacaaacatgaaagtgacgttgctaatgaatgaatctgtgcatgtcttttgttttcat

SEQ ID NO: 29230 - DNA, 2414 bp, Zea Mays
aacaaacaaaaaaaaaacgctgggcttgacaacaaaaggcccaacattaggaaccaggcccggccaacccccgcacgtgactgccgtccgccgttccggtcctcgcccggtcgcccctccccgcgtcgtgctcgtgtcgtgtcggccgtcggtggttcctggaactggaaggaaggagacccggcccctcgcctcgtctgacctctctcgtcccctccgccatctcatttcgcttccctttacctccctccccggtggatgtggatccataccgtgtcctagccctacatcgcagcgcgaagcaaggagccatggcggcggcccagcatcatcagttgtggtggccggggcggatggcagcggcgttcgggccctccttcctctgcctcgtctgcctcatctacttcatccaggtctctctctctctctcacattttccctagtctacgatcctaggcttctattcccttaatagcctgtataattacgattagtaattgtccgcatgttgattgtttagatctgaaacttatcgcatcccacaccacgccgtttgggagaaatgacatatcagatagtcatacgcagaaatgccttactagcttctaatatagttctgatacaggccacggaaaatacattccttagcatacctagttacctgcaagagctcctcgtttcatcagtcaatcaacagaccaagagcctagcctttctgcaaatctaaatgagccccaacctgttcacacgcgtgctaaatcaatcacgttccttcgaacattctagggtttcaggtctttcgtctggacagctgtctcctaccaaatgaaggacgtgatgaagctatcgccctctacatcgcagtttctggtctcccttgcatatttcccttggagcatcaaacctatatatgggatcttgtcagattgcgttccaattaaacagaggaagcgtataccctatttgatcatttctagttgcctttctctacttccgtggcttatcctaggactatcacaagctttaaggagctcagccaatatgctcactgccttgctcatagtacagaatctgggatctgcgatggcggatgttgttatagatgcaatggttgcggaagcagttcgatcagccgggtaggcttcttgatgtttcctgtgtccctatttggcatgctgctatggagtattgtgaaaacctactaattttatttccaggccggagtttgctggcgatctacagtcattatcttggtcatcgatggctgtaggtgggatttttgggagtttactgggaggatatgcattatccaatctcccaatacatgcaatatatattgttttctcagtcctcccattcttccaattagtttcctgcatgtttgttgaggattctccaaaagggttccacaacgccagtgatgaacataagtatgtagacaaccagagttctgttactgttttttctggaaaaggctctagtgagggcactagaaggcgaaagggaacttctaaaagtaacaacagaagtccacaggcaaagcgaactgagtctaatgaaaaacacaacgggtcaattaattcgttgccatgtttgtctctgaggtcagccttcttcagtctctgcacagcttttaagcagccaaatattctgcgggactgcacgtgtgattgggtggttcagtctgatgcttggcacctacacctacaaccgctattttaaacagaagaagctcaggaatattcttgtgtttgctcatgttggtcttgccgtaattaccctactggacattgttttggtgtcacggttacatgttcagtatggaattgccgataagtacatggtgctgtggggttccgcgttggctgatgcaatcaaccagttcaagatgatgccgttcctgatcctgtcaggacagctttgcccacctggaatcgagggcacactgtttgctctcttcatgtcaatcaacaaccttggttcaacactaggctcattcctgggggctgctatggcatcagctttgaacctctccacagcacagtttgacaatcttgctctgggtttgggtgtacagatgatttgtactctcttgccgattgggttcctatctctgattccaaaggaagtcacagggctaacatcataggttgagctgtgtaccagagagagaggaatatacacatcataggaaggaaattcaagatagttggaaaatagacagttgtgttgacagtatatgtacaagctctgtaccaggacgagagaaaaatagagtgcaatagatctgtaggcaaagattaaaatcacttgatgttgacagatgttgatgttacttgacatgtgtagaaatgagaacaaacatgaaagtgacgttgctaatgaatgaatctgtgcatgtcttttgttttcat

SEQ ID NO: 29231 - DNA, 2770 bp, Zea Mays
aacaaacaaaaaaaaaacgctgggcttgacaacaaaaggcccaacattaggaaccaggcccggccaacccccgcacgtgactgccgtccgccgttccggtcctcgcccggtcgcccctccccgcgtcgtgctcgtgtcgtgtcggccgtcggtggttcctggaactggaaggaaggagacccggcccctcgcctcgtctgacctctctcgtcccctccgccatctcatttcgcttccctttacctccctccccggtggatgtggatccataccgtgtcctagccctacatcgcagcgcgaagcaaggagccatggcggcggcccagcatcatcagttgtggtggccggggcggatggcagcggcgttcgggccctccttcctctgcctcgtctgcctcatctacttcatccaggatcttgtcagattgcgttccaattaaacagaggaagcgtataccctatttgatcatttctagttgcctttctctacttccgtggcttatcctaggactatcacaagctttaaggagctcagccaatatgctcactgccttgctcatagtacagaatctgggatctgcgatggcggatgttgttatagatgcaatggttgcggaagcagttcgatcagccgggtaggcttcttgatgtttcctgtgtccctatttggcatgctgctatggagtattgtgaaaacctactaattttatttccaggccggagtttgctggcgatctacagtcattatcttggtcatcgatggctgtaggtgggatttttgggagtttactgggaggatatgcattatccaatctcccaatacatgcaatatatattgttttctcagtcctcccattcttccaattagtttcctgcatgtttgttgaggattctccaaaagggttccacaacgccagtgatgaacataagtatgtagacaaccagagttctgttactgttttttctggaaaaggctctagtgagggcactagaaggcgaaagggaacttctaaaagtaacaacagaagtccacaggcaaagcgaactgagtctaatgaaaaacacaacgggtcaattaattcgttgccatgtttgtctctgaggtcagccttcttcagtctctgcacagcttttaagcagccaaatattctgcggcctatggcatggtttttcttttcaaatgttacaattccaaatatctccacagttatgttctattatcaaacagaggacctaaatttggaggcatcctttctagggactgcacgtgtgattgggtggttcagtctgatgcttggcacctacacctacaaccgctattttaaacagaagaagctcaggaatattcttgtgtaagttattcattgaagtttctatgtctgatagttatccttttgtcatcgtgtcccatatagattaacaggacaaagtagctttactgtaagggtattatttgtcttgacaaatatatggttaatgtacttgagaataacttgtcaccctattcttttttgagctaagtttcaacacctttgtcctgcaccagcctggttcctacatatttgcataatacaggttttgtcccacctgtacatgttttgtcttcttttcctgtaactccctttttcttctttccttctataataaaataaattgcacagtaggggcctcccctactgtatttcccctaaaacaaattgctcttgtgcattgaactgaatgtgtgctggattacatcctctcttccattatatgcattaggctatgcttgatgcttctataagccacagctggtcgcatttagttgtactattaagccccttagcccaactttgctattttggtaaacaaataatgtctgtagtttttgttattacttattagttactcttgttccaagacaccaactttaaatttttagaagtcattgccacagtaaaaatttataaatatctaatcaaagctgttatgtttgctacttcaaacatgtgctgttgatttttccaggtttgctcatgttggtcttgccgtaattaccctactggacattgttttggtgtcacggttacatgttcagtatggaattgccgataagtacatggtgctgtggggttccgcgttggctgatgcaatcaaccagttcaagatgatgccgttcctgatcctgtcaggacagctttgcccacctggaatcgagggcacactgtttgctctcttcatgtcaatcaacaaccttggttcaacactaggctcattcctgggggctgctatggcatcagctttgaacctctccacagcacagtttgacaatcttgctctgggtttgggtgtacagatgatttgtactctcttgccgattgggttcctatctctgattccaaaggaagtcacagggctaacatcataggttgaggtacgggcctgatcatacttgttctattcctgccggaaggtaatggtctgtgctcgaacctcaaatttctgactcacgtaaagcacgcatacttacagctgtgtaccagagagagaggaatatacacatcataggaaggaaattcaagatagttggaaaatagacagttgtgttgacagtatatgtacaagctctgtaccaggacgagagaaaaatagagtgcaatagatctgtaggcaaagattaaaatcacttgatgttgacagatgttgatgttacttgacatgtgtagaaatgagaacaaacatgaaagtgacgttgctaatgaatgaatctgtgcatgtcttttgttttcat

SEQ ID NO: 29232 - DNA, 1259 bp, Zea Mays
gcaaacccgaaacttaataggcacccgacccgatggatgcgagtatgggtgaagattttgaccaagggtgcacccacacttgatctagagttttgcgggagagatccaagctacagaaggatcgcagtgtcgtgcttcgtgcaggccgcgtatctgctggagctggacaggcaggagggcagagccggtgaagccgcgctcgctcccaactggtggaagcccttcaagtacaagctggtgcgcccgctcatcgactccagagacgggtccatctacggggcgcttctagaatgggaccagctcgccgccctcgctgacctgatagtggccaagcctcagggcgctcccaaggtggtcctcgcgctcaggggcaccatgctgaggcagctgaccgtggtgagggacctggaagacgaccttcggctgtttgccctggagagcctgagggggtccgtcaggttcacaggcgcgctggaggtgctcaagtcggcgatccacaggcacggcagcgccaacgtgtgcgttgccggccactccctgggcgccggctttgcgctgcaggtcggcagggccttggccaaggatggaaccttcgtggagtgccatctgttcaacccaccgtcggtgtcactcggcacgggcctcaggaaaatccaggagaaggccagcagtgtcctcaagcggtatatcagtagaagcggcggcggtggcagcagctcctcgtcaaatgtttccccaggaccaggagaggagctacaagccgccgccgctcgagatggagttggagaagaagtgatgagcagggaggtcaaaagatgggtgccaaacctgtacgtgaacagctgcgactacatctgctgcttctacgctgaccgtagcggcgtcgctaccgtcaccgaggagaagcgttccggaatgcattccaagctgtacgtgatcgccaaaggaccgagcaagttcctggaggctcacgggctgcagcagtggtggtccgatgattctgagctccacttggccgtgcacgacagcaaactcatgtataggcaccttaagtccctctatgtcgaacagtagtagagaaggcattagtacttgtttctcagaatgcctagttcttcttctctagtacagccagacaagaaaacatgtaaaccgtcagctgattaagagctccaactcttgcaactcgtctaagcatatcttcttctcttctcgcgtacgcatagcatttgttttctttattatgtggacgttaaact

SEQ ID NO: 29233 - DNA, 1417 bp, Zea Mays
attttgaccaagggtgcacccacacttgatctagagttttgcggttcccgtgccctcacagtcacaggggacgcggctcgcctttccttccccgccaatccatccgctcttctcagcggcgagaagaagagatggggagcaacgccgccggcaagcctcctcctcctcctgctgctgctgtgtcgtgggagttccacgcgacggggcctcgcaacttgaccagccccggctggagggacctcatccgctccagctggagagatccaagctacagaaggatcgcagtgtcgtgcttcgtgcaggccgcgtatctgctggagctggacaggcaggagggcagagccggtgaagccgcgctcgctcccaactggtggaagcccttcaagtacaagctggtgcgcccgctcatcgactccagagacgggtccatctacggggcgcttctagaatgggaccagctcgccgccctcgctgacctgatagtggccaagcctcagggcgctcccaaggtggtcctcgcgctcaggggcaccatgctgaggcagctgaccgtggtgagggacctggaagacgaccttcggctgtttgccctggagagcctgagggggtccgtcaggttcacaggcgcgctggaggtgctcaagtcggcgatccacaggcacggcagcgccaacgtgtgcgttgccggccactccctgggcgccggctttgcgctgcaggtcggcagggccttggccaaggatggaaccttcgtggagtgccatctgttcaacccaccgtcggtgtcactcggcacgggcctcaggaaaatccaggagaaggccagcagtgtcctcaagcggtatatcagtagaagcggcggcggtggcagcagctcctcgtcaaatgtttccccaggaccaggagaggagctacaagccgccgccgctcgagatggagttggagaagaagtgatgagcagggaggtcaaaagatgggtgccaaacctgtacgtgaacagctgcgactacatctgctgcttctacgctgaccgtagcggcgtcgctaccgtcaccgaggagaagcgttccggaatgcattccaagctgtacgtgatcgccaaaggaccgagcaagttcctggaggctcacgggctgcagcagtggtggtccgatgattctgagctccacttggccgtgcacgacagcaaactcatgtataggcaccttaagtccctctatgtcgaacagtagtagagaaggcattagtacttgtttctcagaatgcctagttcttcttctctagtacagccagacaagaaaacatgtaaaccgtcagctgattaagagctccaactcttgcaactcgtctaagcatatcttcttctcttctcgcgtacgcatagcatttgttttctttattatgtggacgttaaact

SEQ ID NO: 29234 - DNA, 5156 bp, Zea Mays
ttgattttctactctggtgccacgacttatttaagagtaaaaaagagctaccaaacaatgaacgagggattacgaattatgtatgacaaaatgaaaggcccgacataattcaaagcaagagaattgacgtatcctgcatccaacggtcaaaacaagcaagacaacacttcttgacaaatttgatgcagcatgttcgttcagctccagcaaaccctggttacaacttcatagatcagccattaaagcacaatacatggctacaattttcttccagatcaaattccttcatttttcacaaggcggagtcatctccgtctggtttatttacgactaagagcaaggtctttgttctccttgttataaacatgaataattgcgaatgcagaacagacatccattacgatgttgattgcacgatttcttcgacacatggacaccatgtactactgtatgtatgtacaatgacaatacaatgtaagctaaaaaaaacatgagttccacttccacttccagctgccgcccaaatgataacagtaagggctagtttgggagcccgaaaatcgtagtggattggagggactaaaatcttcttcttaatcaaatttgaataataagaggattttagcccctcaactctcctccgattttcgggctcccaaactagcctaaattgtagtgaggatagccttgtaagctaaaaaaaatcaaagaacatgagttccagctgccgccccaatgataacagcaattgtagcgaggatagcctgttattccaaataattgtcatcagaatcgctgaagttttaaaatttcccttaacaaatgactcgtcgataggtgatgatacggagttcatgagggcatctatataattgcgatagctttcggcaataccaagagaatagaaaagcattcctttctttcaaatgcatgaccccctccctttttgtcttatatagatgtgctttagttatacaagttagtataagaaaaaatggacactatggtttattaaatttagatttgatgttcgatgaataacatgaccgtttagactaatgttgcttgctggtatacaaggtatagtctaaatgaatgtaaggtggacttcgaattagacaaagtgatgatccgaatgatcgataccttaagcaagatattagaagtcatattaaagacatgcaaaatatgctaagagtctaagacaccaaaaagtagaagctcggacgcaaatgcataaacaaaaagtgaaatcaccaaagttgagacaaagagatgaataatttgtaattctcttgattttggatctgcttaaattgacatggcttcaattttaagttagttctaagttgtagagatttttattagctttccaaagtattcaacatcatcaaaatcgaaattcgaaactaaaacttgtacccaaaatatagaagcatgtagaactgaaaatcggaattcgaagttataatttatcatcttatatgtgataaagtccaaattgtagatgtcttatccctaatatcacctacaagtgatgttcacaattatgtaacattaccctcaaaatggtattttgatcttaaatgtctaagtgcatgaatcctacaagtcttccatacatgtatgcatacttttaggggaaatcttcaaacaagttagaaactttaagagttgagactaacatctgcttaagcttattatgtatgtagtaatgccattgaaagaaaaatagaatcttaggaactaagcatagatggtcacttaaaagtagtatttcatatcctttatgtacgacatcatacaaacccataccaagtccaaatttaatttctacatgtaatagttgtaaacgatgtcatatggtattcctaaaccgatgttattatgtcgtcattcaattggtatattttgtgtgctttctctattcattatatagatcaaactatctttgtgcccaaaatcccattatacatccaccatatgtatgcatatatttagggagagtgtatctatgtaatgtaagagttacatttgtgatcaactccttttcatatataaaggataacaaaaacttaaccctcacttgtctactatcatcttctttttcggtatttgattctaaaagggaagaatttgaagaaccaaaagcatgcctaacctataaataaataccaaaatcataaattcaaaaattttaagcttacaaggggtattgaatataggagaattatatttttggagatggtccgagaaagggaggaagtggattttagagtcaagggaggctaaaatccataatcccacatacatggacattggcaagggcaagataaatattcaaacttccttttaaatgattttctttaacatcaaatggtcttactcttgcatcctagcaagtagatagtatgtttttttatctattatgtgcttactttggtcgtgttagcatcaaacactgaaaaggggatattgtaaataatatggaccctatgtgccattaagtttggatcttattatttcataaacagcgtgaccatttaactgatgttgtttgctagtaaacaaggtatagttaaaacgaacacaaaataaacttggagttatacaaagtaatggtccaaattatcaacaccataatcaagacattagaagccatattaaagaccggcaagatatgctaaaaatctaagacatcaagaagtagaatcctagatgcaaaggcacaactaaaagtgaagccaccaaacttgagataaagagatagatgaattaaaattgtcttatgattttcgatctattaaaattgacatgacttcagctctaagctatagagtttttcattagctttttaaaaagttcatgatcattaaaaatcggagtttaaagctaaaagttatactaaaataagaaagctaaaagttatgtccaagatatgaagtgtgtcggactgaaaatacaacatcgagcatgtcaatgctcctatcctatgagaggacatagtagtgactttcattgaacaatcggatatgtctagtgctcctatcaagggcaggtgtctgatgctcacaaaaaggatcgcaatgtcaaatttcaatagtcaaattattcaatgtggcatcagatattattatcggatatgtccaatgcagatgcatattgctgcaggtaatgacaacggcaagttttggactttgagcctataaatgctccactttagtactctccacttgtatattgcttagtaatacacatgatgattagtgtagatattttgcaaagtgtttagactagttaggccattgcttatgcacttgctctaggtttaggcctagtatttaacactcaatgcttgtaacaccattattatactctaatgggtttatagtcatgtgagaccataccaactatgtttgtgatgtggacaccaccgtgtactggagaaaacgaggcccacaatggtttggctagaaacttggtagtgaaggcaatgagaagcgatatgagagaggccatctcaaagactcacttacgtggaaaacttggcccttgctaggacatccttacaagaggacccaacaaggactaaggaaagcacaaactttttgacaccgcaacaaaaatcttgaagttattaaaaaagtttgtatctctatctcaattaagtttgcacactttatttaatgcttacctagattgtatgctttcttagtttagcttgctaggcaaatggtaagtttgaaatctaggtcgcataactcttttgcgatagagatagcaacacacctaataaaatcatagttgcatatctagataaattactttcttgcatgggttttgattcgataaaaaatagagaccttagatttaagaagtagattttaaattgtctaatttatcctcctttctagatgccatgatcccttcaattagaactctcaatgcatgaattacaaactagcagttctatcaagcattataatggtcaagagcagggatgaagttcattggatttggatatgacacagcagccgccaaaacaagatactcaagatgactgaattatatgaatacagacttttttccaacaacttgatctagcaagctcaaagtacagctaaatattttcttattcttcttcagggagcctggcgcaaaatcactaataacatcaatttaaggttcattctctcgatcgattcaaaatttactgctagtcatgcacagataaagaaagtagaagttgagcaagaacggaaatgtgttttatctactagtgctatctgatatgtggaaacaagttgtttactcaccgctgcaacacatgcgacataacctggtttctccctgtaatcaactctggaacagcacagcagaaaggctccaacgtaccagggaatggcaccaaggaagaaaccgactatgaaccttgaagcgcaaggggttatcattagaagaaagagcaaataaatcagaaggacacgaagctatagcagcagcactgcaattgctgtaccatgaattctgcccaggtatcgaacgtgggacgacaatgctgcttggcacacatgaatgaatctaatgtatgagcagagaaagaaaaaaatggagcaagatgccttacaggaaccatccaaaaccaatgccacaacagggaagtcgatcatggctacgtccccgcacacctgcctcgtaatctcgagctgaaagcggagcaaggaaaacagaaacatggaatttaagcatacacggaatgcatcgaaaagcagagcaggtactctacagtatacgtacattgcatacagtgggcacaggcacaggacaagaagggtttgacagtaagtaggagtagactagagaagtacagtagaaccgtcgctccagaactgaaatggattaataaatatccttgtaataacaaggtaaaaggtaatttactttggttagtggccccagtttgcacaatagtagagtcgccgaataggggcaatcagttgagatcaaacgacgcctagtcgcctagaaacctctcgctctctgggtgtgtgactgtgtgtgtgtgtgggacgacgaacgatgcctagaaacttgatcccgcagatttttgtcttataaatggtacgcctagaaagtgaattggggaagtattcgag

SEQ ID NO: 29235 - DNA, 1143 bp, Zea Mays
atccgggtccgcgcattgcactagctccccccaggctctaccagaaccgccgccgtttctggatctctcgacggcgagcagcgactcgtccggtcgtccctcagcactgtgcttggcggacgcaggacaagacacaggatgagggctgtggtgcagcgcgtcctctcggccagtgtcgaggtcgaggggcgaatagtgtctgcgatcggccctggactcctcgttctcgtcggcgtccacgaggcggacacggactccgacgccgactacatttgtcggaaggtcctgaacatgaggctgttttcaaatgacaagactggaaaagcatgggatcaaagtgttatgcagcgtaactttgaagtgctattggtcagtcagttcaccttatacggcatcctgaagggtaataagccagattttcacgtggctatgtcacctgcaaaagcgaaaccattctatgcttctctagttgagaaatttcaaaggtcatactcggctgattcagtgaaagatggtgtttttggagcgatgatgaaggtttctttggtgaatgatggccccgtgacaatgcaaatcgactcaccctcactgcaaggtgctgctcagtcaagttggatctgaaagccctcctgctgtgcacttggtatgaactttgcgtctatctgttctagcgctttgtcattgccagtcagttacagcactgcttcagtctgcggaggcatagccttttgcgcaaatgacagaaccagacacattctctagactatatttgtcatcttattcatttttctactgcggataatactcttatcaatatgggagctacacatgagcttgtggcttctcaacaatgtagtatctagggtcttattactgaattagcaatcttcagtacatctatggatgaagttcagctctggtctatatatcagctgaactgtctctgtctcctacttgagcagaactcaaacaaccaaaaatcaatacttgggatcctctttcacccgagttattacttgttagcagcactgtagcagctagtgtcacatgcagcagagacaatgcagagatgccaacatgactgaaggataattttcttttgcactaggtttatttgaccaagagtaactccattaatacttt

SEQ ID NO: 29236 - DNA, 1257 bp, Zea Mays
atccgggtccgcgcattgcactagctccccccaggctctaccagaaccgccgccgtttctggatctctcgacggcgagcagcgactcgtccggtcgtccctcagcactgtgcttggcggacgcaggacaagacacaggatgagggctgtggtgcagcgcgtcctctcggccagtgtcgaggtcgaggggcgaatagtgtctgcgatcggccctggactcctcgttctcgtcggcgtccacgaggcggacacggactccgacgccgactacatttgtcggaaggtcctgaacatgaggctgttttcaaatgacaagactggaaaagcatgggatcaaagtgttatgcagcgtaactttgaagtgctattggtcagtcagttcaccttatacggcatcctgaagggtaataagccagattttcacgtggctatgtcacctgcaaaagcgaaaccattctatgcttctctagttgagaaatttcaaaggtcatactcggctgattcagtgaaagatggtgtttttggagcgatgatgaaggtttctttggtgaatgatggccccgtgacaatgcaaatcgactcaccctcactgcaaggtgctgctcagtcaagcaatggttatgatgatttggttgcggatggtgaagcaagagtagctaaagagacgtgttaaaattctgggtctcttgctgacctagggtttagggttctccatcacatctttctcattcagatttttttggtgcagttggatctgaaagccctcctgctgtgcacttgttctagcgctttgtcattgccagtcagttacagcactgcttcagtctgcggaggcatagccttttgcgcaaatgacagaaccagacacattctctagactatatttgtcatcttattcatttttctactgcggataatactcttatcaatatgggagctacacatgagcttgtggcttctcaacaatgtagtatctagggtcttattactgaattagcaatcttcagtacatctatggatgaagttcagctctggtctatatatcagctgaactgtctctgtctcctacttgagcagaactcaaacaaccaaaaatcaatacttgggatcctctttcacccgagttattacttgttagcagcactgtagcagctagtgtcacatgcagcagagacaatgcagagatgccaacatgactgaaggataattttcttttgcactaggtttatttgaccaagagtaactccattaatacttt

SEQ ID NO: 29237 - DNA, 1362 bp, Zea Mays
atccgggtccgcgcattgcactagctccccccaggctctaccagaaccgccgccgtttctggatctctcgacggcgagcagcgactcgtccggtcgtccctcagcactgtgcttggcggacgcaggacaagacacaggatgagggctgtggtgcagcgcgtcctctcggccagtgtcgaggtcgaggggcgaatagtgtctgcgatcggccctggactcctcgttctcgtcggcgtccacgaggcggacacggactccgacgccgactacatttgtcggaaggtcctgaacatgaggctgttttcaaatgacaagactggaaaagcatgggatcaaagtgttatgcagcgtaactttgaagtgctattggtcagttcaccttatacggcatcctgaagggtaataagccagattttcacgtggctatgtcacctgcaaaagcgaaaccattctatgcttctctagttgagaaatttcaaaggtcatactcggctgattcagtgaaagatggtgtttttggagcgatgatgaaggtgcctctgactgaaacatgttatttgtcctcatagcgtttgattgaccttctcagaaaaaaaggtgtaaattggaaagccttgcaggtttctttggtgaatgatggccccgtgacaatgcaaatcgactcaccctcactgcaaggtgctgctcagtcaagcaatggttatgatgatttggttgcggatggtgaagcaagagtagctaaagagacgtgttaaaattctgggtctcttgctgacctagggtttagggttctccatcacatctttctcattcagatttttttggtgcagttggatctgaaagccctcctgctgtgcacttggtatgaactttgcgtctatctgttctagcgctttgtcattgccagtcagttacagcactgcttcagtctgcggaggcatagccttttgcgcaaatgacagaaccagacacattctctagactatatttgtcatcttattcatttttctactgcggataatactcttatcaatatgggagctacacatgagcttgtggcttctcaacaatgtagtatctagggtcttattactgaattagcaatcttcagtacatctatggatgaagttcagctctggtctatatatcagctgaactgtctctgtctcctacttgagcagaactcaaacaaccaaaaatcaatacttgggatcctctttcacccgagttattacttgttagcagcactgtagcagctagtgtcacatgcagcagagacaatgcagagatgccaacatgactgaaggataattttcttttgcactaggtttatttgaccaagagtaactccattaatacttt

SEQ ID NO: 29238 - DNA, 1121 bp, Zea Mays
atccgggtccgcgcattgcactagctccccccaggctctaccagaaccgccgccgtttctggatctctcgacggcgagcagcgactcgtccggtcgtccctcagcactgtgcttggcggacgcaggacaagacacaggatgagggctgtggtgcagcgcgtcctctcggccagtgtcgaggtcgaggggcgaatagtgtctgcgatcggccctggactcctcgttctcgtcggcgtccacgaggcggacacggactccgacgccgactacatttgtcggaaggtcctgaacatgaggctgttttcaaatgacaagactggaaaagcatgggatcaaagtgttatgcagcgtaactttgaagtgctattggtcagtcagttcaccttatacggcatcctgaagggtaataagccagattttcacgtggctatgtcacctgcaaaagcgaaaccattctatgcttctctagttgagaaatttcaaaggtcatactcggctgattcagtgaaagatggtgtttttggagcgatgatgaaggtttctttggtgaatgatggccccgtgacaatgcaaatcgactcaccctcactgcaaggtgctgctcagtcaagttggatctgaaagccctcctgctgtgcacttgttctagcgctttgtcattgccagtcagttacagcactgcttcagtctgcggaggcatagccttttgcgcaaatgacagaaccagacacattctctagactatatttgtcatcttattcatttttctactgcggataatactcttatcaatatgggagctacacatgagcttgtggcttctcaacaatgtagtatctagggtcttattactgaattagcaatcttcagtacatctatggatgaagttcagctctggtctatatatcagctgaactgtctctgtctcctacttgagcagaactcaaacaaccaaaaatcaatacttgggatcctctttcacccgagttattacttgttagcagcactgtagcagctagtgtcacatgcagcagagacaatgcagagatgccaacatgactgaaggataattttcttttgcactaggtttatttgaccaagagtaactccattaatacttt

SEQ ID NO: 29239 - DNA, 1448 bp, Zea Mays
gtgacccgcggcccactataaccaaaccaacctccccctccccctccccccgacctctctgccttttccttttccttcccccgctttctccttccttcctcctcctcccggctcccctcacccagccaccggccatgtcggtggagacggagcggagctccaccgagtcctccggggcttccgggctcgacttcgaggacaccgcgctcacgctcaccctccgcctcccgggctccgcgccttccgccgccgccgccgccgcggcttccctgtccctctcctcctcgtcgtcctccgccttccccgaccccgaccgcaagcgcgcctcctccgacgctgaccccggccgctcctccccgctcgccgcgtcctccgacgctgcaccggcacccaaggctcgtgtggtgggctggccgccggtgaggtcgtaccgcaagaacgcgctcgccgacgccgcgggctccagcaaggccgccaagttcgtcaaggtggccgtcgacggcgcgccctacctgcggaaggtggacctgcaggcgtacgccggctacgaccagctgctccgcgcgctccaggacaagttcttctcccacttcaccatcattcgccgacgacgagaggaagctggtggacgcggtgaacgggacggagtacgtacccacgtacgaggacaaggatggcgactggatgctcgtcggcgacgtcccctggaagatgttcgtggaaacctgccagcgccttcgtctgatgaaaggttcagaggccgtgaacttggcaccaagagccgcccgatgaggcacactccgttgggcgttggcacgcacgcacgcactggcgtcttgaaggaaagggggaactctgctggtcttgatgaggatcttcacgtgagataggaacgtgtgtacagttgtcgccttatggtattgagttgaggaaacttggaagttccattacttgtctgtagtctctactttatatagatgcgaagaagcttgagatacacattgcctacaatgtcttttgatgaataagaccagacagcaccgaaccgaactcgtcctccacacggttgctttgccatctcggtggttttgtggtggtggtggtggtcgtgcttcctataggtgtgaggctgatggcgtggctgccatttatacaatctttaatcgtgttttgttgagctttattatatggttttgtttgagagttcatggctctgcatcctgttcctacgggatgctggtcagcttttcccctagcaagtacattctggtttgcttcgtctcctcgtcgtgcctgtttgtttcgtcgtaacactggctgacatgcgtaacaaagcttgatgttccactcccgttcatgcgcagtaggatgtttcaatggttatagttgggctgaaactagttggtgacgatctaggatttaatttatgcaagaatttaaagaagcct

SEQ ID NO: 29240 - DNA, 1430 bp, Zea Mays
gtgacccgcggcccactataaccaaaccaacctccccctccccctccccccgacctctctgccttttccttttccttcccccgctttctccttccttcctcctcctcccggctcccctcacccagccaccggccatgtcggtggagacggagcggagctccaccgagtcctccggggcttccgggctcgacttcgaggacaccgcgctcacgctcaccctccgcctcccgggctccgcgccttccgccgccgccgccgccgcggcttccctgtccctctcctcctcgtcgtcctccgccttccccgaccccgaccgcaagcgcgcctcctccgacgctgaccccggccgctcctccccgctcgccgcgtcctccgacgctgcaccggcacccaaggctcgtgtggtgggctggccgccggtgaggtcgtaccgcaagaacgcgctcgccgacgccgcgggctccagcaaggccgccaagttcgtcaaggtggccgtcgacggcgcgccctacctgcggaaggtggacctgcaggcgtacgccggctacgaccagctgctccgcgcgctccaggacaaggaagttcgccgacgacgagaggaagctggtggacgcggtgaacgggacggagtacgtacccacgtacgaggacaaggatggcgactggatgctcgtcggcgacgtcccctggaagatgttcgtggaaacctgccagcgccttcgtctgatgaaaggttcagaggccgtgaacttggcaccaagagccgcccgatgaggcacactccgttgggcgttggcacgcacgcacgcactggcgtcttgaaggaaagggggaactctgctggtcttgatgaggatcttcacgtgagataggaacgtgtgtacagttgtcgccttatggtattgagttgaggaaacttggaagttccattacttgtctgtagtctctactttatatagatgcgaagaagcttgagatacacattgcctacaatgtcttttgatgaataagaccagacagcaccgaaccgaactcgtcctccacacggttgctttgccatctcggtggttttgtggtggtggtggtggtcgtgcttcctataggtgtgaggctgatggcgtggctgccatttatacaatctttaatcgtgttttgttgagctttattatatggttttgtttgagagttcatggctctgcatcctgttcctacgggatgctggtcagcttttcccctagcaagtacattctggtttgcttcgtctcctcgtcgtgcctgtttgtttcgtcgtaacactggctgacatgcgtaacaaagcttgatgttccactcccgttcatgcgcagtaggatgtttcaatggttatagttgggctgaaactagttggtgacgatctaggatttaatttatgcaagaatttaaagaagcct

SEQ ID NO: 29241 - DNA, 1122 bp, Zea Mays
cacctctttgccttttgtttttttaaccgtagattccatccaaaaacgccttccacgtggaccaaccacaacaatttcctatctgatagactgatacttcttgcaccgaaccgaacgtgttgctgtttctagcatttaccatattataagcaactttgatgtacagaatatgctatattctctaatccgacaaatgtgaaaagaaccgactttattaagtttggatacattggataaggttgtctttccagttttgttctccagcactagatagctagattgaactgttcgcctgacatatcggctgcctatggagcaaaagcaaattgctcctagaccctcctagagaatattctatctcaagcactgagatgggtttgtcgggatgttcgtggaaacctgccagcgccttcgtctgatgaaaggttcagaggccgtgaacttggcaccaagagccgcccgatgaggcacactccgttgggcgttggcacgcacgcacgcactggcgtcttgaaggaaagggggaactctgctggtcttgatgaggatcttcacgtgagataggaacgtgtgtacagttgtcgccttatggtattgagttgaggaaacttggaagttccattacttgtctgtagtctctactttatatagatgcgaagaagcttgagatacacattgcctacaatgtcttttgatgaataagaccagacagcaccgaaccgaactcgtcctccacacggttgctttgccatctcggtggttttgtggtggtggtggtggtcgtgcttcctataggtgtgaggctgatggcgtggctgccatttatacaatctttaatcgtgttttgttgagctttattatatggttttgtttgagagttcatggctctgcatcctgttcctacgggatgctggtcagcttttcccctagcaagtacattctggtttgcttcgtctcctcgtcgtgcctgtttgtttcgtcgtaacactggctgacatgcgtaacaaagcttgatgttccactcccgttcatgcgcagtaggatgtttcaatggttatagttgggctgaaactagttggtgacgatctaggatttaatttatgcaagaatttaaagaagcct

SEQ ID NO: 29242 - DNA, 2504 bp, Zea Mays
ctcggagtgtgtcctctcgcctcctcccctctccgccagcggctgccaccagcccaccaccgcccctcctcaaaacgccaaaaatttccccacctctagacgccctttcccctccccccgagatcccatccatggccacctcccgcccccggatctggcgctgagcccgccattgccggatccctgccaggtctccaccccgccgtcgcgctcccggcccggttctattgggcgcggcgtggcattccctttcttctttgtgcgctaaccggggggtggtggttgatctgtactggcgggtgcagcgcgccttgcgatctctagctgttgctgcgggaggaccggccgcctcgtcgccgttgccaagtgcgctcttttaaagcccgaagattcgccccctccgcgtgttcgtgtcgccgagaggaggtcggacttgtcggaatggtcgtctaattggggagatttgatgtgttattggtgccgccggatctcgccgacatgtggaagcaatttatcggaaagctatcgtggaagtcaatgaaatccagctctggcagcggggggtcgccgccggcgccactatcgtcgccgcgggataatggagcctcaccgcgggagaatggggccacggggaagcctaacgtctcgcctcggtctcccgcggctggcgccggagccggagccgaggtgaggtccagggaggacgcctttgtccagaaagttaacatttgctgcgcggtgtacgacttctccgaccgaggcaaggactcgccggagaaggagcggaagcggcaaatgctcatgtccctcgtcgactgcattggcgccgccgaggagccgctcacggagacgatgatagcagcgtgcgtgcgcatgttcgctgctaacctgttcagggtcttcccgcccaaagtccggtctggcacctcggcttcggagaccgaggaggacgagccgttcttcgatccgtcctggtggctaggaagtatgtggatagccctttcgtctccaagctgctcgatctgtttgattcggatgacccgagagaaagggactgcttgaagacaatattgcataggatatatggcaagttcatgggaaaccgaccgttcatccgtaaggctgtgagcaacatcttctataggtttgtgttcgagacggatcaccacaatgggattgccgaactattggaggtctttggcagtgtgataagtgggtttgcaaagccattgaaggaggaacataagttgttcttatggaaagcattgataccacttcataagccgaaatcaatgggagtgtatctgccacagctgacatattgcatcacacaatttattgacaaggaaccaaagcttgctgggactgtgatcaggggcctgttaaagtattggccagttacaaatagtcaaaaggaaatgatgtttttgggggagttggaggaggtgctggagttgactgacatggctgaatttcagaagtgcatggtccccttattccggaagattgctagttgcctgaatagctctcattttcaggttgcagagagagccttgttcctatggaacaacgagcacctattcgacatgatctcccaaaaccgccaagtaatcctaccaatcatatacccagctctggagaggaacacccgctggcactggaaccagtcggtcctcaacgtaaccatgaacgtgcggaaaatgttccgcgacatggacgagaggctgcttcaagcctgccacgacaacttccaagaggaagaggagaagcgggccgtgactgaggagcggcggaggctcatgtgggagcagctggagcgaagtgccgctcgcgggtaccaccagccgacgacgatcgctgccgatgcgagcagcttccccgcgccctcttcatcggctcgtcttgtatccctcaccgtgacatgagaacacgaggttgcaaccagatgttgctctgttttcgccgcttggtagctaaagctagatgatggagttgcttgcttcgctgggggatgcacgcacgaaggcattttgttaccttctgtgtatgcataaccccccttgtcaaagtctgtaattaatagctgacggtttgaggacaaagggacgttttggatttttgcaatggcgtattcttgaaatgggcatggtgttctcttcttgctgcctaaatgttgtctggttctaccacagcgctctctgctgtgtatctggacagtatgtatgccccatgggaggatgacaatcgacaagtttgcagctttccttttttttggttgttgatttcgtggcaaatagcttgtgcttatttttttattcttttaagtggacataatcagtaaaaaaagaaacaagaacagctgaggctggatgaaaacgaacaagtctctctcaaaatgttgtgcttaggttatctacttgctgattggtactgttttttttttggaaatcaagtgctccttagattttctcggggtaacgcgcacactctagattctataatct

SEQ ID NO: 29243 - DNA, 1181 bp, Zea Mays
gttagtggcttaagtttagttggtggtcacttctctttatgaggcttcaggccattcgttttgaccatagaattggaaatgacctatctaattctgcctcatatcagtctcagtgtactacggaaatcttaggtcacaaataaatccggtacaaaggcagatgataggagtctttggggtgtttgtgtggcaattgccaaaattctgcttctcttgttgcagagagagccttgttcctatggaacaacgagcacctattcgacatgatctcccaaaaccgccaagtaatcctaccaatcatatacccagctctggagaggaacacccgctggcactggaaccagtcggtcctcaacgtaaccatgaacgtgcggaaaatgttccgcgacatggacgagaggctgcttcaagcctgccacgacaacttccaagaggaagaggagaagcgggccgtgactgaggagcggcggaggctcatgtgggagcagctggagcgaagtgccgctcgcgggtaccaccagccgacgacgatcgctgccgatgcgagcagcttccccgcgccctcttcatcggctcgtcttgtatccctcaccgtgacatgagaacacgaggttgcaaccagatgttgctctgttttcgccgcttggtagctaaagctagatgatggagttgcttgcttcgctgggggatgcacgcacgaaggcattttgttaccttctgtgtatgcataaccccccttgtcaaagtctgtaattaatagctgacggtttgaggacaaagggacgttttggatttttgcaatggcgtattcttgaaatgggcatggtgttctcttcttgctgcctaaatgttgtctggttctaccacagcgctctctgctgtgtatctggacagtatgtatgccccatgggaggatgacaatcgacaagtttgcagctttccttttttttggttgttgatttcgtggcaaatagcttgtgcttatttttttattcttttaagtggacataatcagtaaaaaaagaaacaagaacagctgaggctggatgaaaacgaacaagtctctctcaaaatgttgtgcttaggttatctacttgctgattggtactgttttttttttggaaatcaagtgctccttagattttctcggggtaacgcgcacactctagattctataatct

SEQ ID NO: 29244 - DNA, 1678 bp, Zea Mays
tagacagacggacacgatcaaaagagtgacaaggaaaagagagagaaaaagagggacttgggacgacagagaggggagggcggagttggtgagcgtgctcgggatcagcgggtgacctcagagtcctttcttcctcttggaggaggagggctgcggcctgagcaggagacggagacatgggtagcttcgttaaactggcgaggagggcggtggagacggacgcgccggtcatggtcaagatacaagaactgcttcgaggggccaaggatgtcatgtcgcttgcgcagggagttgtttactggcaacctcctgagtcagcaatggctaaggtcgaaaaaataattagggaaccaacgctcagtaaatatggctctgatgatggtcttcccgagcttcgagaagcactttttgaaaagttacgcagagagaataagcttactaagtcatcagttatggtcactgctggtgcaaatcaagcttttgtgaacttggtcctcactctttgtgatgccggtgattctgttgtcatgtttgcaccatattatttcaatgcctacatgtcattccagatgacaggtgttactgacatattagttggtggttctgatcccaagacacttcatcctgatgttgattggttggagaaggttctgaaagaaaatgaccctatccctaaacttgttaccgttgtgaatccgggtaacccctctggagcttttattcccaggcctatgcttgagaggatttcagatctgtgcaaaaacgctggtgcatggcttgtggttgacaatacctatgaatactttatgtatgatggaatgaagcactattgcttagaaggcactcatattgtcaacctcttctcattctcaaaggcttatggaatgatggggtggcgtgtaggatacatcgcttttccaaacgaagtcgatggcttccacgaccagctcctcaaagtgcaggacaacatacccatctgcgcctccatcatcgggcagcgcctggcgctctactcgctggaggccggccccgagtggatcaaagaaagggtgagagacctggtgaaaaaccgcgcgctgctcgtggacgcgctgtccccgctcggtgacgacaacgtcaggggcgggcagggcgccatctacctgtgggcgaagctcccggacacctgctccgacgatttcgaggtcgtcaggtggctcgcgaacaggcacggcgtcgccgtgatccctggcagcgccagcggaggccccgggcacatccgcatctccttcggagggctcaaggaggaagacaccaggctggccgctgagaggctacggcgcggcttgcaggaactggtggctgatggaacggtacagtaacggctccattggtgtagaactggaccttgttatgaagactgcattgttcggacgagagctgggacagaataaaaggcatccggtctgcagtcatctttgttataaaatatgagtactacatattataatcagcaaatcaaaagcataagcaagaaagtcctgacgtacggagctgcctgttaggccgtttccaacagtggacctaaagtttacctcaaagcactttttacattgttctgcattgtactgtttatagagtggaatttgaatataagtacaaggataaataaactgctcgacctcttggtctcttcttt

SEQ ID NO: 29245 - DNA, 1708 bp, Zea Mays
tagacagacggacacgatcaaaagagtgacaaggaaaagagagagaaaaagagggacttgggacgacagagaggggagggcggagttggtgagcgtgctcgggatcagcgggtgacctcagagtcctttcttcctcttggaggaggagggctgcggcctgagcaggagacggagacatgggtagcttcgttaaactggcgaggagggcggtggagacggacgcgccggtcatggtcaagatacaagaactgcttcgaggggccaaggatgtcatgtcgcttgcgcagggagttgtttactggcaacctcctgagtcagcaatggctaaggtcgaaaaaataattagggaaccaacgctcagtaaatatggctctgatgatggtcttcccgagcttcgagaagcactttttgaaaagttacgcagagagaataagcttactaagtcatcagttatggtcactgctggtgcaaatcaagcttttgtgaacttggtcctcactctttgtgatgccggtgattctgttgtcatgtttgcaccatattatttcaatgcctacatgtcattccagatgacaggtgttactgacatattagttggtggttctgatcccaagacacttcatcctgatgttgattggttggagaaggttctgaaagaaaatgaccctatccctaaacttgttaccgttgtgaatccgggtaacccctctggagcttttattcccaggcctatgcttgagaggatttcagatctgtgcaaaaacgctggtgcatggcttgtggttgacaatacctatgaatactttatgtatgatggaatgaagcactattgcttagaaggcactcatattgtcaacctcttctcattctcaaaggcttatggaatgatggggtggcgtgtaggatacatcgcttttccaaacgaagtcgatggcttccacgaccagctcctcaaagtgcaggacaacatacccatctgcgcctccatcatcgggcagcgcctggcgctctactcgctggaggccggccccgagtggatcaaagaaagggtgagagacctggtgaaaaaccgcgcgctgctcgtggacgcgctgtccccgctcggtgacgacaacgtcaggggcgggcagggcgccatctacctgtgggcgaagctcccggacacctgctccgacgatttcgaggtcgtcaggtggctcgcgaacaggcacggcgtcgccgtgatccctggcagcgccagcggaggccccgggcacatccgcatctccttcggagggctcaaggaggaagacaccaggctggccgctgagaggctacggcgcggcttgcaggaactggtggctgatggaacggtacagtaacggctccattggtgtaggtaaaaagcacagcattgtagttttacacaacgactccgattttccaatggcataactccgccgggattgattcgagagaagaactggaccttgttatgaagactgcattgttcggacgagagctgggacagaataaaaggcatccgaatcaaaagcataagcaagaaagtcctgacgtacggagctgcctgttaggccgtttccaacagtggacctaaagtttacctcaaagcactttttacattgttctgcattgtactgtttatagagtggaatttgaatataagtacaaggataaataaactgctcgacctcttggtctcttcttt

SEQ ID NO: 29246 - DNA, 1701 bp, Zea Mays
caaaagagtgacaaggaaaagagagagaaaaagagggacttgggacgacagagaggggagggcggagttggtgagcgtgctcgggatcagcgggtgacctcagagtcctttcttcctcttggaggaggagggctgcggcctgagcaggagacggagacatgggtagcttcgttaaactggcgaggagggcggtggagacggacgcgccggtcatggtcaagatacaagaactgcttcgaggggccaaggatgtcatgtcgcttgcgcagggagttgtttactggcaacctcctgagtcagcaatggctaaggtcgaaaaaataattagggaaccaacgctcagtaaatatggctctgatgatggtcttcccgagcttcgagaagcactttttgaaaagttacgcagagagaataagcttactaagtcatcagttatggtcactgctggtgcaaatcaagcttttgtgaacttggtcctcactctttgtgatgccggtgattctgttgtcatgtttgcaccatattatttcaatgcctacatgtcattccagatgacaggtgttactgacatattagttggtggttctgatcccaagacacttcatcctgatgttgattggttggagaaggttctgaaagaaaatgaccctatccctaaacttgttaccgttgtgaatccggaggatttcagatctgtgcaaaaacgctggtgcatggcttgtggttgacaatacctatgaatactttatgtatgatggaatgaagcactattgcttagaaggcactcatattgtcaacctcttctcattctcaaaggcttatggaatgatggggtggcgtgtaggatacatcgcttttccaaacgaagtcgatggcttccacgaccagctcctcaaagtgcaggacaacatacccatctgcgcctccatcatcgggcagcgcctggcgctctactcgctggaggccggccccgagtggatcaaagaaagggtgagagacctggtgaaaaaccgcgcgctgctcgtggacgcgctgtccccgctcggtgacgacaacgtcaggggcgggcagggcgccatctacctgtgggcgaagctcccggacacctgctccgacgatttcgaggtcgtcaggtggctcgcgaacaggcacggcgtcgccgtgatccctggcagcgccagcggaggccccgggcacatccgcatctccttcggagggctcaaggaggaagacaccaggctggccgctgagaggctacggcgcggcttgcaggaactggtggctgatggaacggtacagtaacggctccattggtgtaggtaaaaagcacagcattgtagttttacacaacgactccgattttccaatggcataactccgccgggattgattcgagagaagaactggaccttgttatgaagactgcattgttcggacgagagctgggacagaataaaaggcatccggtctgcagtcatctttgttataaaatatgagtactacatattataatcagcaaatcaaaagcataagcaagaaagtcctgacgtacggagctgcctgttaggccgtttccaacagtggacctaaagtttacctcaaagcactttttacattgttctgcattgtactgtttatagagtggaatttgaatataagtacaaggataaataaactgctcgacctcttggtctcttcttt

SEQ ID NO: 29247 - DNA, 1048 bp, Zea Mays
aaaagagtgacaaggaaaagagagagaaaaagagggacttgggacgacagagaggggagggcggagttggtgagcgtgctcgggatcagcgggtgacctcagaggttgttgcctcggggggcggggcaattctttagcacccaatcttccagatgtctttcgactcgctgctgctcttttggttggtatccttggatctctgactctagactgttccacgaaatctccagtcctttcttcctcttggaggaggagggctgcggcctgagcaggagacggagacatgggtagcttcgttaaactggcgaggagggcggtggagacggacgcgccggtcatggtcaagatacaagaactgcttcgaggggccaaggatgtcatgtcgcttgcgcagggagttgtttactggcaacctcctgagtcagcaatggctaaggtcgaaaaaataattagggaaccaacgctcagtaaatatggctctgatgatggtcttcccgagcttcgagaagcactttttgaaaagttacgcagagagaataagcttactaagtcatcagttatggtcactgctggtgcaaatcaagcttttgtgaacttggtcctcactctttgtgatgccggtgattctgttgtcatgtttgcaccatattatttcaatgcctacatgtcattccagatgacaggtgttactgacatattagttggtggttctgatcccaagacacttcatcctgatgttgattggttggagaaggttctgaaagaaaatgaccctatccctaaacttgttaccgttgtgaatccggaggatttcagatctgtgcaaaaacgctggtgcatggcttgtggttgacaatacctatgaaatcaaaagcataagcaagaaagtcctgacgtacggagctgcctgttaggccgtttccaacagtggacctaaagtttacctcaaagcactttttacattgttctgcattgtactgtttatagagtggaatttgaatataagtacaaggataaataaactgctcgacctcttggtctcttcttt

SEQ ID NO: 29248 - DNA, 1808 bp, Zea Mays
cttcacttcatgtatctttgtttagagaccttgccttgttggggcaggggacttgggacgacagagaggggagggcggagttggtgagcgtgctcgggatcagcgggtgacctcagagtcctttcttcctcttggaggaggagggctgcggcctgagcaggagacggagacatgggtagcttcgttaaactggcgaggagggcggtggagacggacgcgccggtcatggtcaagatacaagaactgcttcgaggggccaaggatgtcatgtcgcttgcgcagggagttgtttactggcaacctcctgagtcagcaatggctaaggtcgaaaaaataattagggaaccaacgctcagtaaatatggctctgatgatggtcttcccgagcttcgagaagcactttttgaaaagttacgcagagagaataagcttactaagtcatcagttatggtcactgctggtgcaaatcaagcttttgtgaacttggtcctcactctttgtgatgccggtgattctgttgtcatgtttgcaccatattatttcaatgcctacatgtcattccagatgacaggtgttactgacatattagttggtggttctgatcccaagacacttcatcctgatgttgattggttggagaaggttctgaaagaaaatgaccctatccctaaacttgttaccgttgtgaatccgggtaacccctctggagcttttattcccaggcctatgcttgagatctgtgcaaaaacgctggtgcatggcttgtggttgacaatacctatgaatactttatgtatgatggaatgaagcactattgcttagaaggcactcatattgtcaacctcttctcattctcaaaggcttatggaatgatggggtggcgtgtaggatacatcgcttttccaaacgaagtcgatggcttccacgaccagctcctcaaagtgcaggacaacatacccatctgcgcctccatcatcgggcagcgcctggcgctctactcgctggaggccggccccgagtggatcaaagaaagggtgagagacctggtgaaaaaccgcgcgctgctcgtggacgcgctgtccccgctcggtgacgacaacgtcaggggcgggcagggcgccatctacctgtgggcgaagctcccggacacctgctccgacgatttcgaggtcgtcaggtggctcgcgaacaggcacggcgtcgccgtgatccctggcagcgccagcggaggccccgggcacatccgcatctccttcggagggctcaaggaggaagacaccaggctggccgctgagaggctacggcgcggcttgcaggaactggtggctgatggaacggtacagtaacggctccattggtgtaggtaaaaagcacagcattgtagttttacacaacgactccgattttccaatggcataactccgccgggattgattcgagagaagaactggaccttgttatgaagactgcattgttcggacgagagctgggacagaataaaaggcatccggtctgcagtcatctttgttataaaatatgagtactacatattataatcagcagtaagtatttgtttctgtttggttttcagttatctatattactgatggcacccatttgtacagaatcaaaagcataagcaagaaagtcctgacgtacggagctgcctgttaggccgtttccaacagtggacctaaagtttacctcaaagcactttttacattgttctgcattgtactgtttatagagtggaatttgaatataagtacaaggataaataaactgctcgacctcttggtctcttcttt

SEQ ID NO: 29249 - DNA, 1835 bp, Zea Mays
cttcacttcatgtatctttgtttagagaccttgccttgttggggcaggggacttgggacgacagagaggggagggcggagttggtgagcgtgctcgggatcagcgggtgacctcagaggttgttgcctcggggggcggggcaattctttagcacccaatcttccagatgtctttcgactcgctgctgctcttttggaggagggctgcggcctgagcaggagacggagacatgggtagcttcgttaaactggcgaggagggcggtggagacggacgcgccggtcatggtcaagatacaagaactgcttcgaggggccaaggatgtcatgtcgcttgcgcagggagttgtttactggcaacctcctgagtcagcaatggctaaggtcgaaaaaataattagggaaccaacgctcagtaaatatggctctgatgatggtcttcccgagcttcgagaagcactttttgaaaagttacgcagagagaataagcttactaagtcatcagttatggtcactgctggtgcaaatcaagcttttgtgaacttggtcctcactctttgtgatgccggtgattctgttgtcatgtttgcaccatattatttcaatgcctacatgtcattccagatgacaggtgttactgacatattagttggtggttctgatcccaagacacttcatcctgatgttgattggttggagaaggttctgaaagaaaatgaccctatccctaaacttgttaccgttgtgaatccggaggatttcagatctgtgcaaaaacgctggtgcatggcttgtggttgacaatacctatgaatactttatgtatgatggaatgaagcactattgcttagaaggcactcatattgtcaacctcttctcattctcaaaggcttatggaatgatggggtggcgtgtaggatacatcgcttttccaaacgaagtcgatggcttccacgaccagctcctcaaagtgcaggacaacatacccatctgcgcctccatcatcgggcagcgcctggcgctctactcgctggaggccggccccgagtggatcaaagaaagggtgagagacctggtgaaaaaccgcgcgctgctcgtggacgcgctgtccccgctcggtgacgacaacgtcaggggcgggcagggcgccatctacctgtgggcgaagctcccggacacctgctccgacgatttcgaggtcgtcaggtggctcgcgaacaggcacggcgtcgccgtgatccctggcagcgccagcggaggccccgggcacatccgcatctccttcggagggctcaaggaggaagacaccaggctggccgctgagaggctacggcgcggcttgcaggaactggtggctgatggaacggtacagtaacggctccattggtgtaggtaaaaagcacagcattgtagttttacacaacgactccgattttccaatggcataactccgccgggattgattcgagagaagaactggaccttgttatgaagactgcattgttcggacgagagctgggacagaataaaaggcatccggtctgcagtcatctttgttataaaatatgagtactacatattataatcagcagtaagtatttgtttctgtttggttttcagttatctatattactgatggcacccatttgtacagaatcaaaagcataagcaagaaagtcctgacgtacggagctgcctgttaggccgtttccaacagtggacctaaagtttacctcaaagcactttttacattgttctgcattgtactgtttatagagtggaatttgaatataagtacaaggataaataaactgctcgacctcttggtctcttcttt

SEQ ID NO: 29250 - DNA, 4703 bp, Zea Mays
atggccgcactgccgcgccacacaccgggcggaaaggcgcgggcagcggcagctagggtttggtgtggcgggggagaccgatcgggggcgagatgtgggcggcggaggcggcgttctcgcgctccgggtcgtggcgggaggcggaggacgagcgggaggcgctgcggtgggccgcgctgcagcggctgcccaccgtcacccgcgcgcgacggggcctgctcaggtccccggctcccgacggggccgcggccgtcgagggcgacgacgtgctctgcgaggtcgacgtcgccgggctctcctccggggaccgcaccgcgctcgtcgaccgcctcgtcgccgactctggcgactccgagcacttcttccgacgcatacgcagccgcttcgacgcagtgcagatagagttccccaagatcgaagtgaggtatgaggatgtgacagtggacgcttacgtgcatgttgggagcagggctctaccgaccatcccgaacttcatatgcaacatgacagaggcttttctgaggcatctgaggatctatcgaggaggaagagttaaactgccgattttggacaacatcagtggggtaattcgcccatcaagaatgacactgcttttgggccctccaagttccgggaagaccaccttgcttcttgctcttgctggacggctcggtcctggactaaagatgtctgggaacattacttacaatggccaccatttgaacgaattcgtgcctcagcgaacatctgcttatgtcagtcagcaagactggcatgcttcagaaatgacggtcagagaaacgctggagtttgccgggcgctgtcagggtgttggaataaagtatgacatgcttgttgaactgttgaggagagaaaagaatgcggggataaaacctgacgaggacctagatgtgttcatgaaggcgttggctcttgagggtaagcagacaagcctcgtagcagagtatataatgaagattttaggactggacgtctgtgctgatactattgttggagatgaaatgatcaaagggatctccggagggcaaaagaagcgcctgacaacaggtgaattgctagttggttctgcccgcgtgctgttcatggatgagatatcgacaggccttgacagtgcaactacatatcagattatcaaatacctaaggaattcaacacatgctcttgacggaactacaatcatatccttgcttcagccagctccggaaacatatgagctatttgatgatgtcattcttatagccgaaggtcaaatcgtataccaaggtccacgtgaatatgcagttgacttttttggtgctatgggattcaggtgtccagaaagaaaaaacgtggctgattttttgcaagaagttttgtccaagaaagatcaacagcagtattggtgccactatgattatccataccaatttgtttctgtatcaaaatttgctgaagccttcaaaacatttattattggtaagagattgcatcaggaattaactgttccatacaaccgacatcacaatcatcctgcagctctttgtacatcaagttacggtgtcaagaggcttgagcttctcaagtccaactaccagtggcagcgtctgctcatgaaaaggaactcattcatatatgtcttcaaattcattcagcttctacttgttgcccttatcacaatgacagtgtttttcagatcaacaatgcaccatgactcagttgatgatggaatcatttatctcggtgccctttactttgcaatagttatgattctgttcaatggcttcactgaagtctcaatgctggttacaaagcttcctgttctttacaagcacagggacctgcacttctacccaccttgggcgtacacacttccttcttggctcttgagcatccccacctcactttacgaatccggaatgtgggtgcttgtaacatattatgtggttggttatgatccccaatttacaagatttttgggacaatttttgttgcttttctttctgcaccaaacatctttggctcttttccgagtcatggcctctttgggccgcaatatgatagtcgctaacacctttggatcattcgctttgttggttgttatgatccttggaggattcatcataaccaaagaaagcataccagtatggtggatatggggttattgggtatctcctatgatgtatgcacaaaatgctatttctgtcaacgaattccatggtcattcttggaacaagcaatttgcaaaccagaacatcacaatgggtgaagcgatactcactggatatgggttattcaaggaaaaatactggttttggatcggtgttggagcattgtttggttatgcaattattttgaacatcttgttcacaatgttcttgacacttctcaaccctattggtaatctgcaagctgttgtggccaaagatcaagtacggcacagggattctaggaggaagaatgacagggtagccctagagctaagatcatatctgcattcaaattcactaagtggtaatctcaaggaacagaaggggatggtgttaccttttcaacccctttctatgtgcttcaggaatatcaactactatgttgatgtaccagtggaattaaaaaagcaaggtgtagcagaagaccgcctgcagctgcttgttgatgtcactggagcttttaggccagggatactaacagctcttgttggagtcagtggagctggcaaaaccaccctcatggatgttttagctggcaggaagactggaggtctcatagaaggaagcatcactatatccgggtatcctaagaaccaagagactttcactaggatatccggatattgtgaacagaatgatgttcactcaccttgcttgactgtgatcgagtctttgttatactcagcatgccttcggttgccttctcatgttgatgcagacactcaaagggcttttgttgaagaggtgatggaacttgttgagttgaatcccttaagcggtgctcttgttggtctgcctggggtaaatggtttatcgactgaacaacgtaaaaggttgacaatcgctgtggaacttgttgcaaatccttctattgtgttcatggatgaacccacgtcaggattggatgctagatctgcagccattgtaatgaggacagtgcgtaatattgttaatacaggacggaccattgtctgcacaatccatcagccaagtattgacatatttgaatcttttgatgagcttttattcatgaagcgtggaggacagcttatatacgctggtcccttaggtgccaaatcgcgtaatctggttgacttttttgaggcaattccaggagtgcctaaaatcagggacggctataatcctgctgcatggatgttggaagttacaagcacccaaatggagcagattcttggagtggattttgctgaatactatcggcaatcaaaattatttcaacagaccagagaaatcgtcgaggccctaagcagaccgagcagtgaatcaaaagaacttactttcgccacgaagtatgctcaaccattttgtgctcagtatatggcttgcctatggaagcacaacctatcgtactggaggaaccctcagtacaccgcagttagattcttctacacagttattatttccttgatgtttgggacaatttgctggaaattcggttctagaagggggacccaacatgatatattcaatgcgatgggtgccatgtatgcagcggtgctgttcataggaattaccaacgccacttctgttcagcctgtgatctccatcgaaagatttgtatcttatagagagcgagctgctgggatgtattcagcgttgccttttgcattttctctggtcactgtggagttcccttacatccttgtgcagtcactcatatacggttcaatcttctacagtttgggatcatttgagtggacagcagccaagtttctgtggtacctgttcttcatgtacttcacgttgctgtacttcactttctatggcatgatgacgacggcgatcactccaaaccataccattgcgcctattattgcggctccattctacacgctgtggaatctcttctgtggattcatgatcccaagaaagcgcatcccagtttggtggaggtggtactactgggccaacccggtgtcgtggacgctctacgggctcctgacctctcagttcggcgacctggaccagcccctgcttatggccgacggcgtcacctccaccaccgtggtggctttcctggaggagcacttcgggtttcgccacgacttcctcggcgccgttgcggccatggtggccggcttctgcgtcctcttcgccgtcgtcttcgccctggccatcaagtacctcaacttccagcggcgatgagagagcaagtggttcagctagctagctagtatagtagccaccgccgacacagacccaccaaacggatcgcagcctactgtacatgcatacaccgatcagtgcaggagggcagcagcacaatgaattatgaatgcgatgtacctaccagcgcgtcgtattggcacagttaatttgcccattacccccagaacatttcgccggggtaaataatcttccggtcggtcacgggagcgagagtgagaaaaagtaaagggtactgtatagccagctattccatgtacttgctgccttggcctcccctccatcgttatacggtggcgtcgcttcatg

SEQ ID NO: 29251 - DNA, 5092 bp, Zea Mays
atggccgcactgccgcgccacacaccgggcggaaaggcgcgggcagcggcagctagggtttggtgtggcgggggagaccgatcgggggcgagatgtgggcggcggaggcggcgttctcgcgctccgggtcgtggcgggaggcggaggacgagcgggaggcgctgcggtgggccgcgctgcagcggctgcccaccgtcacccgcgcgcgacggggcctgctcaggtccccggctcccgacggggccgcggccgtcgagggcgacgacgtgctctgcgaggtcgacgtcgccgggctctcctccggggaccgcaccgcgctcgtcgaccgcctcgtcgccgactctggcgactccgagcacttcttccgacgcatacgcagccgcttcgacgcagtgcagatagagttccccaagatcgaagtgaggtatgaggatgtgacagtggacgcttacgtgcatgttgggagcagggctctaccgaccatcccgaacttcatatgcaacatgacagaggcttttctgaggcatctgaggatctatcgaggaggaagagttaaactgccgattttggacaacatcagtggggtaattcgcccatcaagaatgacactgcttttgggccctccaagttccgggaagaccaccttgcttcttgctcttgctggacggctcggtcctggactaaagatgtctgggaacattacttacaatggccaccatttgaacgaattcgtgcctcagcgaacatctgcttatgtcagtcagcaagactggcatgcttcagaaatgacggtcagagaaacgctggagtttgccgggcgctgtcagggtgttggaataaagtatgacatgcttgttgaactgttgaggagagaaaagaatgcggggataaaacctgacgaggacctagatgtgttcatgaaggcgttggctcttgagggtaagcagacaagcctcgtagcagagtatataatgaagccaagattttaggactggacgtctgtgctgatactattgttggagatgaaatgatcaaagggatctccggagggcaaaagaagcgcctgacaacaggtgaattgctagttggttctgcccgcgtgctgttcatggatgagatatcgacaggccttgacagtgcaactacatatcagattatcaaatacctaaggaattcaacacatgctcttgacggaactacaatcatatccttgcttcagccagctccggaaacatatgagctatttgatgatgtcattcttatagccgaaggtcaaatcgtataccaaggtccacgtgaatatgcagttgacttttttggtgctatgggattcaggtgtccagaaagaaaaaacgtggctgattttttgcaagaagttttgtccaagaaagatcaacagcagtattggtgccactatgattatccataccaatttgtttctgtatcaaaatttgctgaagccttcaaaacatttattattggtaagagattgcatcaggaattaactgttccatacaaccgacatcacaatcatcctgcagctctttgtacatcaagttacggtgtcaagaggcttgagcttctcaagtccaactaccagtggcagcgtctgctcatgaaaaggaactcattcatatatgtcttcaaattcattcagcttctacttgttgcccttatcacaatgacagtgtttttcagatcaacaatgcaccatgactcagttgatgatggaatcatttatctcggtgccctttactttgcaatagttatgattctgttcaatggcttcactgaagtctcaatgctggttacaaagcttcctgttctttacaagcacagggacctgcacttctacccaccttgggcgtacacacttccttcttggctcttgagcatccccacctcactttacgaatccggaatgtgggtgcttgtaacatattatgtggttggttatgatccccaatttacaagatttttgggacaatttttgttgcttttctttctgcaccaaacatctttggctcttttccgagtcatggcctctttgggccgcaatatgatagtcgctaacacctttggatcattcgctttgttggttgttatgatccttggaggattcatcataaccaaagaaagcataccagtatggtggatatggggttattgggtatctcctatgatgtatgcacaaaatgctatttctgtcaacgaattccatggtcattcttggaacaagcaatttgcaaaccagaacatcacaatgggtgaagcgatactcactggatatgggttattcaaggaaaaatactggttttggatcggtgttggagcattgtttggttatgcaattattttgaacatcttgttcacaatgttcttgacacttctcaaccctattggtaatctgcaagctgttgtggccaaagatcaagtacggcacagggattctaggaggaagaatgacagggtagccctagagctaagatcatatctgcattcaaattcactaagtggtaatctcaaggaacagaaggggatggtgttaccttttcaacccctttctatgtgcttcaggaatatcaactactatgttgatgtaccagtgttctgctagcaggaattaaaaaagcaaggtgtagcagaagaccgcctgcagctgcttgttgatgtcactggagcttttaggccagggatactaacagctcttgttggagtcagtggagctggcaaaaccaccctcatggatgttttagctggcaggaagactggaggtctcatagaaggaagcatcactatatccgggtatcctaagaaccaagagactttcactaggatatccggatattgtgaacagaatgatgttcactcaccttgcttgactgtgatcgagtctttgttatactcagcatgccttcggttgccttctcatgttgatgcagacactcaaagggtaagccttgattggttatacatcacacgcgctttttgtcctccttatcttttgtgttccctttcataggcttttgttgaagaggtgatggaacttgttgagttgaatcccttaagcggtgctcttgttggtctgcctggggtaaatggtttatcgactgaacaacgtaaaaggttgacaatcgctgtggaacttgttgcaaatccttctattgtgttcatggatgaacccacgtcaggattggatgctagatctgcagccattgtaatgaggacagtgcgtaatattgttaatacaggacggaccattgtctgcacaatccatcagccaagtattgacatatttgaatcttttgatgaggtaaaaggagtaaatagaagtcattatctaagctatcgtttctataaacatgagagtttgttagtacagacaaacatttttcatacctgtgatgaatctccactggttagttatgcttacggacttccagtttcactacgaagtaaaacagtacgatgttatatctaatttaacaatcgttgtgatgagaaattttagtctgaacactgattggtggaatttccatcggtctcatttactgaacctactattgtccccatgatagtactatgtataatatgattacaatgcttaacttgcatatgctgctcagcttttattcatgaagcgtggaggacagcttatatacgctggtcccttaggtgccaaatcgcgtaatctggttgacttttttgaggcaattccaggagtgcctaaaatcagggacggctataatcctgctgcatggatgttggaagttacaagcacccaaatggagcagattcttggagtggattttgctgaatactatcggcaatcaaaattatttcaacagaccagagaaatcgtcgaggccctaagcagaccgagcagtgaatcaaaagaacttactttcgccacgaagtatgctcaaccattttgtgctcagtatatggcttgcctatggaagcacaacctatcgtactggaggaaccctcagtacaccgcagttagattcttctacacagttattatttccttgatgtttgggacaatttgctggaaattcggttctagaagggggacccaacatgatatattcaatgcgatgggtgccatgtatgcagcggtgctgttcataggaattaccaacgccacttctgttcagcctgtgatctccatcgaaagatttgtatcttatagagagcgagctgctgggatgtattcagcgttgccttttgcattttctctggtcactgtggagttcccttacatccttgtgcagtcactcatatacggttcaatcttctacagtttgggatcatttgagtggacagcagccaagtttctgtggtacctgttcttcatgtacttcacgttgctgtacttcactttctatggcatgatgacgacggcgatcactccaaaccataccattgcgcctattattgcggctccattctacacgctgtggaatctcttctgtggattcatgatcccaagaaagtttggtggaggtggtactactgggccaacccggtgtcgtggacgctctacgggctcctgacctctcagttcggcgacctggaccagcccctgcttatggccgacggcgtcacctccaccaccgtggtggctttcctggaggagcacttcgggtttcgccacgacttcctcggcgccgttgcggccatggtggccggcttctgcgtcctcttcgccgtcgtcttcgccctggccatcaagtacctcaacttccagcggcgatgagagagcaagtggttcagctagctagctagtatagtagccaccgccgacacagacccaccaaacggatcgcagcctactgtacatgcatacaccgatcagtgcaggagggcagcagcacaatgaattatgaatgcgatgtacctaccagcgcgtcgtattggcacagttaatttgcccattacccccagaacatttcgccggggtaaataatcttccggtcggtcacgggagcgagagtgagaaaaagtaaagggtactgtatagccagctattccatgtacttgctgccttggcctcccctccatcgttatacggtggcgtcgcttcatg

SEQ ID NO: 29252 - DNA, 4696 bp, Zea Mays
atggccgcactgccgcgccacacaccgggcggaaaggcgcgggcagcggcagctagggtttggtgtggcgggggagaccgatcgggggcgagatgtgggcggcggaggcggcgttctcgcgctccgggtcgtggcgggaggcggaggacgagcgggaggcgctgcggtgggccgcgctgcagcggctgcccaccgtcacccgcgcgcgacggggcctgctcaggtccccggctcccgacggggccgcggccgtcgagggcgacgacgtgctctgcgaggtcgacgtcgccgggctctcctccggggaccgcaccgcgctcgtcgaccgcctcgtcgccgactctggcgactccgagcacttcttccgacgcatacgcagccgcttcgacgcagtgcagatagagttccccaagatcgaagtgaggtatgaggatgtgacagtggacgcttacgtgcatgttgggagcagggctctaccgaccatcccgaacttcatatgcaacatgacagaggcttttctgaggcatctgaggatctatcgaggaggaagagttaaactgccgattttggacaacatcagtggggtaattcgcccatcaagaatgacactgcttttgggccctccaagttccgggaagaccaccttgcttcttgctcttgctggacggctcggtcctggactaaagatgtctgggaacattacttacaatggccaccatttgaacgaattcgtgcctcagcgaacatctgcttatgtcagtcagcaagactggcatgcttcagaaatgacggtcagagaaacgctggagtttgccgggcgctgtcagggtgttggaataaagtatgacatgcttgttgaactgttgaggagagaaaagaatgcggggataaaacctgacgaggacctagatgtgttcatgaaggcgttggctcttgagggtaagcagacaagcctcgtagcagagtatataatgaaggactggacgtctgtgctgatactattgttggagatgaaatgatcaaagggatctccggagggcaaaagaagcgcctgacaacaggtgaattgctagttggttctgcccgcgtgctgttcatggatgagatatcgacaggccttgacagtgcaactacatatcagattatcaaatacctaaggaattcaacacatgctcttgacggaactacaatcatatccttgcttcagccagctccggaaacatatgagctatttgatgatgtcattcttatagccgaaggtcaaatcgtataccaaggtccacgtgaatatgcagttgacttttttggtgctatgggattcaggtgtccagaaagaaaaaacgtggctgattttttgcaagaagttttgtccaagaaagatcaacagcagtattggtgccactatgattatccataccaatttgtttctgtatcaaaatttgctgaagccttcaaaacatttattattggtaagagattgcatcaggaattaactgttccatacaaccgacatcacaatcatcctgcagctctttgtacatcaagttacggtgtcaagaggcttgagcttctcaagtccaactaccagtggcagcgtctgctcatgaaaaggaactcattcatatatgtcttcaaattcattcagcttctacttgttgcccttatcacaatgacagtgtttttcagatcaacaatgcaccatgactcagttgatgatggaatcatttatctcggtgccctttactttgcaatagttatgattctgttcaatggcttcactgaagtctcaatgctggttacaaagcttcctgttctttacaagcacagggacctgcacttctacccaccttgggcgtacacacttccttcttggctcttgagcatccccacctcactttacgaatccggaatgtgggtgcttgtaacatattatgtggttggttatgatccccaatttacaagatttttgggacaatttttgttgcttttctttctgcaccaaacatctttggctcttttccgagtcatggcctctttgggccgcaatatgatagtcgctaacacctttggatcattcgctttgttggttgttatgatccttggaggattcatcataaccaaagaaagcataccagtatggtggatatggggttattgggtatctcctatgatgtatgcacaaaatgctatttctgtcaacgaattccatggtcattcttggaacaagcaatttgcaaaccagaacatcacaatgggtgaagcgatactcactggatatgggttattcaaggaaaaatactggttttggatcggtgttggagcattgtttggttatgcaattattttgaacatcttgttcacaatgttcttgacacttctcaaccctattggtaatctgcaagctgttgtggccaaagatcaagtacggcacagggattctaggaggaagaatgacagggtagccctagagctaagatcatatctgcattcaaattcactaagtggtaatctcaaggaacagaaggggatggtgttaccttttcaacccctttctatgtgcttcaggaatatcaactactatgttgatgtaccagtggaattaaaaaagcaaggtgtagcagaagaccgcctgcagctgcttgttgatgtcactggagcttttaggccagggatactaacagctcttgttggagtcagtggagctggcaaaaccaccctcatggatgttttagctggcaggaagactggaggtctcatagaaggaagcatcactatatccgggtatcctaagaaccaagagactttcactaggatatccggatattgtgaacagaatgatgttcactcaccttgcttgactgtgatcgagtctttgttatactcagcatgccttcggttgccttctcatgttgatgcagacactcaaagggcttttgttgaagaggtgatggaacttgttgagttgaatcccttaagcggtgctcttgttggtctgcctggggtaaatggtttatcgactgaacaacgtaaaaggttgacaatcgctgtggaacttgttgcaaatccttctattgtgttcatggatgaacccacgtcaggattggatgctagatctgcagccattgtaatgaggacagtgcgtaatattgttaatacaggacggaccattgtctgcacaatccatcagccaagtattgacatatttgaatcttttgatgagcttttattcatgaagcgtggaggacagcttatatacgctggtcccttaggtgccaaatcgcgtaatctggttgacttttttgaggcaattccaggagtgcctaaaatcagggacggctataatcctgctgcatggatgttggaagttacaagcacccaaatggagcagattcttggagtggattttgctgaatactatcggcaatcaaaattatttcaacagaccagagaaatcgtcgaggccctaagcagaccgagcagtgaatcaaaagaacttactttcgccacgaagtatgctcaaccattttgtgctcagtatatggcttgcctatggaagcacaacctatcgtactggaggaaccctcagtacaccgcagttagattcttctacacagttattatttccttgatgtttgggacaatttgctggaaattcggttctagaagggggacccaacatgatatattcaatgcgatgggtgccatgtatgcagcggtgctgttcataggaattaccaacgccacttctgttcagcctgtgatctccatcgaaagatttgtatcttatagagagcgagctgctgggatgtattcagcgttgccttttgcattttctctggtcactgtggagttcccttacatccttgtgcagtcactcatatacggttcaatcttctacagtttgggatcatttgagtggacagcagccaagtttctgtggtacctgttcttcatgtacttcacgttgctgtacttcactttctatggcatgatgacgacggcgatcactccaaaccataccattgcgcctattattgcggctccattctacacgctgtggaatctcttctgtggattcatgatcccaagaaagcgcatcccagtttggtggaggtggtactactgggccaacccggtgtcgtggacgctctacgggctcctgacctctcagttcggcgacctggaccagcccctgcttatggccgacggcgtcacctccaccaccgtggtggctttcctggaggagcacttcgggtttcgccacgacttcctcggcgccgttgcggccatggtggccggcttctgcgtcctcttcgccgtcgtcttcgccctggccatcaagtacctcaacttccagcggcgatgagagagcaagtggttcagctagctagctagtatagtagccaccgccgacacagacccaccaaacggatcgcagcctactgtacatgcatacaccgatcagtgcaggagggcagcagcacaatgaattatgaatgcgatgtacctaccagcgcgtcgtattggcacagttaatttgcccattacccccagaacatttcgccggggtaaataatcttccggtcggtcacgggagcgagagtgagaaaaagtaaagggtactgtatagccagctattccatgtacttgctgccttggcctcccctccatcgttatacggtggcgtcgcttcatg

SEQ ID NO: 29253 - DNA, 4611 bp, Zea Mays
atggccgcactgccgcgccacacaccgggcggaaaggcgcgggcagcggcagctagggtttggtgtggcgggggagaccgatcgggggcgagatgtgggcggcggaggcggcgttctcgcgctccgggtcgtggcgggaggcggaggacgagcgggaggcgctgcggtgggccgcgctgcagcggctgcccaccgtcacccgcgcgcgacggggcctgctcaggtccccggctcccgacggggccgcggccgtcgagggcgacgacgtgctctgcgaggtcgacgtcgccgggctctcctccggggaccgcaccgcgctcgtcgaccgcctcgtcgccgactctggcgactccgagcacttcttccgacgcatacgcagccgcttcgacgcagtgcagatagagttccccaagatcgaagtgaggtatgaggatgtgacagtggacgcttacgtgcatgttgggagcagggctctaccgaccatcccgaacttcatatgcaacatgacagaggcttttctgaggcatctgaggatctatcgaggaggaagagttaaactgccgattttggacaacatcagtggggtaattcgcccatcaagaatgacactgcttttgggccctccaagttccgggaagaccaccttgcttcttgctcttgctggacggctcggtcctggactaaagatgtctgggaacattacttacaatggccaccatttgaacgaattcgtgcctcagcgaacatctgcttatgtcagtcagcaagactggcatgcttcagaaatgacggtcagagaaacgctggagtttgccgggcgctgtcagggtgttggaataaagtatgacatgcttgttgaactgttgaggagagaaaagaatgcggggataaaacctgacgaggacctagatgtgttcatgaaggcgttggctcttgagggtaagcagacaagcctcgtagcagagtatataatgaagattttaggactggacgtctgtgctgatactattgttggagatgaaatgatcaaagggatctccggagggcaaaagaagcgcctgacaacaggtgaattgctagttggttctgcccgcgtgctgttcatggatgagatatcgacaggccttgacagtgcaactacatatcagattatcaaatacctaaggaattcaacacatgctcttgacggaactacaatcatatccttgcttcagccagctccggaaacatatgagctatttgatgatgtcattcttatagccgaaggtcaaatcgtataccaaggtccacgtgaatatgcagttgacttttttggtgctatgggattcaggtgtccagaaagaaaaaacgtggctgattttttgcaagaagttttgtccaagaaagatcaacagcagtattggtgccactatgattatccataccaatttgtttctgtatcaaaatttgctgaagccttcaaaacatttattattggtaagagattgcatcaggaattaactgttccatacaaccgacatcacaatcatcctgcagctctttgtacatcaagttacggtgtcaagaggcttgagcttctcaagtccaactaccagtggcagcgtctgctcatgaaaaggaactcattcatatatgtcttcaaattcattcagcttctacttgttgcccttatcacaatgacagtgtttttcagatcaacaatgcaccatgactcagttgatgatggaatcatttatctcggtgccctttactttgcaatagttatgattctgttcaatggcttcactgaagtctcaatgctggttacaaagcttcctgttctttacaagcacagggacctgcacttctacccaccttgggcgtacacacttccttcttggctcttgagcatccccacctcactttacgaatccggaatgtgggtgcttgtaacatattatgtggttggttatgatccccaatttacaagatttttgggacaatttttgttgcttttctttctgcaccaaacatctttggctcttttccgagtcatggcctctttgggccgcaatatgatagtcgctaacacctttggatcattcgctttgttggttgttatgatccttggaggattcatcataaccaaagaaagcataccagtatggtggatatggggttattgggtatctcctatgatgtatgcacaaaatgctatttctgtcaacgaattccatggtcattcttggaacaagcaatttgcaaaccagaacatcacaatgggtgaagcgatactcactggatatgggttattcaaggaaaaatactggttttggatcggtgttggagcattgtttggttatgcaattattttgaacatcttgttcacaatgttcttgacacttctcaaccctattggtaatctgcaagctgttgtggccaaagatcaagtacggcacagggattctaggaggaagaatgacagggtagccctagagctaagatcatatctgcattcaaattcactaagtggaattaaaaaagcaaggtgtagcagaagaccgcctgcagctgcttgttgatgtcactggagcttttaggccagggatactaacagctcttgttggagtcagtggagctggcaaaaccaccctcatggatgttttagctggcaggaagactggaggtctcatagaaggaagcatcactatatccgggtatcctaagaaccaagagactttcactaggatatccggatattgtgaacagaatgatgttcactcaccttgcttgactgtgatcgagtctttgttatactcagcatgccttcggttgccttctcatgttgatgcagacactcaaagggcttttgttgaagaggtgatggaacttgttgagttgaatcccttaagcggtgctcttgttggtctgcctggggtaaatggtttatcgactgaacaacgtaaaaggttgacaatcgctgtggaacttgttgcaaatccttctattgtgttcatggatgaacccacgtcaggattggatgctagatctgcagccattgtaatgaggacagtgcgtaatattgttaatacaggacggaccattgtctgcacaatccatcagccaagtattgacatatttgaatcttttgatgagcttttattcatgaagcgtggaggacagcttatatacgctggtcccttaggtgccaaatcgcgtaatctggttgacttttttgaggcaattccaggagtgcctaaaatcagggacggctataatcctgctgcatggatgttggaagttacaagcacccaaatggagcagattcttggagtggattttgctgaatactatcggcaatcaaaattatttcaacagaccagagaaatcgtcgaggccctaagcagaccgagcagtgaatcaaaagaacttactttcgccacgaagtatgctcaaccattttgtgctcagtatatggcttgcctatggaagcacaacctatcgtactggaggaaccctcagtacaccgcagttagattcttctacacagttattatttccttgatgtttgggacaatttgctggaaattcggttctagaagggggacccaacatgatatattcaatgcgatgggtgccatgtatgcagcggtgctgttcataggaattaccaacgccacttctgttcagcctgtgatctccatcgaaagatttgtatcttatagagagcgagctgctgggatgtattcagcgttgccttttgcattttctctggtcactgtggagttcccttacatccttgtgcagtcactcatatacggttcaatcttctacagtttgggatcatttgagtggacagcagccaagtttctgtggtacctgttcttcatgtacttcacgttgctgtacttcactttctatggcatgatgacgacggcgatcactccaaaccataccattgcgcctattattgcggctccattctacacgctgtggaatctcttctgtggattcatgatcccaagaaagcgcatcccagtttggtggaggtggtactactgggccaacccggtgtcgtggacgctctacgggctcctgacctctcagttcggcgacctggaccagcccctgcttatggccgacggcgtcacctccaccaccgtggtggctttcctggaggagcacttcgggtttcgccacgacttcctcggcgccgttgcggccatggtggccggcttctgcgtcctcttcgccgtcgtcttcgccctggccatcaagtacctcaacttccagcggcgatgagagagcaagtggttcagctagctagctagtatagtagccaccgccgacacagacccaccaaacggatcgcagcctactgtacatgcatacaccgatcagtgcaggagggcagcagcacaatgaattatgaatgcgatgtacctaccagcgcgtcgtattggcacagttaatttgcccattacccccagaacatttcgccggggtaaataatcttccggtcggtcacgggagcgagagtgagaaaaagtaaagggtactgtatagccagctattccatgtacttgctgccttggcctcccctccatcgttatacggtggcgtcgcttcatg

SEQ ID NO: 29254 - DNA, 466 bp, Zea Mays
atgtatagctgtaccatgcactatgagaagatttttcatgggagactcgttgaagcagatgcacgcagatactttcagcagcttattgacggtgttgatttttgtcacaagaaaaggagtctaccattgagacttaaaggatgcttagtgggtcaactgtagggatctttccttctacatacgacctgtgggactcgcttttgtatgtcaattatctgtcaattcttccatttctgaatcctaaagaaaaatggtccctaatagcttatggtttacttgaaaagttcatgaatactccggtaacagaattcgaggtgatattccagaacaatcatatccggtcgctctttggtatcacaattatttgtcaattcttctattcctgaatcctaaagaaaaatggtgcatgatgtctcagtgagtcagctctcaccatgttcaatgtacatgataatttaataaactg

SEQ ID NO: 29255 - DNA, 693 bp, Zea Mays
atggaaactcacccgcatcccgccattatcgcatacctcgccccctcgcggcccctccaccgtgatgctcgcccaagctcgatggaaagcgcccgcaatcacccagatcgccctcgctcccgcaatcgccctcgcgcccgcaatccccctctgcgcgcgcatggaagatggaacgaggctcaccctgtcgtgcccccgcggcctctccctcccctaccacccacgcgtgatgcccttatggccccacacccgcggcacagtgatgaccactgtatccccgccaccgacgcagagccttcttcggggctgttggatctccgcggcggctagggaaggcgccatggaggtggcccccatggcaggagctctcgtcgagggcaaattggacccagtcgttggtagacaagatcagattgagcgtgttactcagattttgggcaggcggacaaagaacaacccctgcctaattggagagcctggtgttggaaagactgctattgctgaggggcttgctcagcgtattgctaattgggatgttcctgaaacaattgaaggaaagaagagcgtcggctccatggacgaggacgatgacagtcccgcctccggctccggtcgccataagaagaagctgcgcctcatcatgggcctccacgacggatcagcaaagccaccgaccgtcgcttcatcgagcac

SEQ ID NO: 29256 - DNA, 1503 bp, Zea Mays
atggaggtggcccccatggcaggagctctcgtcgagggcaaattggacccagtcgttggtagacaagatcagattgagcgtgttactcagattttgggcaggcggacaaagaacaacccctgcctaattggagagcctggtgttggaaagactgctattgctgaggggcttgctcagcgtattgctaattgggatgttcctgaaacaattgaaggaaagaagagcgtcggctccatggacgaggacgatgacagtcccgcctccggctccggtcgccataagaagaagctgcgcctcatcatgggcctccacgacggatcagcaaaggttcaaacaggaatatctctgaacaccttgggctctctaggctatgagatagatcatggatggagacagagaatagcagtgtgtcattctaaactgggagtggtggtcaacccaactcagcaggccgctgccgatgcaatgccaacacaacctcgcggtgtcgctgtgctttctgtgatgctatttggctggcgcacagagttcagtggcgagaaggtacaattttccagtgattgttgtattcaaactggccgactttaatttccactgcttttctccatgggaaatgatgcatttgatgatatgagttgcagaagtacatgtgggtgaggcaggggttgatatttccatttttagactacatgaaccggtgagtagtagtttaaaatgcataactacatggacaactgttagaatgctgctaaaacacctgctcgagtagttttgacaactttactatggttagaatatgccagcttgtgccttaagaacaagttgtatttgtcatttcagatttcaagggcagacagaactaagcagttgcaaacctgttgatttccggagggcagtagaagaggcctttttggctgatcagggattctcagaagtagtcgtacattgcagcaccaagggcatatatgctcatacaaatgtttcccaggagttatttttttcaaaacacagttgaaaggttgcacttcaattatgagaactaaatctaactcttttcaattctaaaaaaacaggtgaatatttagcgaccacagaggcacagaccattacagggatatactttaacacaagcaatacctcttctcccatcagaaaaacagaaggatcagcagacatctcttcatccagtgcagagttcaatgcatcacggacagtcatctgaacatgtagaacaataatgtatatgacttgccacataaagatgtagaaactacagcatgggaataaaacactagcgggtgctggcatagggtcaaaatagagtaaaaatcaagaatgaaacaatgcataaaatgcataaacacaatgatttgatgacacatcaaatgaaccccaagtaaaaaattaacataagaaactaccaagtgtgcttcatatatatgtatcagtatatatatacaatgatgtatattctctgtttttcgagcatacaaatgtttccca

SEQ ID NO: 29257 - DNA, 1266 bp, Zea Mays
atggaggtggcccccatggcaggagctctcgtcgagggcaaattggacccagtcgttggtagacaagatcagattgagcgtgttactcagattttgggcaggcggacaaagaacaacccctgcctaattggagagcctggtgttggaaagactgctattgctgaggggcttgctcagcgtattgctaattgggatgttcctgaaacaattgaaggaaagaagagcgtcggctccatggacgaggacgatgacagtcccgcctccggctccggtcgccataagaagaagctgcgcctcatcatgggcctccacgacggatcagcaaaggttcaaacaggaatatctctgaacaccttgggctctctaggctatgagatagatcatggatggagacagagaatagcagtgtgtcattctaaactgggagtggtggtcaacccaactcagcaggccgctgccgatgcaatgccaacacaacctcgcggtgtcgctgtgctttctgtgatgctatttggctggcgcacagagttcagtggcgagaagaagtacatgtgggtgaggcaggggttgatatttccatttttagactacatgaaccgatttcaagggcagacagaactaagcagttgcaaacctgttgatttccggagggcagtagaagaggcctttttggctgatcagggattctcagaagtagtcgtacattgcagcaccaagggcatatatgctcatacaaatgtttcccaggagttatttttttcaaaacacagttgaaaggttgcacttcaattatgagaactaaatctaactcttttcaattctaaaaaaacaggtgaatatttagcgaccacagaggcacagaccattacagggatatactttaacacaagcaagcaatacctcttctcccatcagaaaaacagaaggatcagcagacatctcttcatccagtgcagagttcaatgcatcacggacagtcatctgaacatgtagaacaataatgtatatgacttgccacataaagatgtagaaactacagcatgggaataaaacactagcgggtgctggcatagggtcaaaatagagtaaaaatcaagaatgaaacaatgcataaaatgcataaacacaatgatttgatgacacatcaaatgaaccccaagtaaaaaattaacataagaaactaccaagtgtgcttcatatatatgtatcagtatatatatacaatgatgtatattctctgtttttcgagcatacaaatgtttccca

SEQ ID NO: 29258 - DNA, 2017 bp, Zea Mays
accacgtctcccctcacctggctctccacctgccacctcacgcgcgcccctgctctgtctcttttggctccgctgaggccgagcacacacaacaaattctctctctcctctctctctctctctctcacacacacactctgctccctgtgcggaggacgggccggccgcatggggtgggggtggacggcgctggcggcggccgcgatggcgtacgtggcggtgaagctgatggaggtgctgtggtggcggccgcggcggctggagcagcacttcgcgcggcaggggataaggggcccccgctaccgcttcttcgtcggctgcgtccgcgagatggtggcgctcatggtggccgcctccgccaagccaatgccgcgcccctaccgctcccacaacgtcctcccgcgcgtcctcgccttctaccaccactggaagaaaatctacggttcctgccgaccaagaagaacacgacctcgtggaagctggacaaggagatcaggaagaacctggcgacgctgatcggccggcggcaggaagccgcggacgacgagaagctcagcggctgtgccaaggacctccttggtctcctgatcaacgcgggcagcaacggcggcaaggtgagccccatcaccgtgaacgacatagtggaggagtgcaagacgttcttcttcgcgggcaagcagaccacgtcgaacctcctgacatggaccacagtcctgctcgccatgcaccccgagtggcaggagctcgcccggcaggaggtgctccaagtctgcggggcgcgtgacatcccctcccgcgagcagctcaccaagctcaagacagtaagctcctgtcatgtcccccccgcaccggccgcctgacagaatcctctaacaacgggcggtgagctgacgcatgctgctggttcctctctggcagctcgggatgatcctgaacgagacgctgcggctgtacccgccggcggtggcgacggtgcgtcgcgccaaggcggacgtggagctgggcgggtgcctgatcccgcgcggcacggagctgctgatcccgatcatggccgtgcaccacgacgcgcggctgtgggggccggacgccacgcagttcaacccggcgcggttcgccaggggcgcggcgcaggcggccaggcaccccacggcgttcatcccgttcgggctgggcgcgcggatgtgcatcggccagaacctggcgctcctggagtctaagctcacgctggccatcgtcctccagcggttcgacttccggctgtcgcccagctacctccacgcgccgacggtgctgatgctcctccacccgcagtacggggcgcccgtggtcttccggccgcgaccgtctgagccgtccgatcgcgacagtagggatgtgtgaggagatgacggagctcgtactaaccttgtcagtgtcaattgcgcctggcatgatgaccaataaccacctccgcagcatgctgctttgccctcaagagcagagaccaaacgagcagagcagccgccgccaccgccacagcccagcaccaccagaggaacaagtgactagaaggagcaccaccgtaccgtactaagtactaacaaatatatcctgctgaaggtgccagcagcagcagcagcttagactagtagagcagagtagaaggcttgaccagtgcctcccaatttttcagtcatttgggttgatgatttccttccttccatgaggttttgccaggtgtggttggtgtatgaaggattgcaaaaattgtacacacgtcgtgttccgtttgttcttttgatctgcgatgatacgtacatgggaggaaaaggtgagcagggaaaagggggaatgcaggcgtatggtatgggaggtgcatgcatgatgtttgaggatcgtggcgccacagtgcgtctgcttacttccctgtcattgttctctcctccgtggtcctccttgcgatgcagaccagaagccattaataaaggaagagatgggtgccctgctgctgggtgctggccatttaagagtgccttgc

SEQ ID NO: 29259 - DNA, 3461 bp, Zea Mays
accacgtctcccctcacctggctctccacctgccacctcacgcgcgcccctgctctgtctcttttggctccgctgaggccgagcacacacaacaaattctctctctcctctctctctctctctctcacacacacactctgctccctgtgcggaggacgggccggccgcatggggtgggggtggacggcgctggcggcggccgcgatggcgtacgtggcggtgaagctgatggaggtgctgtggtggcggccgcggcggctggagcagcacttcgcgcggcaggggataaggggcccccgctaccgcttcttcgtcggctgcgtccgcgagatggtggcgctcatggtggccgcctccgccaagccaatgccgcgcccctaccgctcccacaacgtcctcccgcgcgtcctcgccttctaccaccactggaagaaaatctacggcaagagttcctccaggccctctctcccggtagcacggctgctccctgctctgttcggttacggaacctgagagcaaggaccgagcccgatcggcgagaggggagccaatcaatcaacatgagcaaagcaatcttgaccagagaccagcaccaacatgagctcccatcaggttgcggtcgcgccatgcgtctcgctcccaggatgctgctttgctgccgcctttgggtgacatgcatttagtggcatgtcgaggcgagcctcctgggtctgtcggagcggtttgccgtagttgtctctcgttttcgctgtcccccggctgcagctaggggtggtaatggattgtgatccaaatagttcttcacaaaatgtcaaggccctaaataaattatagttcaaaaatgactagaaataaagcccgatcctaacccgcttcgatccttaaatcttatagtgcaaaaattatagcccattgtcagccctagctgcagcccggttaggtggccagggtctatttcctacttgccgccccgcccccgcgcggccctcgacgtgagcctacacgtcccccttcctgctccccgccaccgtccccgtctccatcgcattcaactccagcttgccctgccctgcgcccgtcgcctccgggcgcacccgccgcgacctgtccgtccctggcccaaccgtcacgccgctgcggccaccacctgctctgctccgcccttctcttcgtgtcgtcttgtgatccctgcctgcctactgggtgctggctggctggctggctacagtgctggtgcggcagtgcgcgggtacagtgtaatgcggcgggcgctgccacagggggaggagctgggtatcgtagcgtagcgtacctgctccgcgcgtacgtacgcatgttgtgcctgcgcctgcatcgccggcacctctccctgccatgtcctgtccctgcccccttggcagctggcgggatgctgctgatgtggcggaacatggcctccctgcccccaatcattggctgcctcgtcgccttgtcacgctcacgcccgtgcctgattttgcctctccctccaggttccacgttcctgatatggttcggcccgacgccgaggctcgccgtcgccgacccggacctcattcgggagatcctcctgtcccgcgccgatcacttcgaccgctacgagtcgcacccgatggtgcgccagctcgagggcgaggggctcgtcagcctgcgcggcgacaagtgggcacaccggcgcaaggtgctcacgccggcgttccacatggagaacctcaagctgctgctgccgttcgtcgggaggacggtggtcgacgtggtggacaagtggcacgacatggccgccgcggcgtccggcgaggtcgagatcgacgtgtccgagtggttccaggtggtgacggaggacgccatcacccgtacggcgttcggccggagctacgaggacggcaaggccgtcttcaagctccagacccaactcatggccttcgcctccgaggcgtttcgcaaggtcttcatccctggatacaggttcctgccgaccaagaagaacacgacctcgtggaagctggacaaggagatcaggaagaacctggcgacgctgatcggccggcggcaggaagccgcggacgacgagaagctcagcggctgtgccaaggacctccttggtctcctgatcaacgcgggcagcaacggcggcaaggtgagccccatcaccgtgaacgacatagtggaggagtgcaagacgttcttcttcgcgggcaagcagaccacgtcgaacctcctgacatggaccacagtcctgctcgccatgcaccccgagtggcaggagctcgcccggcaggaggtgctccaagtctgcggggcgcgtgacatcccctcccgcgagcagctcaccaagctcaagacactcgggatgatcctgaacgagacgctgcggctgtacccgccggcggtggcgacggtgcgtcgcgccaaggcggacgtggagctgggcgggtgcctgatcccgcgcggcacggagctgctgatcccgatcatggccgtgcaccacgacgcgcggctgtgggggccggacgccacgcagttcaacccggcgcggttcgccaggggcgcggcgcaggcggccaggcaccccacggcgttcatcccgttcgggctgggcgcgcggatgtgcatcggccagaacctggcgctcctggagtctaagctcacgctggccatcgtcctccagcggttcgacttccggctgtcgcccagctacctccacgcgccgacggtgctgatgctcctccacccgcagtacggggcgcccgtggtcttccggccgcgaccgtctgagccgtccgatcgcgacagtagggatgtgtgaggagatgacggagctcgtactaaccttgtcagtgtcaattgcgcctggcatgatgaccaataaccacctccgcagcatgctgctttgccctcaagagcagagaccaaacgagcagagcagccgccgccaccgccacagcccagcaccaccagaggaacaagtgactagaaggagcaccaccgtaccgtactaagtactaacaaatatatcctgctgaaggtgccagcagcagcagcagcttagactagtagagcagagtagaaggcttgaccagtgcctcccaatttttcagtcatttgggttgatgatttccttccttccatgaggttttgccaggtgtggttggtgtatgaaggattgcaaaaattgtacacacgtcgtgttccgtttgttcttttgatctgcgatgatacgtacatgggaggaaaaggtgagcagggaaaagggggaatgcaggcgtatggtatgggaggtgcatgcatgatgtttgaggatcgtggcgccacagtgcgtctgcttacttccctgtcattgttctctcctccgtggtcctccttgcgatgcagaccagaagccattaataaaggaagagatgggtgccctgctgctgggtgctggccatttaagagtgccttgc

SEQ ID NO: 29260 - DNA, 1094 bp, Zea Mays
aaaatagctcagtcccgaatcgaacaacctacccggctaccccaccacgaaaggtctcccgcacaagtcacaacagaacaacctacccccacaagcagaaggatccgggcggccaccgagagtcactggaagaagctcgtccggcgccccgcgacgagacgacggcctcctcctccgctccgctgaagaacgacctccccgctgacagctggtctcaactactggaaactcttccccttcctaatataaaatggatatgccccactgcaccttcaagacccgtgtcagtgtttggcgggttcccctccacagcatggtttgatgttgctgatctttctgaggatgctcctgatgacattgagggaatcgatgcctcagcagcacatgttgcgaatttgttgtcaactgaacctgctgacatcaaacttggtgttggcggctttagtatgggtgctgctactgctctgtactctgcaacttgctttgcccatggaaaatatgggaatggcaaaccattccctgtgaacctaagtcttgccgttggtcttagtggctggcttccatgtgccaggaccttgaagaacagaattgaagcctcaccagagtgtgcacaaaaggcttcatcaatacctcttttgctctgtcatggaaaagctgatgatgtagttgcctacaagcacggggagagatctgctggtgccttgaaggcaaatggcttttccaatgtgctcttcaaggcatacaatagtcttgggcactacactgttccagaggagatggatgaagtttgcaaatggatcacagcaaatttggggcttggcactaagtcatcttgattggaatttgatgcgagaaagactcgcagggacggtgtccaaataataccggtatcttttccaggaggtatatggtttaatagcaaatttgggcttgggtatacggccatgttctagcttttcttaacgcagacgtgtctgcgaatgatgtatgcttataatatctatattttggtctacgtcgatttggttgtggcacggataatgtttgtttcaaatattctgctctgcgaattggaattgtgatgttttgctttc

SEQ ID NO: 29261 - DNA, 1182 bp, Zea Mays
atcgaacaacctacccggctaccccaccacgaaaggtctcccgcacaagtcacaacagaacaacctacccccacaagcagaaggatccgggcggccaccgagagtcactggaagaagctcgtccggcgccccgcgacgagacgacggcctcctcctccgctccgctgaagaacgacctccccgctgacaggtgcgaagaggccgttcgagtacgggagaacgcatgtggtgaggcccaagggcacgcacaaggccaccattgtctggctccatggacttggggacaatggagccagctggtctcaactactggaaactcttccccttcctaatataaaatggatatgccccactgcaccttcaagacccgtgtcagtgtttggcgggttcccctccacagcatggtttgatgttgctgatctttctgaggatgctcctgatgacattgagggaatcgatgcctcagcagcacatgttgcgaatttgttgtcaactgaacctgctgacatcaaacttggtgttggcggctttagtatgggtgctgctactgctctgtactctgcaacttgctttgcccatggaaaatatgggaatggcaaaccattccctgtgaacctaagtcttgccgttggtcttagtggctggcttccatgtgccaggaccttgaagaacagaattgaagcctcaccagagtgtgcacaaaaggcttcatcaatacctcttttgctctgtcatggaaaagctgatgatgtagttgcctacaagcacggggagagatctgctggtgccttgaaggcaaatggcttttccaatgtgctcttcaaggcatacaatagtcttgggcactacactgttccagaggagatggatgaagtttgcaaatggatcacagcaaatttggggcttggcactaagtcatcttgattggaatttgatgcgagaaagactcgcagggacggtgtccaaataataccggtatcttttccaggaggtatatggtttaatagcaaatttgggcttgggtatacggccatgttctagcttttcttaacgcagacgtgtctgcgaatgatgtatgcttataatatctatattttggtctacgtcgatttggttgtggcacggataatgtttgtttcaaatattctgctctgcgaattggaattgtgatgttttgctttc

SEQ ID NO: 29262 - DNA, 1757 bp, Zea Mays
cccgcacaagtcacaacagaacaacctacccccacaagcagaaggatccgggcggccaccgagagtcactggaagaagctcgtccggcgccccgcgacgagacgacggcctcctcctccgctccgctgaagaacgacctccccgctgacagaggcggagcgctccgcagaggcgcagagagaggtggcgtctgccttgctgcgctgcgggtctgcggtctcctgcagattcccgcacccacaaggccagaggcgacccaccagcgccacccaaaaaaggcgcacccctttccgccgcccaaatctccctttaccccgatccccaagccccgccgctgctccctcgtacgcaccgttggcgggccttgtagcgaggagggggtgcggaggcgccgcgactgttcgcgggatgagcttcggcggcagcagctccctcgcatcaggtgcgaagaggccgttcgagtacgggagaacgcatgtggtgaggcccaagggcacgcacaaggccaccattgtctggctccatggacttggggacaatggagccagctggtctcaactactggaaactcttccccttcctaatgtaagttaggacatagattcgaaatatgcaatgttttaatttcttatggtggtttaggccctgtttggaatctctagaagtaatagttagctactaaaaattatttgttgggttccaaacaccctcagctaataccacaactaattgttagctatgagatagctaacaattagttcattagctgactctaacccagctgataatttattagctagctagctattagctctaggggttccaaacaggggcttaaagcttaatctcacaccttgttgctcaaatccaatacgatatttcttcctgtatatctttgctgtgctcagataaaatggatatgccccactgcaccttcaagacccgtgtcagtgtttggcgggttcccctccacagcatggtttgatgttgctgatctttctgaggatgctcctgatgacattgagggaatcgatgcctcagcagcacatgttgcgaatttgttgtcaactgaacctgctgacatcaaacttggtgttggcggctttagtatgggtgctgctactgctctgtactctgcaacttgctttgcccatggaaaatatgggaatggcaaaccattccctgtgaacctaagtcttgccgttggtcttagtggctggcttccatgtgccaggaccttgaagaacagaattgaagcctcaccagagtgtgcacaaaaggcttcatcaatacctcttttgctctgtcatggaaaagctgatgatgtagttgcctacaagcacggggagagatctgctggtgccttgaaggcaaatggcttttccaatgtgctcttcaaggcatacaatagtcttgggcactacactgttccagaggagatggatgaagtttgcaaatggatcacagcaaatttggggcttggcactaagtcatcttgattggaatttgatgcgagaaagactcgcagggacggtgtccaaataataccggtatcttttccaggaggtatatggtttaatagcaaatttgggcttgggtatacggccatgttctagcttttcttaacgcagacgtgtctgcgaatgatgtatgcttataatatctatattttggtctacgtcgatttggttgtggcacggataatgtttgtttcaaatattctgctctgcgaattggaattgtgatgttttgctttc

SEQ ID NO: 29263 - DNA, 1215 bp, Zea Mays
cccgcacaagtcacaacagaacaacctacccccacaagcagaaggatccgggcggccaccgagagtcactggaagaagctcgtccggcgccccgcgacgagacgacggcctcctcctccgctccgctgaagaacgacctccccgctgacagcgaggagggggtgcggaggcgccgcgactgttcgcgggatgagcttcggcggcagcagctccctcgcatcaggtgcgaagaggccgttcgagtacgggagaacgcatgtggtgaggcccaagggcacgcacaaggccaccattgtctggctccatggacttggggacaatggagccagctggtctcaactactggaaactcttccccttcctaatataaaatggatatgccccactgcaccttcaagacccgtgtcagtgtttggcgggttcccctccacagcatggtttgatgttgctgatctttctgaggatgctcctgatgacattgagggaatcgatgcctcagcagcacatgttgcgaatttgttgtcaactgaacctgctgacatcaaacttggtgttggcggctttagtatgggtgctgctactgctctgtactctgcaacttgctttgcccatggaaaatatgggaatggcaaaccattccctgtgaacctaagtcttgccgttggtcttagtggctggcttccatgtgccaggaccttgaagaacagaattgaagcctcaccagagtgtgcacaaaaggcttcatcaatacctcttttgctctgtcatggaaaagctgatgatgtagttgcctacaagcacggggagagatctgctggtgccttgaaggcaaatggcttttccaatgtgctcttcaaggcatacaatagtcttgggcactacactgttccagaggagatggatgaagtttgcaaatggatcacagcaaatttggggcttggcactaagtcatcttgattggaatttgatgcgagaaagactcgcagggacggtgtccaaataataccggtatcttttccaggaggtatatggtttaatagcaaatttgggcttgggtatacggccatgttctagcttttcttaacgcagacgtgtctgcgaatgatgtatgcttataatatctatattttggtctacgtcgatttggttgtggcacggataatgtttgtttcaaatattctgctctgcgaattggaattgtgatgttttgctttc

SEQ ID NO: 29264 - DNA, 1498 bp, Zea Mays
cccgcacaagtcacaacagaacaacctacccccacaagcagaaggatccgggcggccaccgagagtcactggaagaagctcgtccggcgccccgcgacgagacgacggcctcctcctccgctccgctgaagaacgacctccccgctgacagaggcgcagagagaggtggcgtctgccttgctgcgctgcgggtctgcggtctcctgcagattcccgcacccacaaggccagaggcgacccaccagcgccacccaaaaaaggcgcacccctttccgccgcccaaatctccctttaccccgatccccaagccccgccgctgctccctcgtacgcacgtacgcaccgcgtcgccctttatctgctcccgagggccgctggtcggctgctgaatcgtcgccgttgttgctgggactgcagcgttggcgggccttgtagcgaggagggggtgcggaggcgccgcgactgttcgcgggatgagcttcggcggcagcagctccctcgcatcaggtgcgaagaggccgttcgagtacgggagaacgcatgtggtgaggcccaagggcacgcacaaggccaccattgtctggctccatggacttggggacaatggagccagctggtctcaactactggaaactcttccccttcctaatataaaatggatatgccccactgcaccttcaagacccgtgtcagtgtttggcgggttcccctccacagcatggtttgatgttgctgatctttctgaggatgctcctgatgacattgagggaatcgatgcctcagcagcacatgttgcgaatttgttgtcaactgaacctgctgacatcaaacttggtgttggcggctttagtatgggtgctgctactgctctgtactctgcaacttgctttgcccatggaaaatatgggaatggcaaaccattccctgtgaacctaagtcttgccgttggtcttagtggctggcttccatgtgccaggaccttgaagaacagaattgaagcctcaccagagtgtgcacaaaaggcttcatcaatacctcttttgctctgtcatggaaaagctgatgatgtagttgcctacaagcacggggagagatctgctggtgccttgaaggcaaatggcttttccaatgtgctcttcaaggcatacaatagtcttgggcactacactgttccagaggagatggatgaagtttgcaaatggatcacagcaaatttggggcttggcactaagtcatcttgattggaatttgatgcgagaaagactcgcagggacggtgtccaaataataccggtatcttttccaggaggtatatggtttaatagcaaatttgggcttgggtatacggccatgttctagcttttcttaacgcagacgtgtctgcgaatgatgtatgcttataatatctatattttggtctacgtcgatttggttgtggcacggataatgtttgtttcaaatattctgctctgcgaattggaattgtgatgttttgctttc

SEQ ID NO: 29265 - DNA, 978 bp, Zea Mays
ggtgtgcttagattatagatgatgaagtaatggacagtatgtcaataagctcggtaccttctccagatgttatgaactaactgtacactgtgctggtctcaactactggaaactcttccccttcctaatataaaatggatatgccccactgcaccttcaagacccgtgtcagtgtttggcgggttcccctccacagcatggtttgatgttgctgatctttctgaggatgctcctgatgacattgagggaatcgatgcctcagcagcacatgttgcgaatttgttgtcaactgaacctgctgacatcaaacttggtgttggcggctttagtatgggtgctgctactgctctgtactctgcaacttgctttgcccatggaaaatatgggaatggcaaaccattccctgtgaacctaagtcttgccgttggtcttagtggctggcttccatgtgccaggaccttgaagaacagaattgaagcctcaccagagtgtgcacaaaaggcttcatcaatacctcttttgctctgtcatggaaaagctgatgatgtagttgcctacaagcacggggagagatctgctggtgccttgaaggcaaatggcttttccaatgtgctcttcaaggcatacaatagtcttgggcactacactgttccagaggagatggatgaagtttgcaaatggatcacagcaaatttggggcttggcactaagtcatcttgattggaatttgatgcgagaaagactcgcagggacggtgtccaaataataccggtatcttttccaggaggtatatggtttaatagcaaatttgggcttgggtatacggccatgttctagcttttcttaacgcagacgtgtctgcgaatgatgtatgcttataatatctatattttggtctacgtcgatttggttgtggcacggataatgtttgtttcaaatattctgctctgcgaattggaattgtgatgttttgctttc

SEQ ID NO: 29266 - DNA, 1289 bp, Zea Mays
tgagaactgcctgctgtcctctccccaaccccatttcatttctcgggcgcacttggaggagacgggcaaagccgctgagcaagttgcacttaaccctgataagtggctagagttcaagctccaagagaaggcaacagtcagtcacaactcacagttattcaggttttcatttgatccatcaactaaactgggacttgatgttgcctcgtgcctcatcacaagggcacctataggcgaggaagctgagggaagaaggaaatatgttattcgcccgtacacacctatctctgatccagactctaaaggatattttgacctactgatcaaggtttaccctgatggaaaaatgagtcagtattttgcaagtttgaagccaggagatgttgttgaagtcaaagggcccattgaaaagctcagatacaacccgaacatgaaaaaacaaattgggatgatcgctggtggttctggtataacaccaatgctgcaggttgtcagggctatcctcaaaaaccctaatgacaacactcaggtctccttaatttacgccaatgtgtcaccagatgatatattgctcaaaagagaactggatagacttgccagtagctatcctaacttcaaggtattttatacagttgataaaccgtcaactgactggaggggtggtgttggttttgtatcaaaggacatggttttgaaaggtttgccaggcccagcggaggactctctgattcttgtttgtggtccaccaggaatgatgaatcacatatctggagacaaggccaaggatagatcacagggcgagctctctggcgttctgaaagacttaggatacaccgcagagatggtatacaaattctgagaagacagtagtagactctgctgacgcacacacattcttgctgccctgcagtcaataaaccacacctgaactttttgttgttgctgctgcatctggctctgaactggaaaccgttttgacttgtttcctgatgtaataataattttcatccgagaattctaggtgtagcttcgggtgttctgcagatgccacgctgcgatgtttgcgaaaattctagtatgctggcacttgagataagagctatcgagttctactggatagctgcagcgaattatggtatgttggaagttggaacccagtcatttgtcgcaatctggcgcgtatgtgccgtggcatctaggaactcgttgccgtatggtggatgtcgtaatcgtagagagagagagatgctttgttctgttgccgttagcttctgctgggaaccttgaac

SEQ ID NO: 29267 - DNA, 1473 bp, Zea Mays
cctttctctccgaatttgatcggatctaggtttcgtcgatcacttaaccctgataagtggctagagttcaagctccaagagaaggcaacagtcagtcacaactcacagttattcaggttttcatttgatccatcaactaaactgggacttgatgttgcctcgtgcctcatcacaagggcacctataggcgaggaagctgagggaagaaggaaatatgttattcgcccgtacacacctatctctgatccagactctaaaggatattttgacctactgatcaaggtttaccctgatggaaaaatgagtcagtattttgcaagtttgaagccaggagatgttgttgaagtcaaagggcccattgaaaagctcagatacaacccgaacatgaaaaaacaaattgggatggtaagatagccttaacttgctttgaccttttgatttcatccctgcaaggattttttttcgaaaacgcaggagagctgcgtatcaatatattaagaagaaagggtgaggcaagataatttttcatgtatttgattcaattgtttttagctcgtatgtttgttttaccttgattagagagtaaccctgcagatactatagctgttgaataatgtgcatgcctttggttccagatcgctggtggttctggtataacaccaatgctgcaggttgtcagggctatcctcaaaaaccctaatgacaacactcaggtctccttaatttacgccaatgtgtcaccagatgatatattgctcaaaagagaactggatagacttgccagtagctatcctaacttcaaggtattttatacagttgataaaccgtcaactgactggaggggtggtgttggttttgtatcaaaggacatggttttgaaaggtttgccaggcccagcggaggactctctgattcttgtttgtggtccaccaggaatgatgaatcacatatctggagacaaggccaaggatagatcacagggcgagctctctggcgttctgaaagacttaggatacaccgcagagatggtatacaaattctgagaagacagtagtagactctgctgacgcacacacattcttgctgccctgcagtcaataaaccacacctgaactttttgttgttgctgctgcatctggctctgaactggaaaccgttttgacttgtttcctgatgtaataataattttcatccgagaattctaggtgtagcttcgggtgttctgcagatgccacgctgcgatgtttgcgaaaattctagtatgctggcacttgagataagagctatcgagttctactggatagctgcagcgaattatggtatgttggaagttggaacccagtcatttgtcgcaatctggcgcgtatgtgccgtggcatctaggaactcgttgccgtatggtggatgtcgtaatcgtagagagagagagatgctttgttctgttgccgttagcttctgctgggaaccttgaac

SEQ ID NO: 29268 - DNA, 1236 bp, Zea Mays
ctccgaatttgatcggatctaggtttcgtcgatcacttaaccctgataagtggctagagttcaagctccaagagaaggcaacagtcagtcacaactcacagttattcaggttttcatttgatccatcaactaaactgggacttgatgttgcctcgtgcctcatcacaagggcacctataggcgaggaagctgagggaagaaggaaatatgttattcgcccgtacacacctatctctgatccagactctaaaggatattttgacctactgatcaaggtttaccctgatggaaaaatgagtcagtattttgcaagtttgaagccaggagatgttgttgaagtcaaagggcccattgaaaagctcagatacaacccgaacatgaaaaaacaaattgggatgatcgctggtggttctggtataacaccaatgctgcaggttgtcagggctatcctcaaaaaccctaatgacaacactcaggtctccttaatttacgccaatgtgtcaccagatgatatattgctcaaaagagaactggatagacttgccagtagctatcctaacttcaaggtattttatacagttgataaaccgtcaactgactggaggggtggtgttggttttgtatcaaaggacatggttttgaaaggtttgccaggcccagcggaggactctctgattcttgtttgtggtccaccaggaatgatgaatcacatatctggagacaaggccaaggatagatcacagggcgagctctctggcgttctgaaagacttaggatacaccgcagagatggtatacaaattctgagaagacagtagtagactctgctgacgcacacacattcttgctgccctgcagtcaataaaccacacctgaactttttgttgttgctgctgcatctggctctgaactggaaaccgttttgacttgtttcctgatgtaataataattttcatccgagaattctaggtgtagcttcgggtgttctgcagatgccacgctgcgatgtttgcgaaaattctagtatgctggcacttgagataagagctatcgagttctactggatagctgcagcgaattatggtatgttggaagttggaacccagtcatttgtcgcaatctggcgcgtatgtgccgtggcatctaggaactcgttgccgtatggtggatgtcgtaatcgtagagagagagagatgctttgttctgttgccgttagcttctgctgggaaccttgaac

SEQ ID NO: 29269 - DNA, 1142 bp, Zea Mays
ccccgcccacctcttccgtcctcccgttcccgtcccgcacacagactctttctctctcctcccctctctcgtcctctctctctcgtccgatctgcatctgcttttctcccccttgtctgtctctctcctgtccgtggcgtgcgcaaagatttgattttttttttctcggggaggagccggagtccgagcaggagtggcggcgggagggaggagatcctgatctgttgtcgcagcggggaggggaggaccggaggaggaagatggctgcgcaggagcaggagcaggagcaggagaagcagcaggcgaagacgagcaccacgagctcgctcccctccagcagcgagcgctcctccagctccgctcgcaacaacctcacggaaggaggggcggagagcgacgaggagatacggcgggtgccggagatgggcggcgcgtcggcgtcggcctcgtcgggcgccggcgcggacgagcgtcccaagggggaggacggcaagcaggggcaggtggcggcgggggcgcagcctccggcgggcgggaagaagcgcgggcgcacggcgggggacaaggagcagaaccggctgaagcggctgctgcggaaccgcgtgtccgcgcagcaggcgcgggagcggaagaaggcgtacctgacggagctggaggcgaaggccaagggcctggagctccgcaatgcggagctggagcagcgggtgtccacgctccagaacgagaacaacacgctccgccagattctgaagaacacgacggcgcacgcgagcaagaggtccggcggcggcggcggcggtggcggcaagggcggagacggcggcaagaagcaccacctcgccaagagctagtgagaaacgagagagggagctgccttgcggtttggcaattcgattcaagattactgtacgctgccagctcttggagagaaaaaaagaagttttcggtgcatgtaaataaccatgcgcgggaaagaaaaacgtgataacaatcacacgacgtcaagcggcgagggtctgaattaaggtcatggttgtttacctctagtagattatataatacaacttaaataaagtaacgatctgtttaaaacctccttattatgttcattagtggattatataatttaaacagggactaag

SEQ ID NO: 29270 - DNA, 1038 bp, Zea Mays
ccccgcccacctcttccgtcctcccgttcccgtcccgcacacagactctttctctctcctcccctctctcgtcctctctctctcgtccgatctgcatctgcttttctcccccttgtctgtctctctcctgtccgtggcgtgcgcaaagatttgattttttttttctcggggaggagccggagtccgagcaggagtggcggcgggagggaggagatcctgatctgttgtcgcagcggggaggggaggaccggaggaggaagatggctgcgcaggagcaggagcaggagcaggagaagcagcaggcgaagacgagcaccacgagctcgctcccctccagcagcgagcgctcctccagctccgctcgcaacaacctcacggaaggagattctgaagaacacgacggcgcacgcgagcaagaggtccggcggcggcggcggcggtggcggcaagggcggagacggcggcaagaagcaccacctcgccaagagctagtgagaaacgagagagggagctggttcgtgccctgctcgcgctcgcctgatctgaccattgctggcgtgttgctgttcctgacgacgccttctctttttcttcttttctcctactgttacccgtgggtttcgtctcttgcctcgctgatgcactgttttaactgttagccatcccgtctactcaccagtgaacactgctgctagttaatttctcggtggtttagggtgccgtgccagaacgccgtgtaacttcgttcttgtactgtcttgtagttcagccttgcggtttggcaattcgattcaagattactgtacgctgccagctcttggagagaaaaaaagaagttttcggtgcatgtaaataaccatgcgcgggaaagaaaaacgtgataacaatcacacgacgtcaagcggcgagggtctgaattaaggtcatggttgtttacctctagtagattatataatacaacttaaataaagtaacgatctgtttaaaacctccttattatgttcattagtggattatataatttaaacagggactaag

SEQ ID NO: 29271 - DNA, 995 bp, Zea Mays
taagtatcgttcacagtattgattagcaattatgctggggcgttcttcatcctgctttttgcttccatcttcgccactggtattttggagcttcgatggagtggtgttggcattgaggattggtggagaaatgagcagttttgggtcattggtggcacctctgcacatctctttgctgtgttccaaggtctcttaaaagtgctagcagggatcgacacaaacttcacggtcacatcaaaggcaaccgatgatgatggtgattttgctgagctgtatgtgttcaagtggacaactcttctgatcccccccaccactgtgcttgtgattaacctggttggtatagtggctggagtgtcgtatgctatcaacagtggctaccaatcatggggtccactattcgggaagctgttctttgcaatctgggtgatcctccacctctaccctttcctgaagggtctcatggggaagcagaaccgcacaccgaccatcgtcatcgtttggtccgtccttcttgcttccatattctcgctgctgtgggtgaagatcgaccccttcatatcccctacccagaaggctctttcccgtgggcagtgtggtgtaaactgctgaaatgatccgaactgcctgctgaataacattgctccggcacaatcatgatctaccccttcgtgtaaataccagaggttaggcaagacttttcttggtaggtggcgaagatgtgtcgtttaagttcactctactgcatttggggtgggcagcatgaaactttgtcaacttatgtcgtgctacttatttgtagctaagtagcagtaagtagtgcctgtttcatgttgactgtcgtgactacctgttcaccgtgggctctggactgtcgtgatgtaacctgtatgttggaacttcaagtactgattgagctgtttggtcaatgacattgagggattctctctcttgaaatttatatatgtatttctaatattcatgccatgtcattattg

SEQ ID NO: 29272 - DNA, 3268 bp, Zea Mays
gtttcttctctacttgattgtgatataggagttcatagacatgaatgcctaggtcctatttaaacttacgttgtgttggttgctcttgtacggtcaatagaagaacaaatgaacgattaaggtgagcgtagtaaatgtgtgtacttgtgatgtcgtggtcatgttgcgtaaataaataaaatgttgtcatctttttaatggtgttaatgttgaacgccgacgacgtgtagataactaaagctaacatgtagttatctatggtgtcttccactttaatgtttagttcgccactgtgtctttgtatatcttgtgctatttttgtgctactttcattatattcatacatatgcatcttgcacctcatataggaccgagagatgatgatcgagctagtgatgtggtgccaaccacaagatgcagtcggtggacgacccaaggaaggatggacttaaccagtggatgctcgccaagcgagtacctccccagcaaacactctctaagtgttaaattaaaggcaagccccggttttatgcataaccgttatatatgctattttactgcacttaatgtttgtaggcttgtactgtgcacttaagtgtaggagttgactggaaccttagttgcatgaactcaggattcctattgagatgaatactagtatgctaggtcgagtagctgctttattaaatagggatctcgatagaagtcgagtgatttttctagcactcgcgcgaggtcaggacattgattgtacccactttcatatcatactgatgttggtctgtggacacggatccatggggatgcatggtctacgagatgaaattggaataaggattaacgtgcggatacctgtgtcaagcgtttgaatgtactaaacatatgccgagaaatatggtaaatcggcaagcctagtacctgagtgaacctggcagtggacatatcccctcacgcgtcctgagacgaggtctcccattccggttatggtgggtacaagtgcggtcactgcacgatggccagtcggggtcagtgaggcattgtacgccaaggcggtgagccctgatctgctgacggggaatcgatggggacggttgatgtgtgtggggacggagtgcccctacatgtcgtgtgtttaggtttaccttgcaaggataaaaactcgattcgaatcgtctgcttctcgcagctaatgagactgcttgatccattgtactgcattgagtaataagtggaaatgaggtgactgagaaaagatgttgattggtaaaaatgtttgataccatgtatgattagctaggtacacatctagtctaaaggattctactaaaacttgaaaagctaaaacttgtttttagacttagctagtgcttttggcaaaccaaccccctcagccaaatagctgcatgtctagaggtagaggagtagactcctcacaccgggtaagtctagctgagtattagtatacccagccttgcttgtggcacaatttttgcaggtactccttaggatgattggttgatggtgcgacttggccttcatccctgccaccgggatagatggtcgagtgggttactgcttccgcaggagaggaccaggaggagtagtgtggccaggcttcgccatgttactcggttcttctccgttagttatttccgctgcatcaaaatttatggttattatttctgaaactccgataatgcaatcactattgatacttattaaatttgtggtattatgctttattgtctttctctgtgcctcaccttcgagtgagctagtggtattcgatcctggataagtggctttatcggactagatccgagggactgacgggttattcctgtttaagtgtgttgctgcccttaagggtgcgacttgggcacttaagctggaataattcgggcggttccgccacagctgatatcggagcgaataccatcacagagaagtcaataagtcatgattaccaaccttttctaaaagtaaaacttgctagaaacccaggttggatagatcgtcaggacgatcaggatagacttaggacgtgaagccttaggaaatagatgggtagctaggtggctagttatttaggccataaaggctactactactattatgaaggatgttatagcaagcatccgaaaaattagttaggtctgagaagacgactagaatgagcatgcatgcatcatgattgtcgcataattgtctcttgtgcactaacatgcttctctcacctatattccaataataagaacttgtgaattgttggggaccttcggcgtccgaaggtcctcaaaaacagaatttaacagtatttctgtagtacaatatgtgaacaggtaccctcagactaaaatcggcattgcagcagaccggaataatacgaagcttgatacagagccgaaggtgttgagcaggaaagcttcggcgtaacggcagagagtgaaaccgacttaaagatgaaaaggctattcagacctcaatagattactatagagttattgtcagatgtaaagggcatgaatgtaattttgtaagggctgtgtcccgtgtctataaataggtgaacagtatccccgtactgttcacgctgacttggcattcgctttttgcgtcacgcttgtacaatcatttccttccgattgaaggtacacctgttgttcaataatatttttgtttatactcaataataataaatgattgttcatgttttcctttacattcttcatatttcgtccttcgtcattatttgattaatttatgaaggtatgtccttcataaccttcatccgcaagtcattatgtcctaagggaaatagtgcttcggaggacgaagggcattaacgattaatactttctatgttgccttgttcttaaactcttagcacttgagaacaagtccccaacattggcgcccacctccggtgaactcacttacatttcttgagcttttcaacatcttcggcaagcatcaccttcgtcatgccgccgaagaaggcttcagcaccaggggctagcacgctgcagccgttggaccccaatcaagatgtcctttctcttagagaggcacgaagccagaagaggaaggctgccagtccaacacctccagaggatgatctagatcaggagattcaaaatctggaaatccttcagcagcaggttcaacgcaagaaggaaaaaatggccagggtagctgaattgcagaggcagatagacgaagcctctgaagaagttcgtcatcttgctcaggacgagcaacatcgaag

SEQ ID NO: 29273 - DNA, 8917 bp, Zea Mays
gtttttagttagtttaaaactccgttagttagcgtgctgtgtcgcgcgcttcgtcgcgcgacgaatttatctaatttcagattctatgaatgtgttgcgtcgtgcgcttcgtcgcgcaacgatccattttaatttcaggttgtttaatgtgtaacgtcgcgcgtgtattcatgcgacgttccactttagactcagttcagttgacgtatgccgtcgtgcgtttcgtcgcgtgaagcttaacgtctctttataatttatgcaaagtgtctcgttgtgcgctcggtcgcgcgacgagtcgttgatttccttaattcaatttaaagtgctatgtcgcgcgtctcgccacgcgacgatccttttaatttatcttcatctgcttataatcattagacatgaaacatgactttactttatgctaaacgtagtgtctacattaatgcctttcaattgagcgagtggtttaattcataataatgtaacgtgatcgtttctcgactgtcttttcctctttctctcttaaccgtaattgcgagcccgcgtggaacgtctgtttacttactgcattctattgtatggtgtactgttcttttgtattaaatatgtggatgtatgtatatttgcgctcgcatagagaacgatccggtcggagagcccaaagaactcgcaggagaagcctctgagcagtagtcggttggtggaggcaagtgtcccttgacctatctctgtcctatacattctttaattcacctctcgcattacacatttatacctaaggatgaggtagcttttgttgtccatgtccttgtttacctatttgggtcggattattattgcttagtcttatgctattgctcaactctaatcaaggaacatgatgagaattatcaatgatacgttgttttcccctcttttattatgatgttatacttgtgaccttcaagggggcttgagcggtttctcgagtgcctctccgtaaggacctgttcgttggatgaccgcccgggaaaacagtgcaaccatgagggtggagtgggacgcccttagctgaataattagaggaaccggggtgtagttcgcttagccgttgtgccgtcaatggggctcggtgtatgcggctcgctctgccaaggttgatttgtcccttggggaggagtgcggtacatttaggaaacctaacgggcggctacagccccggagaatctttgtaaaggctacgtagtgatatcctgctgggtcaccttggtagtgatcaatggagagtcatgatctctgggcagaaagggaaatcacagcttgtgggtaaagtgcacaacctctgtagagtgtttgaaaactgatatatcagctgtgctcgcggttatgagcagccaagggagctccagtgattagtggtacttgatcagagatgttcgcattgcaggtggcaatgagattgttggttttggtattgactctgataatggtgagtggtactctttccgtttggaaaggagtacgtttgggttaataacgtgggctgaatctaaaacttggcttcctctactagcaataataataatctgaccaactaaaagcaactgcttgacttaaccccacataaagctagtccactacagccaaacatgatacttgctgagtatgttgatgtgtactcgcccttgctctacacacaaacccccctaggttgtccgcattgcaaccactgctcaggagaagatgaagccgtgaaaggagacttccaggagttccaagaatacgacgagttctaggcgtgggttagcggcaacccccagtcggctgcctgtgaaggccgcttttatctacgtttcgttttcgcactttgatttattgtaaagactatgtggatgtctcagacatatgatgtaaccgactattatttcccttttaatactatttgagcactgtgtgatgatgtccatgttatgtaactgctgtgtacgtgaattgctgatcctggcacgtacatggttcgcattcggtttgccttctaaaaccgggtgtgacataggtggtatcaaagtcgtgctgactgtaggaccgctaacctagagtaaaatggtcgttctaaggattatagacctctgtccttgccttgactttggtatcccttcaaaagttggtcatatcgaccaaacctatgttctactatatatcataccttgctgaaaattgtgttttattctaatccttcgtttatttatggttcattacttgctggtcatactagttctgttctcactcctttgcttgcggtgtcttttgtagatggctcgtcttagacacaccgcacggaagtctgtcatccccttcttaccctctcatctcacggagcgtccgcttcgccgtcccgtggccggtcagtccagtcacttggagaggctgcaccaccgcctgcatgaggagcaggagcgtcgacgacaggagcaggagcagcagggctcttctttctcgctccagcaggagatagagtctgtgaggagctgctcccctgtgcttcccctggaggcgccccctgcaccaccactggacgcgccagcccctggagtagctgctggaggagacccagacgacggaggtggcgacaacagctcaagccacgacaccgacttttctgctgaccaggagccggaaggatgggttgctcgacccatcactcgcgacgctgctcgcgggtgtcacttccacgatgcgctcgacaccctgctacgtcgggcacttgaccggcatacttggtctatcgagtatcgctgtgtggtcttccagcatagtcgcggggtctacccggaccgctgggaggcgacctgcttggtgcgtcgtccggagaacagtctctagggtgctgaggtctgctcagagcactattccatctctaagcgggactcagctgaggcagccatgcaagatgccgcacggcgtgcgctttcgcactactgtttagtgctcggtggggtagctgatggtctcaacatgaagtactacccccgccgtccatctggcagcacaggaggcgtgattgtctcacctgtcggtgaggacaatcctaggttgagcagcacagtcaacctagccgccatgctaaacacggagctggaccatgcattagacgagctgagtagggctcgtgctgagatcgcccagctgcgggctgagcgcgcggagcgtcgtcacctggatgatggttcccccgctcccataaggactcagcacccgtaccgctcacctcggcgtggacaccagtcttatggcaacaccgactgcaagaccaagataaatttagaaccatagatcgttagagccggatcttgtaattaatacaaaatatatacatagaagctacaatcttagcattagtctcgcttttagttagtcttagttagacagggtagtttgctatatcctgtgcatttatgtttgtcatgatgaattatgtttgatttggatcattgtaatgactgtcaccaggatgtgggtatcccctgcattttggtttacctgttatatgttaatggagttagctatttagttgggaagccttttattccactttcctctttatctgagaagctgtgttggtctgtgttggagatcagtgaagatgctcatctgttcagtgttgttgaagaattctatgctcttttcttatgctgcaagatttgcaaggtcagttctgatgtgtggttgcgttctgcagatgtcagaaaacaggcgcagaggaggaaggcatgctcagcaggatgaggcaccccagcagcagcagctgccgcccccacccccgatgtcgatcgagcagatgttcctgatgcagactcaggcagttcaagccatcggtcagactctggccaccattcagcagcagcagcagccaccacctcagcctcagatgcctcagatgcctagagacaagcgtgctgaattcatgagaggtcatcccccaacgtttgctcattcttctgaccccatggatgctgaagactggctgcgcacagtggagcgggagttgcataccgctcagtgcaatgacagggagaaagtcctgtatggtccccgtctattgagaggagcagctcagtcatggtgggagtcttatctcgccacccatgccaaccccgacaccatcacctgggaagagttcagaggtagctttcgtcagtaccatgttcctgcaggtctgatgacagtgaagaaggaggagttcctggccctcaagcaagggtcatcgtctgtcagtgagtaccgggacaggtttctgcagttgtctcgctatgctcctgaagatgtcaacacctacgccaagcgacagtatcgtttcctgagaggcttggttgaccctctgcaatatcaactgatgaatcataccttcccgacatttcagcacctgattgacagagcaattatgacagagaggaagcgtaaggagatggaggatcgaaagcacaagatcagtggaccctagcctggaagcagcaatcgtcctcgtttctcaagcaatcaacctcagcagttcaggcagaaccagtgtccacctcagtagcagcagtagttccaaaggcagtatccttagcaccagtatcagaatcatcagaacaattagtcaggaggaggtcagttccagaggcagaatcagcaggcacctcaccttcctgccccagcaagccagtagaacagtcaggcagcaccagctcatgttggaaacagagcatgtttccactgtggagagcagggccattgggtgatgcaatgtccgaagaaggcagcccagcagcaatcaggccccaatgccccagcaaagcagaatgtgtctcagcctggagcaggcaaccgctctcagccacgttataatcatgggagactgaaccacttggaggctgaagcagttcaggagacccccgacatgatagtaggtatgttcctagttgactcccatattgcagaagtgttatttgatactggagcaacgcattctttcattactgcatcatgggtagaagcacataatcttccaattactaccatgtcaacccccattcaaattgactcagccggtggtagaattcgagccgatagcatttgtttgaatgtaagtgtggaaataagggggatagtgtttcccgctaaccttatagtaatgggtactcagggaatagatgtcatcctagggatgaattggctagataagtattaggcagttatcagttgtgataagaggacaatcaagttggtgtccccactaggagaggaagtggtgacagagttagtcccgcctgaaccgaagaaaggaagttgttatcagatggctgtcgatagcagtgaagcagacccaattgagagtatcaaggttgtgtctgagtttccagatgtgtttccaaaggacttgccaggtatgccaccagagcggaaagttgaatttgccatagagcttcttcctggaaccgcccccatctttaagagagcttacagagtatcaggaccagagttagttgaacttaagaagcagatcgatgagttgtcagagaaaggttacatccggccaagcacctcgccttgggccgcccctgtcctatttgtggaaaagaaagatggcaccagaaggatgtgtatcgattatcgagctctaaatgaggtcacaatcaagaacaagtaccctttgcccagaatagaagatctattcgaccagttgagaggagccagtgtgttctccaagatagatctgaggtcgggttatcatcagctcaggattcgaccttcagacattccgaagacgacattcattaccaagtatgggttgtatgagttcactgtgatgtctttcggtctaaccaatgcaccggccttctttatgaacttgatgaacagtgtattcatggattatcttgataagtttgtggtggtattcattgatgacattctgatttactctcaaagcgaagaagagcatgcaagtcatttgaggatggtattgcagagattgcgagagcaccagctgtatgcaaagttgaggaagtgcgagttctggatcattgaagtcctgttcttgggtcacataatcaacaaagaaggattggctgtggatccgaagaaagtggcagacattctaaactagaaagcgccaacagatgctcgagggatcaagagcttcattggaatggcctgatattatcggcgattcattgaagggttttcgaagattgcgaaaccaatgacagtgttgctaggcaacaaggtcgagttcaagtggacccagaaatgtcaagaggccttcgaagcgctgaaagagaagttgactacgacacctgtcttagtcttgcctgatgtgcacaagcccttcttggtgtattgcgatgcttgttacactggtttgggatgtgtgttgatgcaagagggaagagttgtggcttactcgtcccgacagctgaaggttcatgagcagaattacccaatccatgacctagagttggcagcagtggttcacgcactgaagacatggaggcactatctgtatggacagaaatgtgatgtttacacagaccacaagagtctgaagtacatattcactcagtcagagctgaatatgaggcaaagaagatggttagagttgatcaaagactatgagttggagattcactaccatctaggcaaagcgaatgtagtggcagatgctctgagcaggaagagtcaagtcaatctgatggtcgctcgtccgatgccctatgagttggccaaggagtttgacaggttgagtgtcggatttctgaataattcgcgaggagtcacaattgagttggaacctaccttggagcgggaaatcaaagaagcgcagaagaatgatgagaagatcagtgagattcggcgactgattctggacggcagaggcaaagattttcgggaaggtgcagaaggggtgatatggttcaaagaccgcttgtgtgttcccaatgtccagtctattcgggagttgattctcaaggaagctcatgagacagcctattcgattcaccctggcagtgagaagatgtatcaggatctgaagaagaaattctggtggtacggaatgaaaagggaaatcgcagagcatgtggccatgtgtgatagttgtcgacggatcaaggcagagcaccagagaccagctggattgttgcaaccgctgcaaattcctcagtggaaatgggatgaaatcggtatggacttcatagtcggattgcctcgcactcgagctggctacgattccatttgggtagtggtggaccgcttgaccaagtcagcccacttcatacccgtcaagaccaactacagcagtgcagtattggcagaattgtacatgtctcggatcgtttgtcttcacggtgtgccaaagaagatagtgtcagacagaggaacgcagttcacctctcatttctggcagcagttgcatgaagccttgggcacacatctgaatttcagttcagcttatcatccgcagacagatggtcagactaaaagaaccaatcaaatccttgaagacatgttgagagcctgtgcgttgcaagaccagtccggatgggacaagaagttgccttatgcagagttctcctataacaatagttatcagaccagcttgaagatgtcaccatttcaggcgctctatgggaggagttgtagaactccgttgcaatgggatcagcctagagaaaagcaagtgttcgggccagacgttttgcttgaagctgaagagaacatcaagatggttcgaaagaatttgaagatagcgcaatcaaggcagcgaagttatgcagatacaagaagaagagagctgagtttcgaagttggagactttgtctatctgaaagtgtcaccgatcagaggagtcagaagattcggagtcaaaggcaagctagcaccccgctacatcggtccgtatcaaatcctcgcaaggcgtggagaagtggcctatcagctcagtttgccagaaggcttgtccgcagtgcatgacgtctttcatgtgtctcagttgaagaaatgtttgtgtgtgccagaagagcagttgccagtggaaggtctggaggtccaggaggacttgacctacacagagaaaccagcgcagatccttgaaaccgtagacagagtcacccgaaggaagaccatcagaatgtgcaaagtcagatggagtcatcactctaaggaagaagcaacctgggagcgtgaagatgatctgatggctaaataccctgagctctttgctagcaaaccctgaatctcgagggcgagattcttttaagggggataggtttgtaacgccctgaatttgggggtagaattttttcttcttttctctcaccaaattcgggcgttactctcttttctcttcctgttttgctccttcttcctaatttcaaaccagtatagtgacaggtgtctgtgtcgtgtatgaacaaaacctaagtgtcatgggtgttgcatcatgccgaagcacatttccttgtctgatgttgcgtgttcgtctcgttctgtctcggtttttggttcgcgattggagcccgtttgagggtcgtgcgtgtcgtaggtttcgatccacgaagtggctcggcccaacccaacccaacccaacccaacccaacccaactcagcccagcccgatccggcccggcccggccctgcgcgcccctggcgtcccacaccccccatgcgccccctcctctcctccctctctcatttggatttcccgcgcagcaacctccctctccctcttccacctctctctccctgtggtgccctaggttttggagacggtgatcgccggagttggatcccgaggtgagctcccctcccctcccttctcctctctctctctccctctccctcctcttctccccctgcgcgcgcgcccctgccctccctgcttgccggcggtgcggccccgccc

SEQ ID NO: 29274 - DNA, 1678 bp, Zea Mays
ctaacgcgttcccgcgtgcgcaaccccacgcgcgcggtgattattcttggtttttagttagtttcaaactccattagttagcgtgctgtgtcgcgcgcttcatcgcgcgacgaatttatctaatttcatattctatgaatgtgttgcgtcgtgcgcttcgtcgcgtgacgatccattttaatttcaggttgtttaatgtgtaacgtcgcgcgtgtattcatgcgacgttccactttagactcagttcagttgacgtatgccgtcgtgcatttcgtcgcgcgaagcttaacgtctctttataatttatgcaaagtgtctcgttgtgcgctcggtcgcgcgacgagtcgttgatttccttaattcaatttaaggtgctatgtcgcgcgtctcgccgcgcgacgatccttttaatttatcttcatctgcttataatgattagacatgaaacatgactttactttatgctaaacgtagtgtctacattaatgcctttcaattgagcgagtggtttaattcataataatgtaacgtgatcgtttctcgactgtcttttcctctttctctcttaaccgtaattgcaagcccgcgtggaacgtctgtttacttactgcattctattgtatggtgtactgttcttttgtattaaatatgtggatgtatgtatgtttgcgctcgcatagagaacgatccggtcggagagcccaaagaactcgcaggagaagcccctgagcagcagtcggttggtggaggcaagtgtcccttgacctatctctgtcctatacattctttaattcacctcccgcattacacatttatacctaaggattgactagcttttgttgtccatgtccttgtttacctatttgggtcggattattattgcttagtcttatgctattgctcaactctaatcaatgaacatgatgagaattatcaatgatacgctgttttcccctcttttattatgatgttatacttgtgaccttcaagggggctcgagcggtttctcgagtgcctctccgtaaggacctgttcgttggatgaccgcccgggaaaacagtgcaaccatgagggtggagtgggacgcccttagctgaataattagaggaaccggggtgtagttcgctgtaacactatgaaagtcattaaataaaaataatacctttagttaataatggtatttatgataataaattttccattgaagtgtttgttatttatttcattcggaatgatttttgattgctcataagtaattttgaatattgaatatcatttcttcttaaattaaaattcacataaatagtataataaatattagtccaagaatgaatattttatttataactttggtttaattattataaattttatggatatttaaaagcttattttaaattagaaaagaattagaaaataaaaaaaaacaaaacaaaacctaactaaccctaacctaaaccttggcccattaggcccaaaacactcccagccgtcactctccctcaggccgccgccgcccctggtagccgccgtctctccctgctcctctctcccaaccgactctcttccattcctctctctcccctcgttctctctcccaggcgcgctgccgaccgacccgctccagccgtcgagccacaggcgcgacgcccgcagccgctggaccgcgcccgagcag

SEQ ID NO: 29275 - DNA, 8280 bp, Zea Mays
ccgaccagtcgagcgccgcgcccctgccacgtcccttccccgaccgcgcccagctgctcgccgcgtcaccgaccgcaactccgacccgagccgagaacggacgccaggaagtccgcccgcgcgacgaccgtgccatgaagccgagccttccgttcctctgcgttaaggaattttactgcgtccgttaatccctccccattactctccatgaaagaaaccggtgaccattcatggccgccatgaagcataccgacgacctctgctctccctccctctctctataaaaccccaaccgagccctctccttctgcctgcccaagcctcttcccttcttctctcttgcaacgccgcctcgccagaacagtctgccgtcgaccgcgcagctcgcccaagccaccagacgttcgctcccgtgccacgcggccaggccagcgtggtcgagttctgttgccagagctcgcccgcgcagcacccgtcgaccatgcccatgccgccgctctgctcacgcgcacccgctgttgagccctgctcgcgtcgtgcccagctcgctgtcgtgaagctcgtcgccggaccgtccgcatccgtacgccgttcgccatccctggagcctcgccggagttcgtactcaccgttcgcgtccctcggccggagctccgtccgaacgctcaccaacgatcgcgtcgttccctgcccgtcgaaccccgctcgtcgatgttcatccctgcgcatgaacgaaatcacaaggttgaagacaatcctgaaatatttattttctaaatcatgttttgaatttattgtgaattactgttgtaatattgagatgatgcgatttggcgaatcacgtggatgattttagagatgcgatatatacgtgtagccacacgtttagccaaaatcgaaccctgcgacaatactttgaagatacgtatgatttataatttaaaaaacatgaacacagtcactattcgctactttagtgattttcatactagaaatgtttacggatttgttttcacttttgtgggtggagcgataattgttagtagtatgttaagtataaacttatttgcataaagaaatagaagaaatactaggccacgtattttcggtcaaataaggatatagtttactattcataataaatgaattcataagtatggcacttaagtacttagaattagtatgatatttatttatgtcataataaccatgaataggttattaaaagtcccatttagtaatttacaattaattcttagtatattaatgttagaagaattaaataaacaatttttagttatatgtataaattctatttagaaaagaaaggagaaaactgaaatagtagaatttataatagtgttaaaatgacttaactaggcacttatactttcctaataaagaaaatgataatatgttgataaatataggtttcttactaaagaagtagagaatttgtttctaactgtaaaatgacctttttaaaagatatcatatttaacaaggttcgttataaatgtttaagtataaccgtattaaatagaagcttaaaagaatatataaatcgtttgttttttactagaagataaatatatgtcccattaataaattatttcttaattaaaagataactaaggtcattgcttttataaactaaaataatagttaataacataccaatgaatataatattcattttaaatatttaggtcatatgtttctaaactaaatgtaaagataaataatagagtaattatgtcctctcataacctagttaattagatttatattggtttacaacgggttatataggcttaagtaatcatttaattaaaattagttcacattatttatatatgtgtcacttagtttttcctaaagaataaactaaggaaattagtgttcatgttctttaataataatgttagtttgtatattgttttgtatatggctttcttaataaaatataggacatgtactttataataaaaataaaatataactgtttgtttattgtcttttacataaaagttcattaaagcatatatcataactttccataaataggtgtttaataataataatcttttcacataaaacctatttagacttatatcttaatttgtcgtaagtgaaggtttaacaatgatttataatatgttccataatgcttctaaaattaataacgtgttttgtaggccattaaccttagatatataatatttatcttttctaaaaaggtttaacatcgttataacgtgttttatcgtcttataaacccttaatattagacatagcacgtatgacgctttataaaatattaatttggtgaaccaaatatttgtatatattaattaatatattttaagctcatgtcttgttttataaagtatagatcacacttttttttgaaaagaatatctttttttattacaacccttgcgtgtaacgtttttgaaaagcgaacgctcttttcattaggctttcttttagctttacgtatggtgaatgttgtatgttattgagtggtgtttgttcttcttgtttgtttgtgtgatattcagtggttgatctagtaagttgagaatcaagatatattccgtggaagaacctcgagttttcaataagcaaggcaagtggacttctccctctgcatactctgtttgatcccaaacaatacatttaataaagtttattcttcgatgaatatatgcataatttgacgggttacctatttagataaccattccaaccttattccttgttaacctgggattatgatctaagcaagtagctatgctattgctacaactctaaatttatgcagtcactcccgcttatgatattgatgttccaaatggtaagtttactttattgttgttaacccgatggttaaacaagattattgcatattaattggaacatggagtgaccacccgggaaaacagtgctaccatgagaactatcatagctctggtcttggctaaataactagggaagtcttatgttgggtgctggtcgtggtcgacaggaacgggggcatctggcaagctcttatagttccggctcaggcagattggatacgggcatagttcccaaagctttaccctatagtctggactataagttggtcacggtaggtgtgccttatgcagtttgatcatatccagcatttgcgtaatgaggactctagggagaagcctcgtagtgagaccctggccattcacctcggaagtgaatacgggtctagctaacccgggctagaagggaatcgcgactcatgggtaaagatgcgccacctctgcagagtgtaaaactgatatatcagccgtgctcacggttatgagcggcctggactcctcacatgataattgaacttgaagatggaaataaatcgagatccgatgatctgccaatggttttgcttaagtggtttcacttaagtgtttttgatataatcttgtatctttgcttaatgggaatacttgggattcatacttattagtaagacatgtgttgttaataaaatgttgaccaactaaaatgcttactgctcaaccttagcctcaccttgttaaacctgcattagtttttcccccacttgctgagccccgaccataagtgagctcacccttgcttaattttgatcagaagtttgcagatgaagatatgatgctgaactccatggatgctagtctagtgatacccccagtcatcttcctgtggatggatgtccatgttcgctgtactttgatgaataaaggttaagacattatgtctgttcgaagtgtaatatgttaatataagcattatttacgctcttatgcattgttcttttgatatattacacttgtgacgtcaacatatgtgtggaaatagatcctggcacacatatgctatgcacccggctctgcccttagaaacgggtgtgacagaagtggtatcaaagcaatgtgaccgtaggtcgctagattagttagaaatggaaagcccagtcagtcgttcaaaacttgacttaattgtctttataaaaatttactttatatcaaactcgcctcttttattttcaactcttcttatctgattcttcgtctatcagaaggttctaatgagaagcattgcaagatgatcaagctaggatttcagaacttgaagcgaagtttgccagaagaaaccctttcgaagctatcgacgatgccctattctctgtcttatccccactccgcaagaagttttgttatggatcccctggatctattatttgacttcttggttaggttgataggattgttctttagtattaagattttcgactagatcggtaatggcgatattatattatattataagaggttttctaatccttaatattgctatataacccttgacttcttatacttttgttgtcttgccattgtattgccacccttgtgcaatatctaccttgatatattaaacttttgcctctctacttttctccttgataatgctttctccctattgaattcttatacttttgctttcatgccattgtattgccgcccttgcgcaatatctaccttgatgtatgaaacctttggctctctactccttgataatgcctttatattttgtatccttaaaaaaaactttctcatatccttggttgtataatttattctcgcttcacgagttagtggttatcttatttcactcttggtcattaacaataatgttttgaatcttgtctatctccttgttatttctgatctgattcttggattttataatctctttcttattcctaaccttgtcccgcctttaaaaaaactgtaagaaattgttttcttaggaaagactgccttttgattgaatgaatgacatcgagttacgttgtgctgatatgtttcagttcatgttagctgtatttgtgactatgtttgatttgcttctttgtagtgattgttgttgtattgtgtgacttttgtccacaatgacaacagttagctaagttaaaccttagatagatgggttttctctgctctctataatctgtctttgctcaaccctttcgtcccttccattcctccatacccatatagatgtcagaccttggaatgtcaactgcaagtgatatcactaagtacaaagaatacattgtgttggcaactcctccagctaaggatcagatggaacagttcaagaaggcgcatgctcagtttctacaagcaacatgtcaagtggtagctagactccaacaagttgatttagcagaatttatagcacatgagcagactaccgataatcatatgacatcaaccacaacatcaccctcgatagttgacttagaaaagctgttacataaacaggctcttgtaatacaaaatgtatctcaactcacctcctcatgccagcaagtgttggcaagtcgaaacgtcactagaaatgaaacagccaatcaacagacacaaaaggatgcacaccaacagacaagtgatcttggaacattttgttgttgtgcgtactatggaattccttgtcgccagatcagtacaaacgaaagtgaaactacaaaacagaagaaccggattttattttctagcataaacagacagatgtctccccctgaacaaataatagcagattctctcatacctaatgcactgtcagttgatgaattgcaaagtattccaaaaaggaaacatcacaaggatgcccagccccaagaagaaacacaggagtgttacattgatggatggactattacttgtacacagtttcagcctcgtcgtcgcatcaggtccaagaaacaaaaagggaaatgtggaaaaagtcaagaaataacttcaagaaaagcttgctatcaatgtggacttttaggtcattacttccgtaactgtcctgagaaaagttcactacaaatcacctccgagatgaagctatctcagtctccagacatggaatatgaacagaaatgcacagaaacctctaccaacaacgtaaagacaactccaccatgtaactcatcaagtcgtgcttgctttggctgtggtgataccggccatcttgttaatggttgtcctaagaaggatgtggagatcaataaggtccaaaagaaaagacaacaccctcaaactcaagcatcaacaaagaataaacaacggaaagagaccacaggaaagataagttatgcagtgacaggaaccattccatatgatgatgcagtaatttttggaacactagtcattcacacaaccatcgccaccgtgttgtatgatccttgtacaacacattctcttatcagtgcccagtttgcaacaaagtacggtatctttaagtgccccttgagatcaagcaagaccatcagtgcacccgaaggaaaaatgctagtaaactacatatgtccaaaagtaagtgttaaaatcaacgggatagattttccagctgatctcctagtgatagaatcaatggaaaaggatgtgattcttggaaggaattggttacaaagaactaaggcagtaatccagcatactgagagaaccatgtgtttggaaaccccatctggagaaagaatagtagttgaagacaatcgaccgccagctctgaagattggtgcatctgactaggaagaataatatatcatttagctagaaggagtatgtctcacgaagaaaaaaaaacgtcaaagtgttgcccctttcaagatttgtaattgtgctaagtgatatatgaataaatttggagaatctctcgcacctattgtgttttgcctctttataaagaaaataaagtatggtgtcatctactttatgcaaacaatgtgatactctagttgccctaaagtcccactcaaggtttttttttcaatttgtgctcaaagaaatattgttggatcagaaagatgatttggatatcaagctctgaaatctataaggttcaaaaagatctttgttaaggaatataagacctgtaaactctcaaagtatgatggaactagtagaaatctgaaaccatccctgttccttaactaatcttatattggaaattaaaacgttgtgttagctctttatcataatgtcatacaagcctcttatgcagtctatctcactaactcttttaccctctgactagatgatgaaccccaatggaaatgaagtaaatgatgccaacaacaatattcctaccttaacaactatgaacgagaaaaatgagtcacagaggtattcgatgaatggaatgaagaacaacaaaaggaatagaaaaatgtttggatacatgattagtccacctcaagcgaaagccacgaaacatatggatacccaaacagaagaatcaagtcaggctcagctacatgagatacagacacccaatgaaccctcaccccctgttggtcaagcaaagttgactcgtaaagaactcaaagcaagaggtgcttgctactactgcaaaaacgaaggacatcttattcgcgaatgccccaagaaacgtctagaccgacttgagaagaaagctgccaagcatgacctaagcaataattcagaagacccaccatttataagtacgatgatgaagatcgcttgatttgtagtcattgcggagcgaagaaacaataagttccttaagtttagaagagttaaaatgtgaaccaagaacctacaaataaccatgtgtcttctttgttttcttgctagcctttcttaatctcgaggacgagattctttttaagaggggtagatttgtaacactatgaaagtcattaaataaaaataatacctttagttaataatggtatttatgataataaattttccattgaagtgtttgttatttatttcattcggaatgatttttgattgctcataagtaattttgaatattgaatatcatttcttcttaaatttaaattcacataaatagtataataaatattagtccaagaatgaatattttatttataactttggtttaattattataaattttatggatatttaaaagcttattttaaattagaaaagaattagaaaagaaaaaaacaaaacaaaacctaactaaccctaacctaaaccttggcccattaggcccaaaacactcccagccgtcactctccctcaggccgccgccgcccctggtagccgccgtctctccctgctcctctctcccaaccggctctcttccattcctctctctcccctcgttctctctcccaggcgcgctgccgaccgacccgctccagccgtcgagccacaggcgcgacgcccgcagccgctggaccgcgcccgagcagccccgccgaggagc

SEQ ID NO: 29276 - DNA, 3367 bp, Zea Mays
caacgagttatataggcttaagtaatcatttaattaaaattagttcacattatttatatatgtgtcacttagtttttcctaaagaataaactaaggaaattagtgttcatgttctttaataataatgttagtttgtatattgttttgtatatggctttcttaataaaatataggacatgtactttataataaaaataaaatataactgtttgtttattgtcttttacataaaagttcattaaagcatatatcataactttccataaataggtgtttaataataatgatcttttcacataaaacctatttagacttatatcttaatttgtcgtaagtgaaggtttaacaatgatttataatatgttccataatgcttctaaaattaataacgtgttttgtaggccattaaccttagatatataatatttatcttttctaaaaaggtttaacatcgttataacgtgttttatcgtcttataaacccttaatattagacatagcacgtatgacgctttataaaatattaatttggtgaaccaaatatttgtatatattaattaatatattttaagctcatgtcttgttttataaagtatagatcacacttttttttgaaaagaatatctttttttattataacccttgcgtgtaacgtttttgaaaagcgaacgctcttttcattaggctttcttttagctttacgtatggtgaatgttgtatgttattgagtggtgtttgttcttcttgtttgtttgtgtgatattcagtggttgatctagtaagttgagaatcaagatatattccgtggaagaacctcgagttttcaataagcaaggcaagtggacttctccctctgcatactctgtttgatcccaaacaatacatttaataaagtttattcttcgatgaatatatgcataatttgacgggttacctatttagataaccattccaaccttattccttgttaacctgggattatgatctaagcaagtagctatgctattgctacaactctaaatttatgcagtcactcccgcttatgatattgatgttccaaatggtaagtttactttattgttgttaacccgatggttaaacaagattattgcatattaattggaacattgagtgaccacccgggaaaacagtgctaccatgagaactatcatggctctggtcttggctaaataactagggaagtcttatgttgggtgctggtcgtggtcgacaggaacgggggcatctggcaagctcttatagttccggctcaggcagattggatacgggcatagttcccaaagctttaccctgtagtctggactataagttggtcacggtaggtgtgccttatgcagtttgatcatttccagcatttgcgtaatgaggactctagggagaagcctcgtagtgagaccctggccattcacctcggaagtgaatacgggtctagctaacccgggctagaagggaatcgcgactcatgggtaaagatgcgccacctctgcagagtgtaaaactgatatatcagccgtgctcacggttatgagcggcctggactcctcacatgataattgaacttgaagatggaaataaatcgagatccaatgatctgccaatggttttgcttaagtggtttcacttaagtgtttttgatataatcttgtatctttgcttaatgggaatacttgggattcatacttattagtaagacatgtgttgttaataaaatgttgaccaactaaaatgcttactgctcaaccttagcctcaccttgttaaacctgcattagtttttcccccacttgctgagccccgaccataagtgagctcacccttgcttaattttgatcagaagtttgcagatgaagatatgatgctgaactccatggatgctagtctagtgatacccccagtcatcttcctgtggatggatgtccatgttcgctgtactttgatgaataaaggttaagacattatgtctgttcgaagtgtaatatgttaatataatcattatttacgctcttatgcattgttcttttgatatattacacttgtgacgtcaacatatgtgtggaaatagatcctggcacacatatgctatgcacccggctctacccttagaaacgggtgtgacattcgcttagctgttgtgccatcaatggggctcggtgtatgcggctcactctgccaaggttgatttgtcccttggggaggagtgcagtacatttaggaaacctaacgggtggctacaaccccggggaatctttgtaaaggctacgtagtgatatcctgctgggtcaccttggtagtgatcaatggagagtcatgatctccgggcagaaagggaaatcacggcttgtgggtaaagtgcacaacctctgtagagtgtttgaaaactgatatatcagccgtgctcgcggttatgagcggccaagggagctccagtgattagtggtacttgatcagagatgttcgcattgcaggtggcaatgagattgttggttttggtattgactctggtaatggtaagtggtactttttccgtttggaaaggagtacgtttgggttaataacgtgggctaaatctaaaacttggcttcctctactagcaataataataatctaaccaactaaaagcaactgcttgacttaaccccacataaagctagtccactacagccaaacaggatgcttgctgagtatgttgatgtgtactcacccttgctctacacacaaaccccccctaggttgtccgcattgcaaccactgctcaggagaagatgaagccgtggaaggagacttccaggagttccaagaatacgacgagttctaggcgtgggttagcggcaacccctagtcggctgcctgtgaaggccgcttttatctatgtttcgttttcgcactttgatttattgtaaagactatgtggatgtctcagacatatgatgtaaccgactattatttcccttttaatactatttgagcactgtgtgatgatgtccatgttatgtaactgctgtgtacgtgaattgctgatcctagcacgtacatggttcgcattcggtttgccttctaaaaccgtgtgtgacaggtacgtccgttacatggccgaggatcgggctacactcccgaggtaccctaggacattgccgagaccagcgggaacgatttgtaatggaatcccaccaaagggaggcaccgagccctcggaccctatcgaatgggtccgggcccagcaaatcacctgcaggtacttttggagcgcgcctctaggccactagccgacccttatcgaatggggctcgggcgtccactcggatcacccgttagcaactcagtggaaacaccgtgttcggtgccccccg

SEQ ID NO: 29277 - DNA, 1402 bp, Zea Mays
aaatttagcgtatggattagcgacacagggaaaacaccgggttccgggcgggaaaagcggctgccaaatcagccctgagtgggcccgcttccatttgggctgcttgaatcgtcggctaaggaggttgggccgagacatcccatcgccggttccgtcaagcccacgcatcatcactcgcgcgcggggccgtccgaccgggctctcctccctcgttttacccgcacccgccgcaacgccgagaagacgcgagagggagggaggaggtgagccaccggaagcggagacgtgagcagtcgaccaaccccgtcgatccggctgcggcccggcgtgctagatcgctaccgatcatggtggtggaggagatcgccgagggggtgaagaacctcaccgttaccggagacgcggcggcttcagcaaccgcatccaggtgtccaacaccaagaaacccctcttcttctacgtcaacctcgccaagaggtatatgcaacagcacgaagatgtagagctatccgctcttggaatggccatagcaacagttgtgaccgtggcagaaattctgaagaacaatggatttgctgttgaaaagaaaattaggacctctactgttgaaataaacgacgaatcaagagggcgtccattccaaaaggccaagattgagataatcttgggaaagagcgacaaatttgatgagctgatggccgctgctgcagaagagaggggcgaagtggaagatggtgaagagcaggcttgaaaacagtaccgatgacaagctgctgctgctgtgctctgttagtgttgtttaatttagtttaataccgtgtgcatgagatatggcacgcgttcttgctcaactacatcaccatggcaatgtctgcaaatccatggattgatggatggatgttggttgtttcttaacattctggacatgttgttcactttggctatgtatgttttagcagtccagcgttccccttacaaaatatggcgtgctttgttgactacacagaccgtagttcctttcctgaattattgtctgcaaagataagagatatcaatgggtaactaatacccgatgtataaaaactctattacggtatgggtatgaggaattttgatgcttacaggtatgttattgggtcattttatatacctaatggatatggtgggtgtgggcatcttcgataatgttgggttggatgaatctatcatgctggataaaaagttaatacactattctacaatcttccattattaataaggtttgggctttttatattttgtaaattttgtatttggttcttattattgtgataaaaataagcacgttagtcggtatggatactcgatggatatctgttatccatatgagtggcgtgtatgaagtaattttatacccattata

SEQ ID NO: 29278 - DNA, 1054 bp, Zea Mays
gttgaagcccaaggcacaccagctgcttgtggtgctggttgcacacttgaaccgcaccaccagttcaccccctctcctctccgggagcttagacacctgtaggctagcgcattgttctcaaggtcagagcttcgccgaggaggcgaggacgatggcaatcgccgggcagtgctcctcctgctattatacgtcacccaccctgcagctccaccgacgtcacagccacctgccgcggcagccccaagccgcacgaagagcgcggcggccgaggttgcaggtggccgcagctgccgacagcgggcccatcagggcggccacggacgccgagttcttccagccttccgacaccaggccaatcatgctcttcgacggcgtctgcaacctctgcaacggcggcgtccgcttcgtgcgggagcacgaccccaacaggtatagccgcgctgctcaatcctcagtcaaagcaacagcgattcagccgctgataggttcttccgatgggttcgcaactccaacaggagcatcaggtacgtgccgctgcagagcgagtccgggaggaagctcctgcagaggtcagggaggtcccctgacgacatctccagcgttgttctcgtcgagaaagacaggtctttcatcaagtctgaagcggtgctgaggataatggagtacctcaacctgcccttcccgcagctcgccgtcttcctcaagttcctgagggacttcgcgtacgacaacgttgcgaacaacaggtacgccatgtttggccgcgccgaagcagaagcatgcgagatactgtaacaactggtgcccctgagatctcgatacttagtctatacgattcgatgtcaacagtcgcatacatgatgtcccacgaacatctatgtgtgcgtagttttagccatctaaacaaagctcaaacaaaaaaaaccttgctctatctctatgctccttgcagtgcagtgagcgataggcactgaagggcgtatgctagctacaaaggctgtaaaaactgtatctttggcacgacgacgccctcggttgtcccgtgggcgttcag

SEQ ID NO: 29279 - DNA, 3618 bp, Zea Mays
cttgtcctcggcgcctccgcaccccatttccctttttacgcctacttgacccggcagcgttcggtgacgaaaaaaaaaacccaatcgcctccgccccctcccctactccgggcgcagccgccgacgtcgccacgcgcattccgccgcgccaatcgggtacacgagcagggcgggggatgacgtcgtcggcgtccgcgccggcgtccaatggaccgcgctacgcgccgccggatccaacgctgcccaagccgtggagggggctcatcgacggcaacacggggtacctctacttctggaaccctgagaccaaggttacgcagtacgagcgccccgtcgcggccgtgcccaactccccgccgcagccgcctggctactccaggcccgaggagaggccgagaagcagcacaccttccgaggtaacaactaagagcatctccaacaaatctcaaaattatttattccaatacatgagcattgggagccccctaagatttaaattcctgaaaaaagtgtcaatacttcaacaactctcaatattttcgaaaaacctaaaatgaatctgttgttgagcccacaaaacctgtctgtcgatcatacctgtcacactgtttttctgcgtcacccatccttcgttcctccctgcgccgccgatctgcttcatgtgttggcgcaagcttcagacgtgatctgctcctcgcctcaggttgcctccgttgacgtgtgggagcagctgcaggtactcatctctccgacagtgctgtcaatctatcaaaacagtgctgcagtagaaaatcatgatataaagcaaattcagtaccgccaacatacaacggaccagttctccaaaacagaactaactgaaggtgccaaggtggatgtaacccagccttcagtagttcaacagaatataaatcaagctgttggtcaacaatcatcatctggtacaggatacaaggaaaggaccatcacattccatttaatatgtctgcattttcttaattagaacaccacatcatcttggtgcgatgaagaagtgcatgccagtgccatatgcggaacttgtcatggacttgcaaatcttggaaggccattacctcgaaatcatcagccgccgtagatgaattttgtgtcactgtcgccaaagaagcttttgtcggcgattcaccatttgcgggatccatcgatgttgagcgtttgcgggaagagagcaccagccgcctcaacagggcgtcgtcctccacaacccacacaaaatcaagtcagcaggttctggcggaggcgcgaaacggaaaatagtgtggcaataagaaaaccggcaggtgattgggagctcagtgcgcggcgaaggtttgcgctgcggatgagcggagctcggaaaccacggtgagccgcccgcagtatgcacctctctcggataacagggcaaggaatgaccactcggagccacattatgcatctggagtgaacctttcacaaagtgctccttccactaatcaagtttctcaggctgccagtggaaaccaaatgtcgacagaagcatatcgtgctaagcatgagattaccatcatcggcaacgagtcacctgcaccattcatgacatttcagtccacatgcttcccatcagatattctaagggaggttctgcaagcaggattctctgcaccaactcctatccaagctcagtcatggccaattgctatgaagggtagggatatagtagctgtggcaaagacaggttcaggaaaaacactgggctatctcctcccagggtttattcttctgaagcgcctgcatcataattcaagggaaggtccaacagtattagttttgtccccaaccagggaattggcaacacaaattcaagatgaagcaatcaagtttggcagatcttcaagaatatcttctacttgcttatatggaggtgctccaaaaggtcctcagctaagggagttggagcgtggtgccgatgttgttgttgcaactcctgggagattgaacgacattttggaaatgaataaagtgagcctgcgccaagtatcatatcttgtccttgatgaagctgaccgtatgcttgatatgggatttgagccacaaataagaaaaattgtgaaacaaataccacctagacggcaaactcttatgtacactgccacatggccaaaagaggttagaaaaatagcgtcggatttactgaataacccagttcaagttaacattggaaacactgatcagctggttgcaaataaatcaattactcagcatgtggaagttatcccacatatggagaaatcaagacgacttgatcagatcttgcgttcacaagatcctggatcaaaaatcataatattttgctccaccaagaggatgtgtgatcagttggctagaaacctatcacggcagtatggtgcttctgctattcatggtgataaatcacaggctgagagggattctgtgttgaatgacttccgaagcggcaggtgtccagtactcgtagccactgatgtggccgctcgaggcttggacataaaggacatcaggatcgtggttaattatgatttcccaactggtgtggaggactatgtccatcgaattgggagaacaggtagggctggcgcaacaggatctgcctacacattctttggtgaccaggattcaaagtacgcttcagaacttgtgaagattttggagggtgcaaaccagtctgtgccaccacaattaaaagaaatggcccttcgtggaggatatggtggaagatcacgtcgatgggcatcttctgatgactcttatggtagtcagggatatggtgctaaaagatcaactgatagtttcaagaacagcagcttcggcaaccaggccgggggtggttcaagctttcactcgagcttccataacagctctagtggcaatcagttcggtgatactacaagctttcatgccagctatggtaacagcagccagaacaatcagacgggtgacaatccgagcttcccacccagctccagcaacaatcagtccggggatggtctcagttttcatgaaaggttctatggatcacgcggaagggacgagagcagatcaaacaatgatggattccgtgctaggagcagaagtcctggcaagcctgtggaagtttccaactggtgattgcatccactaggtgcaatccaatttttgcgatggtgacgaaaccaagtaaaagatggtacctcgacaagttatattttcctcttatcctgcttaaatctaaggatgtcctggaacatcactaacttaggatatgggtgatggtctgatcccaatggacaatggtctcctactttcttgatttgacgcctgagagacgcctgattccataccatatgcctgtggttgtagtttgtaaaatgttaaaaacttgactttgctagtatatttcctaatgctataacccaatcctgggtaaacagacgcatggggatgaattttggacggaaccatggacatttgatgtatgtgtttaatgttgtgtacaatctatgtcgaattctgttgtaagtgccgtccgcatcgttttatatctttgtgcccgttattacaggtcttaaagaatcatgctgcccgtatgtgactcttctcatg

SEQ ID NO: 29280 - DNA, 3491 bp, Zea Mays
cttgtcctcggcgcctccgcaccccatttccctttttacgcctacttgacccggcagcgttcggtgacgaaaaaaaaaacccaatcgcctccgccccctcccctactccgggcgcagccgccgacgtcgccacgcgcattccgccgcgccaatcgggtacacgagcagggcgggggatgacgtcgtcggcgtccgcgccggcgtccaatggaccgcgctacgcgccgccggatccaacgctgcccaagccgtggagggggctcatcgacggcaacacggggtacctctacttctggaaccctgagaccaaggttacgcagtacgagcgccccgtcgcggccgtgcccaactccccgccgcagccgcctggctactccaggcccgaggagaggccgagaagcagcacaccttccgaggtaacaactaagagcatctccaacaaatctcaaaattatttattccaatacatgagcattgggagccccctaagatttaaattcctgaaaaaagtgtcaatacttcaacaactctcaatattttcgaaaaacctaaaatgaatctgttgttgagcccacaaaacctgtctgtcgatcatacctgtcacactgtttttctgcgtcacccatccttcgttcctccctgcgccgccgatctgcttcatgtgttggcgcaagcttcagacgtgatctgctcctcgcctcaggttgcctccgttgacgtgtgggagcagctgcaggtgccaaggtggatgtaacccagccttcagtagttcaacagaatataaatcaagctgttggtcaacaatcatcatctggtacaggatacaaggaaaggaccatcacattccatttaatatgtctgcattttcttaattagaacaccacatcatcttggtgcgatgaagaagtgcatgccagtgccatatgcggaacttgtcatggacttgcaaatcttggaaggccattacctcgaaatcatcagccgccgtagatgaattttgtgtcactgtcgccaaagaagcttttgtcggcgattcaccatttgcgggatccatcgatgttgagcgtttgcgggaagagagcaccagccgcctcaacagggcgtcgtcctccacaacccacacaaaatcaagtcagcaggttctggcggaggcgcgaaacggaaaatagtgtggcaataagaaaaccggcaggtgattgggagctcagtgcgcggcgaaggtttgcgctgcggatgagcggagctcggaaaccacggtgagccgcccgcagtatgcacctctctcggataacagggcaaggaatgaccactcggagccacattatgcatctggagtgaacctttcacaaagtgctccttccactaatcaagtttctcaggctgccagtggaaaccaaatgtcgacagaagcatatcgtgctaagcatgagattaccatcatcggcaacgagtcacctgcaccattcatgacatttcagtccacatgcttcccatcagatattctaagggaggttctgcaagcaggattctctgcaccaactcctatccaagctcagtcatggccaattgctatgaagggtagggatatagtagctgtggcaaagacaggttcaggaaaaacactgggctatctcctcccagggtttattcttctgaagcgcctgcatcataattcaagggaaggtccaacagtattagttttgtccccaaccagggaattggcaacacaaattcaagatgaagcaatcaagtttggcagatcttcaagaatatcttctacttgcttatatggaggtgctccaaaaggtcctcagctaagggagttggagcgtggtgccgatgttgttgttgcaactcctgggagattgaacgacattttggaaatgaataaagtgagcctgcgccaagtatcatatcttgtccttgatgaagctgaccgtatgcttgatatgggatttgagccacaaataagaaaaattgtgaaacaaataccacctagacggcaaactcttatgtacactgccacatggccaaaagaggttagaaaaatagcgtcggatttactgaataacccagttcaagttaacattggaaacactgatcagctggttgcaaataaatcaattactcagcatgtggaagttatcccacatatggagaaatcaagacgacttgatcagatcttgcgttcacaagatcctggatcaaaaatcataatattttgctccaccaagaggatgtgtgatcagttggctagaaacctatcacggcagtatggtgcttctgctattcatggtgataaatcacaggctgagagggattctgtgttgaatgacttccgaagcggcaggtgtccagtactcgtagccactgatgtggccgctcgaggcttggacataaaggacatcaggatcgtggttaattatgatttcccaactggtgtggaggactatgtccatcgaattgggagaacaggtagggctggcgcaacaggatctgcctacacattctttggtgaccaggattcaaagtacgcttcagaacttgtgaagattttggagggtgcaaaccagtctgtgccaccacaattaaaagaaatggcccttcgtggaggatatggtggaagatcacgtcgatgggcatcttctgatgactcttatggtagtcagggatatggtgctaaaagatcaactgatagtttcaagaacagcagcttcggcaaccaggccgggggtggttcaagctttcactcgagcttccataacagctctagtggcaatcagttcggtgatactacaagctttcatgccagctatggtaacagcagccagaacaatcagacgggtgacaatccgagcttcccacccagctccagcaacaatcagtccggggatggtctcagttttcatgaaaggttctatggatcacgcggaagggacgagagcagatcaaacaatgatggattccgtgctaggagcagaagtcctggcaagcctgtggaagtttccaactggtgattgcatccactaggtgcaatccaatttttgcgatggtgacgaaaccaagtaaaagatggtacctcgacaagttatattttcctcttatcctgcttaaatctaaggatgtcctggaacatcactaacttaggatatgggtgatggtctgatcccaatggacaatggtctcctactttcttgatttgacgcctgagagacgcctgattccataccatatgcctgtggttgtagtttgtaaaatgttaaaaacttgactttgctagtatatttcctaatgctataacccaatcctgggtaaacagacgcatggggatgaattttggacggaaccatggacatttgatgtatgtgtttaatgttgtgtacaatctatgtcgaattctgttgtaagtgccgtccgcatcgttttatatctttgtgcccgttattacaggtcttaaagaatcatgctgcccgtatgtgactcttctcatg

SEQ ID NO: 29281 - DNA, 2840 bp, Zea Mays
ttgtcctcggcgcctccgcaccccatttccctttttacgcctacttgacccggcagcgttcggtgacgaaaaaaaaaacccaatcgcctccgccccctcccctactccgggcgcagccgccgacgtcgccacgcgcattccgccgcgccaatcgggtacacgagcagggcgggggatgacgtcgtcggcgtccgcgccggcgtccaatggaccgcgctacgcgccgccggatccaacgctgcccaagccgtggagggggctcatcgacggcaacacggggtacctctacttctggaaccctgagaccaaggttacgcagtacgagcgccccgtcgcggccgtgcccaactccccgccgcagccgcctggctactccaggcccgaggagaggccgagaagcagcacaccttccgagcggagctcggaaaccacggtgagccgcccgcagtatgcacctctctcggataacagggcaaggaatgaccactcggagccacattatgcatctggagtgaacctttcacaaagtgctccttccactaatcaagtttctcaggctgccagtggaaaccaaatgtcgacagaagcatatcgtgctaagcatgagattaccatcatcggcaacgagtcacctgcaccattcatgacatttcagtccacatgcttcccatcagatattctaagggaggtaagtctacgcaatgcgtagcaatatcaatgtgcttttttggatacctttctgatggaaccaggtggccatcgtgcatccattgtatgtatgcatgattaaaccgagttttctttgcagcaggctcttcaagtcaacaatccaagtcgtggttcgacctgtttgttgtcttgttctgcaagcaggattctctgcaccaactcctatccaagctcagtcatggccaattgctatgaagggtagggatatagtagctgtggcaaagacaggttcaggaaaaacactgggctatctcctcccagggtttattcttctgaagcgcctgcatcataattcaagggaaggtccaacagtattagttttgtccccaaccagggaattggcaacacaaattcaagatgaagcaatcaagtttggcagatcttcaagaatatcttctacttgcttatatggaggtgctccaaaaggtcctcagctaagggagttggagcgtggtgccgatgttgttgttgcaactcctgggagattgaacgacattttggaaatgaataaagtgagcctgcgccaagtatcatatcttgtccttgatgaagctgaccgtatgcttgatatgggatttgagccacaaataagaaaaattgtgaaacaaataccacctagacggcaaactcttatgtacactgccacatggccaaaagaggttagaaaaatagcgtcggatttactgaataacccagttcaagttaacattggaaacactgatcagctggttgcaaataaatcaattactcagcatgtggaagttatcccacatatggagaaatcaagacgacttgatcagatcttgcgttcacaagatcctggatcaaaaatcataatattttgctccaccaagaggatgtgtgatcagttggctagaaacctatcacggcagtatggtgcttctgctattcatggtgataaatcacaggctgagagggattctgtgttgaatgacttccgaagcggcaggtgtccagtactcgtagccactgatgtggccgctcgaggcttggacataaaggacatcaggatcgtggttaattatgatttcccaactggtgtggaggactatgtccatcgaattgggagaacaggtagggctggcgcaacaggatctgcctacacattctttggtgaccaggattcaaagtacgcttcagaacttgtgaagattttggagggtgcaaaccagtctgtgccaccacaattaaaagaaatggcccttcgtggaggatatggtggaagatcacgtcgatgggcatcttctgatgactcttatggtagtcagggatatggtgctaaaagatcaactgatagtttcaagaacagcagcttcggcaaccaggccgggggtggttcaagctttcactcgagcttccataacagctctagtggcaatcagttcggtgatactacaagctttcatgccagctatggtaacagcagccagaacaatcagacgggtgacaatccgagcttcccacccagctccagcaacaatcagtccggggatggtctcagttttcatgaaaggttctatggatcacgcggaagggacgagagcagatcaaacaatgatggattccgtgctaggagcagaagtcctggcaagcctgtggaagtttccaactggtgattgcatccactaggtgcaatccaatttttgcgatggtgacgaaaccaagtaaaagatggtacctcgacaagttatattttcctcttatcctgcttaaatctaaggatgtcctggaacatcactaacttaggatatgggtgatggtctgatcccaatggacaatggtctcctactttcttgatttgacgcctgagagacgcctgattccataccatatgcctgtggttgtagtttgtaaaatgttaaaaacttgactttgctagtatatttcctaatgctataacccaatcctgggtaaacagacgcatggggatgaattttggacggaaccatggacatttgatgtatgtgtttaatgttgtgtacaatctatgtcgaattctgttgtaagtgccgtccgcatcgttttatatctttgtgcccgttattacaggtcttaaagaatcatgctgcccgtatgtgactcttctcatg

SEQ ID NO: 29282 - DNA, 2832 bp, Zea Mays
ccgcaccccatttccctttttacgcctacttgacccggcagcgttcggtgacgaaaaaaaaaacccaatcgcctccgccccctcccctactccgggcgcagccgccgacgtcgccacgcgcattccgccgcgccaatcgggtacacgagcagggcgggggatgacgtcgtcggcgtccgcgccggcgtccaatggaccgcgctacgcgccgccggatccaacgctgcccaagccgtggagggggctcatcgacggcaacacggggtacctctacttctggaaccctgagaccaaggttacgcagtacgagcgccccgtcgcggccgtgcccaactccccgccgcagccgcctggctactccaggcccgaggagaggccgagaagcagcacaccttccgagcggagctcggaaaccacggtgagccgcccgcagtatgcacctctctcggataacagggcaaggaatgaccactcggagccacattatgcatctggagtgaacctttcacaaagtgctccttccactaatcaagtttctcaggctgccagtggaaaccaaatgtcgacagaagcatatcgtgctaagcatgagattaccatcatcggcaacgagtcacctgcaccattcatgacatttcagtccacatgcttcccatcagatattctaagggaggctcttcaagtcaacaatccaagtcgtggttcgacctgtttgttgtcttgtacagcctcctgcggtttgaaacagctccctattttgttcagttcccagctgcatgatgtttggcttggctttcgtgtaactaaaaatttgacatcatgagaagccttttctcgttgctatagactatagttctgcaagcaggattctctgcaccaactcctatccaagctcagtcatggccaattgctatgaagggtagggatatagtagctgtggcaaagacaggttcaggaaaaacactgggctatctcctcccagggtttattcttctgaagcgcctgcatcataattcaagggaaggtccaacagtattagttttgtccccaaccagggaattggcaacacaaattcaagatgaagcaatcaagtttggcagatcttcaagaatatcttctacttgcttatatggaggtgctccaaaaggtcctcagctaagggagttggagcgtggtgccgatgttgttgttgcaactcctgggagattgaacgacattttggaaatgaataaagtgagcctgcgccaagtatcatatcttgtccttgatgaagctgaccgtatgcttgatatgggatttgagccacaaataagaaaaattgtgaaacaaataccacctagacggcaaactcttatgtacactgccacatggccaaaagaggttagaaaaatagcgtcggatttactgaataacccagttcaagttaacattggaaacactgatcagctggttgcaaataaatcaattactcagcatgtggaagttatcccacatatggagaaatcaagacgacttgatcagatcttgcgttcacaagatcctggatcaaaaatcataatattttgctccaccaagaggatgtgtgatcagttggctagaaacctatcacggcagtatggtgcttctgctattcatggtgataaatcacaggctgagagggattctgtgttgaatgacttccgaagcggcaggtgtccagtactcgtagccactgatgtggccgctcgaggcttggacataaaggacatcaggatcgtggttaattatgatttcccaactggtgtggaggactatgtccatcgaattgggagaacaggtagggctggcgcaacaggatctgcctacacattctttggtgaccaggattcaaagtacgcttcagaacttgtgaagattttggagggtgcaaaccagtctgtgccaccacaattaaaagaaatggcccttcgtggaggatatggtggaagatcacgtcgatgggcatcttctgatgactcttatggtagtcagggatatggtgctaaaagatcaactgatagtttcaagaacagcagcttcggcaaccaggccgggggtggttcaagctttcactcgagcttccataacagctctagtggcaatcagttcggtgatactacaagctttcatgccagctatggtaacagcagccagaacaatcagacgggtgacaatccgagcttcccacccagctccagcaacaatcagtccggggatggtctcagttttcatgaaaggttctatggatcacgcggaagggacgagagcagatcaaacaatgatggattccgtgctaggagcagaagtcctggcaagcctgtggaagtttccaactggtgattgcatccactaggtgcaatccaatttttgcgatggtgacgaaaccaagtaaaagatggtacctcgacaagttatattttcctcttatcctgcttaaatctaaggatgtcctggaacatcactaacttaggatatgggtgatggtctgatcccaatggacaatggtctcctactttcttgatttgacgcctgagagacgcctgattccataccatatgcctgtggttgtagtttgtaaaatgttaaaaacttgactttgctagtatatttcctaatgctataacccaatcctgggtaaacagacgcatggggatgaattttggacggaaccatggacatttgatgtatgtgtttaatgttgtgtacaatctatgtcgaattctgttgtaagtgccgtccgcatcgttttatatctttgtgcccgttattacaggtcttaaagaatcatgctgcccgtatgtgactcttctcatg

SEQ ID NO: 29283 - DNA, 2585 bp, Zea Mays
ccccatttccctttttacgcctacttgacccggcagcgttcggtgacgaaaaaaaaaacccaatcgcctccgccccctcccctactccgggcgcagccgccgacgtcgccacgcgcattccgccgcgccaatcgggtacacgagcagggcgggggatgacgtcgtcggcgtccgcgccggcgtccaatggaccgcgctacgcgccgccggatccaacgctgcccaagccgtggagggggctcatcgacggcaacacggggtacctctacttctggaaccctgagaccaaggttacgcagtacgagcgccccgtcgcggccgtgcccaactccccgccgcagccgcctggctactccaggcccgaggagaggccgagaagcagcacaccttccgagcggagctcggaaaccacggtgagccgcccgcagtatgcacctctctcggataacagggcaaggaatgaccactcggaggctgccagtggaaaccaaatgtcgacagaagcatatcgtgctaagcatgagattaccatcatcggcaacgagtcacctgcaccattcatgacatttcagtccacatgcttcccatcagatattctaagggaggttctgcaagcaggattctctgcaccaactcctatccaagctcagtcatggccaattgctatgaagggtagggatatagtagctgtggcaaagacaggttcaggaaaaacactgggctatctcctcccagggtttattcttctgaagcgcctgcatcataattcaagggaaggtccaacagtattagttttgtccccaaccagggaattggcaacacaaattcaagatgaagcaatcaagtttggcagatcttcaagaatatcttctacttgcttatatggaggtgctccaaaaggtcctcagctaagggagttggagcgtggtgccgatgttgttgttgcaactcctgggagattgaacgacattttggaaatgaataaagtgagcctgcgccaagtatcatatcttgtccttgatgaagctgaccgtatgcttgatatgggatttgagccacaaataagaaaaattgtgaaacaaataccacctagacggcaaactcttatgtacactgccacatggccaaaagaggttagaaaaatagcgtcggatttactgaataacccagttcaagttaacattggaaacactgatcagctggttgcaaataaatcaattactcagcatgtggaagttatcccacatatggagaaatcaagacgacttgatcagatcttgcgttcacaagatcctggatcaaaaatcataatattttgctccaccaagaggatgtgtgatcagttggctagaaacctatcacggcagtatggtgcttctgctattcatggtgataaatcacaggctgagagggattctgtgttgaatgacttccgaagcggcaggtgtccagtactcgtagccactgatgtggccgctcgaggcttggacataaaggacatcaggatcgtggttaattatgatttcccaactggtgtggaggactatgtccatcgaattgggagaacaggtagggctggcgcaacaggatctgcctacacattctttggtgaccaggattcaaagtacgcttcagaacttgtgaagattttggagggtgcaaaccagtctgtgccaccacaattaaaagaaatggcccttcgtggaggatatggtggaagatcacgtcgatgggcatcttctgatgactcttatggtagtcagggatatggtgctaaaagatcaactgatagtttcaagaacagcagcttcggcaaccaggccgggggtggttcaagctttcactcgagcttccataacagctctagtggcaatcagttcggtgatactacaagctttcatgccagctatggtaacagcagccagaacaatcagacgggtgacaatccgagcttcccacccagctccagcaacaatcagtccggggatggtctcagttttcatgaaaggttctatggatcacgcggaagggacgagagcagatcaaacaatgatggattccgtgctaggagcagaagtcctggcaagcctgtggaagtttccaactggtgattgcatccactaggtgcaatccaatttttgcgatggtgacgaaaccaagtaaaagatggtacctcgacaagttatattttcctcttatcctgcttaaatctaaggatgtcctggaacatcactaacttaggatatgggtgatggtctgatcccaatggacaatggtctcctactttcttgatttgacgcctgagagacgcctgattccataccatatgcctgtggttgtagtttgtaaaatgttaaaaacttgactttgctagtatatttcctaatgctataacccaatcctgggtaaacagacgcatggggatgaattttggacggaaccatggacatttgatgtatgtgtttaatgttgtgtacaatctatgtcgaattctgttgtaagtgccgtccgcatcgttttatatctttgtgcccgttattacaggtcttaaagaatcatgctgcccgtatgtgactcttctcatg

SEQ ID NO: 29284 - DNA, 2464 bp, Zea Mays
tttttacgcctacttgacccggcagcgttcggtgacgaaaaaaaaaacccaatcgcctccgccccctcccctactccgggcgcagccgccgacgtcgccacgcgcattccgccgcgccaatcgggtacacgagcagggcgggggatgacgtcgtcggcgtccgcgccggcgtccaatggaccgcgctacgcgccgccggatccaacgctgcccaagccgtggagggggctcatcgacggcaacacggggtacctctacttctggaaccctgagaccaaggttacgcagtacgagcgccccgtcgcggccgtgcccaactccccgccgcagccgcctggctactccaggcccgaggagaggccgagaagcagcacaccttccgagcggagctcggaaaccacggtgagccgcccgcagtatgcacctctctcggataacagggcaaggaatgaccactcggagccacattatgcatctggagtgaacctttcacaaagtgctccttccactaatcaagtttctcaggctgccagtggaaaccaaatgtcgacagaagcatatcgtgctaagcatgagattaccatcatcggcaacgagtcacctgcaccattcatgacatttcagtccacatgcttcccatcagatattctaagggaggttctgcaagcaggattctctgcaccaactcctatccaagctcagtcatggccaattgctatgaaggggaattggcaacacaaattcaagatgaagcaatcaagtttggcagatcttcaagaatatcttctacttgcttatatggaggtgctccaaaaggtcctcagctaagggagttggagcgtggtgccgatgttgttgttgcaactcctgggagattgaacgacattttggaaatgaataaagtgagcctgcgccaagtatcatatcttgtccttgatgaagctgaccgtatgcttgatatgggatttgagccacaaataagaaaaattgtgaaacaaataccacctagacggcaaactcttatgtacactgccacatggccaaaagaggttagaaaaatagcgtcggatttactgaataacccagttcaagttaacattggaaacactgatcagctggttgcaaataaatcaattactcagcatgtggaagttatcccacatatggagaaatcaagacgacttgatcagatcttgcgttcacaagatcctggatcaaaaatcataatattttgctccaccaagaggatgtgtgatcagttggctagaaacctatcacggcagtatggtgcttctgctattcatggtgataaatcacaggctgagagggattctgtgttgaatgacttccgaagcggcaggtgtccagtactcgtagccactgatgtggccgctcgaggcttggacataaaggacatcaggactatgtccatcgaattgggagaacaggtagggctggcgcaacaggatctgcctacacattctttggtgaccaggattcaaagtacgcttcagaacttgtgaagattttggagggtgcaaaccagtctgtgccaccacaattaaaagaaatggcccttcgtggaggatatggtggaagatcacgtcgatgggcatcttctgatgactcttatggtagtcagggatatggtgctaaaagatcaactgatagtttcaagaacagcagcttcggcaaccaggccgggggtggttcaagctttcactcgagcttccataacagctctagtggcaatcagttcggtgatactacaagctttcatgccagctatggtaacagcagccagaacaatcagacgggtgacaatccgagcttcccacccagctccagcaacaatcagtccggggatggtctcagttttcatgaaaggttctatggatcacgcggaagggacgagagcagatcaaacaatgatggattccgtgctaggagcagaagtcctggcaagcctgtggaagtttccaactggtgattgcatccactaggtgcaatccaatttttgcgatggtgacgaaaccaagtaaaagatggtacctcgacaagttatattttcctcttatcctgcttaaatctaaggatgtcctggaacatcactaacttaggatatgggtgatggtctgatcccaatggacaatggtctcctactttcttgatttgacgcctgagagacgcctgattccataccatatgcctgtggttgtagtttgtaaaatgttaaaaacttgactttgctagtatatttcctaatgctataacccaatcctgggtaaacagacgcatggggatgaattttggacggaaccatggacatttgatgtatgtgtttaatgttgtgtacaatctatgtcgaattctgttgtaagtgccgtccgcatcgttttatatctttgtgcccgttattacaggtcttaaagaatcatgctgcccgtatgtgactcttctcatg

SEQ ID NO: 29285 - DNA, 2686 bp, Zea Mays
ccggcagcgttcggtgacgaaaaaaaaaacccaatcgcctccgccccctcccctactccgggcgcagccgccgacgtcgccacgcgcattccgccgcgccaatcgggtacacgagcagggcgggggatgacgtcgtcggcgtccgcgccggcgtccaatggaccgcgctacgcgccgccggatccaacgctgcccaagccgtggagggggctcatcgacggcaacacggggtacctctacttctggaaccctgagaccaaggttacgcagtacgagcgccccgtcgcggccgtgcccaactccccgccgcagccgcctggctactccaggcccgaggagaggccgagaagcagcacaccttccgagcggagctcggaaaccacggtgagccgcccgcagtatgcacctctctcggataacagggcaaggaatgaccactcggagccacattatgcatctggagtgaacctttcacaaagtgctccttccactaatcaagtttctcaggctgccagtggaaaccaaatgtcgacagaagcatatcgtgctaagcatgagattaccatcatcggcaacgagtcacctgcaccattcatgacatttcagtccacatgcttcccatcagatattctaagggagcaggctcttcaagtcaacaatccaagtcgtggttcgacctgtttgttgtcttgtacagcctcctgcggttctgcaagcaggattctctgcaccaactcctatccaagctcagtcatggccaattgctatgaagggtagggatatagtagctgtggcaaagacaggttcaggaaaaacactgggctatctcctcccagggtttattcttctgaagcgcctgcatcataattcaagggaaggtccaacagtattagttttgtccccaaccagggaattggcaacacaaattcaagatgaagcaatcaagtttggcagatcttcaagaatatcttctacttgcttatatggaggtgctccaaaaggtcctcagctaagggagttggagcgtggtgccgatgttgttgttgcaactcctgggagattgaacgacattttggaaatgaataaagtgagcctgcgccaagtatcatatcttgtccttgatgaagctgaccgtatgcttgatatgggatttgagccacaaataagaaaaattgtgaaacaaataccacctagacggcaaactcttatgtacactgccacatggccaaaagaggttagaaaaatagcgtcggatttactgaataacccagttcaagttaacattggaaacactgatcagctggttgcaaataaatcaattactcagcatgtggaagttatcccacatatggagaaatcaagacgacttgatcagatcttgcgttcacaagatcctggatcaaaaatcataatattttgctccaccaagaggatgtgtgatcagttggctagaaacctatcacggcagtatggtgcttctgctattcatggtgataaatcacaggctgagagggattctgtgttgaatgacttccgaagcggcaggtgtccagtactcgtagccactgatgtggccgctcgaggcttggacataaaggacatcaggatcgtggttaattatgatttcccaactggtgtggaggactatgtccatcgaattgggagaacaggtagggctggcgcaacaggatctgcctacacattctttggtgaccaggattcaaagtacgcttcagaacttgtgaagattttggagggtgcaaaccagtctgtgccaccacaattaaaagaaatggcccttcgtggaggatatggtggaagatcacgtcgatgggcatcttctgatgactcttatggtagtcagggatatggtgctaaaagatcaactgatagtttcaagaacagcagcttcggcaaccaggccgggggtggttcaagctttcactcgagcttccataacagctctagtggcaatcagttcggtgatactacaagctttcatgccagctatggtaacagcagccagaacaatcagacgggtgacaatccgagcttcccacccagctccagcaacaatcagtccggggatggtctcagttttcatgaaaggttctatggatcacgcggaagggacgagagcagatcaaacaatgatggattccgtgctaggagcagaagtcctggcaagcctgtggaagtttccaactggtgattgcatccactaggtgcaatccaatttttgcgatggtgacgaaaccaagtaaaagatggtacctcgacaagttatattttcctcttatcctgcttaaatctaaggatgtcctggaacatcactaacttaggatatgggtgatggtctgatcccaatggacaatggtctcctactttcttgatttgacgcctgagagacgcctgattccataccatatgcctgtggttgtagtttgtaaaatgttaaaaacttgactttgctagtatatttcctaatgctataacccaatcctgggtaaacagacgcatggggatgaattttggacggaaccatggacatttgatgtatgtgtttaatgttgtgtacaatctatgtcgaattctgttgtaagtgccgtccgcatcgttttatatctttgtgcccgttattacaggtcttaaagaatcatgctgcccgtatgtgactcttctcatg

SEQ ID NO: 29286 - DNA, 3012 bp, Zea Mays
gtaacaactaagagcatctccaacaaatctcaaaattatttattccaatacatgagcattgggagccccctaagatttaaattcctgaaaaaagtgtcaatacttcaacaactctcaatattttcgaaaaacctaaaatgaatctgttgttgagcccacaaaacctgtctgtcgatcatacctgtcacactgtttttctgcgtcacccatccttcgttcctccctgcgccgccgatctgcttcatgtgttggcgcaagcttcagacgtgatctgctcctcgcctcaggttgcctccgttgacgtgtgggagcagctgcaggtgccaaggtggatgtaacccagccttcagtagttcaacagaatataaatcaagctgttggtcaacaatcatcatctggtacaggatacaaggaaaggaccatcacattccatttaatatgtctgcattttcttaattagaacaccacatcatcttggtgcgatgaagaagtgcatgccagtgccatatgcggaacttgtcatggacttgcaaatcttggaaggccattacctcgaaatcatcagccgccgtagatgaattttgtgtcactgtcgccaaagaagcttttgtcggcgattcaccatttgcgggatccatcgatgttgagcgtttgcgggaagagagcaccagccgcctcaacagggcgtcgtcctccacaacccacacaaaatcaagtcagcaggttctggcggaggcgcgaaacggaaaatagtgtggcaataagaaaaccggcaggtgattgggagctcagtgcgcggcgaaggtttgcgctgcggatgagcggagctcggaaaccacggtgagccgcccgcagtatgcacctctctcggataacagggcaaggaatgaccactcggaggctgccagtggaaaccaaatgtcgacagaagcatatcgtgctaagcatgagattaccatcatcggcaacgagtcacctgcaccattcatgacatttcagtccacatgcttcccatcagatattctaagggaggttctgcaagcaggattctctgcaccaactcctatccaagctcagtcatggccaattgctatgaagggtagggatatagtagctgtggcaaagacaggttcaggaaaaacactgggctatctcctcccagggtttattcttctgaagcgcctgcatcataattcaagggaaggtccaacagtattagttttgtccccaaccagggaattggcaacacaaattcaagatgaagcaatcaagtttggcagatcttcaagaatatcttctacttgcttatatggaggtgctccaaaaggtcctcagctaagggagttggagcgtggtgccgatgttgttgttgcaactcctgggagattgaacgacattttggaaatgaataaagtgagcctgcgccaagtatcatatcttgtccttgatgaagctgaccgtatgcttgatatgggatttgagccacaaataagaaaaattgtgaaacaaataccacctagacggcaaactcttatgtacactgccacatggccaaaagaggttagaaaaatagcgtcggatttactgaataacccagttcaagttaacattggaaacactgatcagctggttgcaaataaatcaattactcagcatgtggaagttatcccacatatggagaaatcaagacgacttgatcagatcttgcgttcacaagatcctggatcaaaaatcataatattttgctccaccaagaggatgtgtgatcagttggctagaaacctatcacggcagtatggtgcttctgctattcatggtgataaatcacaggctgagagggattctgtgttgaatgacttccgaagcggcaggtgtccagtactcgtagccactgatgtggccgctcgaggcttggacataaaggacatcaggatcgtggttaattatgatttcccaactggtgtggaggactatgtccatcgaattgggagaacaggtagggctggcgcaacaggatctgcctacacattctttggtgaccaggattcaaagtacgcttcagaacttgtgaagattttggagggtgcaaaccagtctgtgccaccacaattaaaagaaatggcccttcgtggaggatatggtggaagatcacgtcgatgggcatcttctgatgactcttatggtagtcagggatatggtgctaaaagatcaactgatagtttcaagaacagcagcttcggcaaccaggccgggggtggttcaagctttcactcgagcttccataacagctctagtggcaatcagttcggtgatactacaagctttcatgccagctatggtaacagcagccagaacaatcagacgggtgacaatccgagcttcccacccagctccagcaacaatcagtccggggatggtctcagttttcatgaaaggttctatggatcacgcggaagggacgagagcagatcaaacaatgatggattccgtgctaggagcagaagtcctggcaagcctgtggaagtttccaactggtgattgcatccactaggtgcaatccaatttttgcgatggtgacgaaaccaagtaaaagatggtacctcgacaagttatattttcctcttatcctgcttaaatctaaggatgtcctggaacatcactaacttaggatatgggtgatggtctgatcccaatggacaatggtctcctactttcttgatttgacgcctgagagacgcctgattccataccatatgcctgtggttgtagtttgtaaaatgttaaaaacttgactttgctagtatatttcctaatgctataacccaatcctgggtaaacagacgcatggggatgaattttggacggaaccatggacatttgatgtatgtgtttaatgttgtgtacaatctatgtcgaattctgttgtaagtgccgtccgcatcgttttatatctttgtgcccgttattacaggtcttaaagaatcatgctgcccgtatgtgactcttctcatg

SEQ ID NO: 29287 - DNA, 3137 bp, Zea Mays
aacaactaagagcatctccaacaaatctcaaaattatttattccaatacatgagcattgggagccccctaagatttaaattcctgaaaaaagtgtcaatacttcaacaactctcaatattttcgaaaaacctaaaatgaatctgttgttgagcccacaaaacctgtctgtcgatcatacctgtcacactgtttttctgcgtcacccatccttcgttcctccctgcgccgccgatctgcttcatgtgttggcgcaagcttcagacgtgatctgctcctcgcctcaggttgcctccgttgacgtgtgggagcagctgcaggtgccaaggtggatgtaacccagccttcagtagttcaacagaatataaatcaagctgttggtcaacaatcatcatctggtacaggatacaaggaaaggaccatcacattccatttaatatgtctgcattttcttaattagaacaccacatcatcttggtgcgatgaagaagtgcatgccagtgccatatgcggaacttgtcatggacttgcaaatcttggaaggccattacctcgaaatcatcagccgccgtagatgaattttgtgtcactgtcgccaaagaagcttttgtcggcgattcaccatttgcgggatccatcgatgttgagcgtttgcgggaagagagcaccagccgcctcaacagggcgtcgtcctccacaacccacacaaaatcaagtcagcaggttctggcggaggcgcgaaacggaaaatagtgtggcaataagaaaaccggcaggtgattgggagctcagtgcgcggcgaaggtttgcgctgcggatgagcggagctcggaaaccacggtgagccgcccgcagtatgcacctctctcggataacagggcaaggaatgaccactcggagccacattatgcatctggagtgaacctttcacaaagtgctccttccactaatcaagtttctcaggctgccagtggaaaccaaatgtcgacagaagcatatcgtgctaagcatgagattaccatcatcggcaacgagtcacctgcaccattcatgacatttcagtccacatgcttcccatcagatattctaagggaggctcttcaagtcaacaatccaagtcgtggttcgacctgtttgttgtcttgtacagcctcctgcggttctgcaagcaggattctctgcaccaactcctatccaagctcagtcatggccaattgctatgaagggtagggatatagtagctgtggcaaagacaggttcaggaaaaacactgggctatctcctcccagggtttattcttctgaagcgcctgcatcataattcaagggaaggtccaacagtattagttttgtccccaaccagggaattggcaacacaaattcaagatgaagcaatcaagtttggcagatcttcaagaatatcttctacttgcttatatggaggtgctccaaaaggtcctcagctaagggagttggagcgtggtgccgatgttgttgttgcaactcctgggagattgaacgacattttggaaatgaataaagtgagcctgcgccaagtatcatatcttgtccttgatgaagctgaccgtatgcttgatatgggatttgagccacaaataagaaaaattgtgaaacaaataccacctagacggcaaactcttatgtacactgccacatggccaaaagaggttagaaaaatagcgtcggatttactgaataacccagttcaagttaacattggaaacactgatcagctggttgcaaataaatcaattactcagcatgtggaagttatcccacatatggagaaatcaagacgacttgatcagatcttgcgttcacaagatcctggatcaaaaatcataatattttgctccaccaagaggatgtgtgatcagttggctagaaacctatcacggcagtatggtgcttctgctattcatggtgataaatcacaggctgagagggattctgtgttgaatgacttccgaagcggcaggtgtccagtactcgtagccactgatgtggccgctcgaggcttggacataaaggacatcaggatcgtggttaattatgatttcccaactggtgtggaggactatgtccatcgaattgggagaacaggtagggctggcgcaacaggatctgcctacacattctttggtgaccaggattcaaagtacgcttcagaacttgtgaagattttggagggtgcaaaccagtctgtgccaccacaattaaaagaaatggcccttcgtggaggatatggtggaagatcacgtcgatgggcatcttctgatgactcttatggtagtcagggatatggtgctaaaagatcaactgatagtttcaagaacagcagcttcggcaaccaggccgggggtggttcaagctttcactcgagcttccataacagctctagtggcaatcagttcggtgatactacaagctttcatgccagctatggtaacagcagccagaacaatcagacgggtgacaatccgagcttcccacccagctccagcaacaatcagtccggggatggtctcagttttcatgaaaggttctatggatcacgcggaagggacgagagcagatcaaacaatgatggattccgtgctaggagcagaagtcctggcaagcctgtggaagtttccaactggtgattgcatccactaggtgcaatccaatttttgcgatggtgacgaaaccaagtaaaagatggtacctcgacaagttatattttcctcttatcctgcttaaatctaaggatgtcctggaacatcactaacttaggatatgggtgatggtctgatcccaatggacaatggtctcctactttcttgatttgacgcctgagagacgcctgattccataccatatgcctgtggttgtagtttgtaaaatgttaaaaacttgactttgctagtatatttcctaatgctataacccaatcctgggtaaacagacgcatggggatgaattttggacggaaccatggacatttgatgtatgtgtttaatgttgtgtacaatctatgtcgaattctgttgtaagtgccgtccgcatcgttttatatctttgtgcccgttattacaggtcttaaagaatcatgctgcccgtatgtgactcttctcatg

SEQ ID NO: 29288 - DNA, 2969 bp, Zea Mays
gcatctccaacaaatctcaaaattatttattccaatacatgagcattgggagccccctaagatttaaattcctgaaaaaagtgtcaatacttcaacaactctcaatattttcgaaaaacctaaaatgaatctgttgttgagcccacaaaacctgtctgtcgatcatacctgtcacactgtttttctgcgtcacccatccttcgttcctccctgcgccgccgatctgcttcatgtgttggcgcaagcttcagacgtgatctgctcctcgcctcaggttgcctccgttgacgtgtgggagcagctgcaggtgccaaggtggatgtaacccagccttcagtagttcaacagaatataaatcaagctgttggtcaacaatcatcatctggtacaggatacaaggaaaggaccatcacattccatttaatatgtctgcattttcttaattagaacaccacatcatcttggtgcgatgaagaagtgcatgccagtgccatatgcggaacttgtcatggacttgcaaatcttggaaggccattacctcgaaatcatcagccgccgtagatgaattttgtgtcactgtcgccaaagaagcttttgtcggcgattcaccatttgcgggatccatcgatgttgagcgtttgcgggaagagagcaccagccgcctcaacagggcgtcgtcctccacaacccacacaaaatcaagtcagcaggttctggcggaggcgcgaaacggaaaatagtgtggcaataagaaaaccggcaggtgattgggagctcagtgcgcggcgaaggtttgcgctgcggatgagcggagctcggaaaccacggtgagccgcccgcagtatgcacctctctcggataacagggcaaggaatgaccactcggagccacattatgcatctggagtgaacctttcacaaagtgctccttccactaatcaagtttctcaggctgccagtggaaaccaaatgtcgacagaagcatatcgtgctaagcatgagattaccatcatcggcaacgagtcacctgcaccattcatgacatttcagtccacatgcttcccatcagatattctaagggaggttctgcaagcaggattctctgcaccaactcctatccaagctcagtcatggccaattgctatgaagggtagggatatagtagctgtggcaaagacaggttcaggaaaaacactgggctatctcctcccagggtttattcttctgaagcgcctgcatcataattcaagggaaggtccaacagtattagttttgtccccaaccagggaattggcaacacaaattcaagatgaagcaatcaagtttggcagatcttcaagaatatcttctacttgcttatatggaggtgctccaaaaggtcctcagctaagggagttggagcgtggtgccgatgttgttgttgcaactcctgggagattgaacgacattttggaaatgaataaagtgagcctgcgccaagtatcatatcttgtccttgatgaagctgaccgtatgcttgatatgggatttgagccacaaataagaaaaattgtgaaacaaataccacctagacggcaaactcttatgtacactgccacatggccaaaagagcatgtggaagttatcccacatatggagaaatcaagacgacttgatcagatcttgcgttcacaagatcctggatcaaaaatcataatattttgctccaccaagaggatgtgtgatcagttggctagaaacctatcacggcagtatggtgcttctgctattcatggtgataaatcacaggctgagagggattctgtgttgaatgacttccgaagcggcaggtgtccagtactcgtagccactgatgtggccgctcgaggcttggacataaaggacatcaggatcgtggttaattatgatttcccaactggtgtggaggactatgtccatcgaattgggagaacaggtagggctggcgcaacaggatctgcctacacattctttggtgaccaggattcaaagtacgcttcagaacttgtgaagattttggagggtgcaaaccagtctgtgccaccacaattaaaagaaatggcccttcgtggaggatatggtggaagatcacgtcgatgggcatcttctgatgactcttatggtagtcagggatatggtgctaaaagatcaactgatagtttcaagaacagcagcttcggcaaccaggccgggggtggttcaagctttcactcgagcttccataacagctctagtggcaatcagttcggtgatactacaagctttcatgccagctatggtaacagcagccagaacaatcagacgggtgacaatccgagcttcccacccagctccagcaacaatcagtccggggatggtctcagttttcatgaaaggttctatggatcacgcggaagggacgagagcagatcaaacaatgatggattccgtgctaggagcagaagtcctggcaagcctgtggaagtttccaactggtgattgcatccactaggtgcaatccaatttttgcgatggtgacgaaaccaagtaaaagatggtacctcgacaagttatattttcctcttatcctgcttaaatctaaggatgtcctggaacatcactaacttaggatatgggtgatggtctgatcccaatggacaatggtctcctactttcttgatttgacgcctgagagacgcctgattccataccatatgcctgtggttgtagtttgtaaaatgttaaaaacttgactttgctagtatatttcctaatgctataacccaatcctgggtaaacagacgcatggggatgaattttggacggaaccatggacatttgatgtatgtgtttaatgttgtgtacaatctatgtcgaattctgttgtaagtgccgtccgcatcgttttatatctttgtgcccgttattacaggtcttaaagaatcatgctgcccgtatgtgactcttctcatg

SEQ ID NO: 29289 - DNA, 2425 bp, Zea Mays
gttgagcccacaaaacctgtctgtcgatcatacctgtcacactgtttttctgcgtcacccatccttcgttcctccctgcgccgccgatctgcttcatgtgttggcgcaagcttcagacgtgatctgctcctcgcctcaggttgcctccgttgacgtgtgggagcagctgcagcggagctcggaaaccacggtgagccgcccgcagtatgcacctctctcggataacagggcaaggaatgaccactcggagccacattatgcatctggagtgaacctttcacaaagtgctccttccactaatcaagtttctcaggctgccagtggaaaccaaatgtcgacagaagcatatcgtgctaagcatgagattaccatcatcggcaacgagtcacctgcaccattcatgacatttcagtccacatgcttcccatcagatattctaagggaggttctgcaagcaggattctctgcaccaactcctatccaagctcagtcatggccaattgctatgaagggtagggatatagtagctgtggcaaagacaggttcaggaaaaacactgggctatctcctcccagggtttattcttctgaagcgcctgcatcataattcaagggaaggtccaacagtattagttttgtccccaaccagggaattggcaacacaaattcaagatgaagcaatcaagtttggcagatcttcaagaatatcttctacttgcttatatggaggtgctccaaaaggtcctcagctaagggagttggagcgtggtgccgatgttgttgttgcaactcctgggagattgaacgacattttggaaatgaataaagtgagcctgcgccaagtatcatatcttgtccttgatgaagctgaccgtatgcttgatatgggatttgagccacaaataagaaaaattgtgaaacaaataccacctagacggcaaactcttatgtacactgccacatggccaaaagaggttagaaaaatagcgtcggatttactgaataacccagttcaagttaacattggaaacactgatcagctggttgcaaataaatcaattactcagcatgtggaagttatcccacatatggagaaatcaagacgacttgatcagatcttgcgttcacaagatcctggatcaaaaatcataatattttgctccaccaagaggatgtgtgatcagttggctagaaacctatcacggcagtatggtgcttctgctattcatggtgataaatcacaggctgagagggattctgtgttgaatgacttccgaagcggcaggtgtccagtactcgtagccactgatgtggccgctcgaggcttggacataaaggacatcaggatcgtggttaattatgatttcccaactggtgtggaggactatgtccatcgaattgggagaacaggtagggctggcgcaacaggatctgcctacacattctttggtgaccaggattcaaagtacgcttcagaacttgtgaagattttggagggtgcaaaccagtctgtgccaccacaattaaaagaaatggcccttcgtggaggatatggtggaagatcacgtcgatgggcatcttctgatgactcttatggtagtcagggatatggtgctaaaagatcaactgatagtttcaagaacagcagcttcggcaaccaggccgggggtggttcaagctttcactcgagcttccataacagctctagtggcaatcagttcggtgatactacaagctttcatgccagctatggtaacagcagccagaacaatcagacgggtgacaatccgagcttcccacccagctccagcaacaatcagtccggggatggtctcagttttcatgaaaggttctatggatcacgcggaagggacgagagcagatcaaacaatgatggattccgtgctaggagcagaagtcctggcaagcctgtggaagtttccaactggtgattgcatccactaggtgcaatccaatttttgcgatggtgacgaaaccaagtaaaagatggtacctcgacaagttatattttcctcttatcctgcttaaatctaaggatgtcctggaacatcactaacttaggatatgggtgatggtctgatcccaatggacaatggtctcctactttcttgatttgacgcctgagagacgcctgattccataccatatgcctgtggttgtagtttgtaaaatgttaaaaacttgactttgctagtatatttcctaatgctataacccaatcctgggtaaacagacgcatggggatgaattttggacggaaccatggacatttgatgtatgtgtttaatgttgtgtacaatctatgtcgaattctgttgtaagtgccgtccgcatcgttttatatctttgtgcccgttattacaggtcttaaagaatcatgctgcccgtatgtgactcttctcatg

SEQ ID NO: 29290 - DNA, 2222 bp, Zea Mays
ttgcctccgttgacgtgtgggagcagctgcagcggagctcggaaaccacggtgagccgcccgcagtatgcacctctctcggataacagggcaaggaatgaccactcggaggctgccagtggaaaccaaatgtcgacagaagcatatcgtgctaagcatgagattaccatcatcggcaacgagtcacctgcaccattcatgacatttcagtccacatgcttcccatcagatattctaagggaggttctgcaagcaggattctctgcaccaactcctatccaagctcagtcatggccaattgctatgaagggtagggatatagtagctgtggcaaagacaggttcaggaaaaacactgggctatctcctcccagggtttattcttctgaagcgcctgcatcataattcaagggaaggtccaacagtattagttttgtccccaaccagggaattggcaacacaaattcaagatgaagcaatcaagtttggcagatcttcaagaatatcttctacttgcttatatggaggtgctccaaaaggtcctcagctaagggagttggagcgtggtgccgatgttgttgttgcaactcctgggagattgaacgacattttggaaatgaataaagtgagcctgcgccaagtatcatatcttgtccttgatgaagctgaccgtatgcttgatatgggatttgagccacaaataagaaaaattgtgaaacaaataccacctagacggcaaactcttatgtacactgccacatggccaaaagaggttagaaaaatagcgtcggatttactgaataacccagttcaagttaacattggaaacactgatcagctggttgcaaataaatcaattactcagcatgtggaagttatcccacatatggagaaatcaagacgacttgatcagatcttgcgttcacaagatcctggatcaaaaatcataatattttgctccaccaagaggatgtgtgatcagttggctagaaacctatcacggcagtatggtgcttctgctattcatggtgataaatcacaggctgagagggattctgtgttgaatgacttccgaagcggcaggtgtccagtactcgtagccactgatgtggccgctcgaggcttggacataaaggacatcaggatcgtggttaattatgatttcccaactggtgtggaggactatgtccatcgaattgggagaacaggtagggctggcgcaacaggatctgcctacacattctttggtgaccaggattcaaagtacgcttcagaacttgtgaagattttggagggtgcaaaccagtctgtgccaccacaattaaaagaaatggcccttcgtggaggatatggtggaagatcacgtcgatgggcatcttctgatgactcttatggtagtcagggatatggtgctaaaagatcaactgatagtttcaagaacagcagcttcggcaaccaggccgggggtggttcaagctttcactcgagcttccataacagctctagtggcaatcagttcggtgatactacaagctttcatgccagctatggtaacagcagccagaacaatcagacgggtgacaatccgagcttcccacccagctccagcaacaatcagtccggggatggtctcagttttcatgaaaggttctatggatcacgcggaagggacgagagcagatcaaacaatgatggattccgtgctaggagcagaagtcctggcaagcctgtggaagtttccaactggtgattgcatccactaggtgcaatccaatttttgcgatggtgacgaaaccaagtaaaagatggtacctcgacaagttatattttcctcttatcctgcttaaatctaaggatgtcctggaacatcactaacttaggatatgggtgatggtctgatcccaatggacaatggtctcctactttcttgatttgacgcctgagagacgcctgattccataccatatgcctgtggttgtagtttgtaaaatgttaaaaacttgactttgctagtatatttcctaatgctataacccaatcctgggtaaacagacgcatggggatgaattttggacggaaccatggacatttgatgtatgtgtttaatgttgtgtacaatctatgtcgaattctgttgtaagtgccgtccgcatcgttttatatctttgtgcccgttattacaggtcttaaagaatcatgctgcccgtatgtgactcttctcatg

SEQ ID NO: 29291 - DNA, 2016 bp, Zea Mays
agttcccagctgcatgatgtttggcttggctttcgtgttctgcaagcaggattctctgcaccaactcctatccaagctcagtcatggccaattgctatgaagggtagggatatagtagctgtggcaaagacaggttcaggaaaaacactgggctatctcctcccagggtttattcttctgaagcgcctgcatcataattcaagggaaggtccaacagtattagttttgtccccaaccagggaattggcaacacaaattcaagatgaagcaatcaagtttggcagatcttcaagaatatcttctacttgcttatatggaggtgctccaaaaggtcctcagctaagggagttggagcgtggtgccgatgttgttgttgcaactcctgggagattgaacgacattttggaaatgaataaagtgagcctgcgccaagtatcatatcttgtccttgatgaagctgaccgtatgcttgatatgggatttgagccacaaataagaaaaattgtgaaacaaataccacctagacggcaaactcttatgtacactgccacatggccaaaagaggttagaaaaatagcgtcggatttactgaataacccagttcaagttaacattggaaacactgatcagctggttgcaaataaatcaattactcagcatgtggaagttatcccacatatggagaaatcaagacgacttgatcagatcttgcgttcacaagatcctggatcaaaaatcataatattttgctccaccaagaggatgtgtgatcagttggctagaaacctatcacggcagtatggtgcttctgctattcatggtgataaatcacaggctgagagggattctgtgttgaatgacttccgaagcggcaggtgtccagtactcgtagccactgatgtggccgctcgaggcttggacataaaggacatcaggatcgtggttaattatgatttcccaactggtgtggaggactatgtccatcgaattgggagaacaggtagggctggcgcaacaggatctgcctacacattctttggtgaccaggattcaaagtacgcttcagaacttgtgaagattttggagggtgcaaaccagtctgtgccaccacaattaaaagaaatggcccttcgtggaggatatggtggaagatcacgtcgatgggcatcttctgatgactcttatggtagtcagggatatggtgctaaaagatcaactgatagtttcaagaacagcagcttcggcaaccaggccgggggtggttcaagctttcactcgagcttccataacagctctagtggcaatcagttcggtgatactacaagctttcatgccagctatggtaacagcagccagaacaatcagacgggtgacaatccgagcttcccacccagctccagcaacaatcagtccggggatggtctcagttttcatgaaaggttctatggatcacgcggaagggacgagagcagatcaaacaatgatggattccgtgctaggagcagaagtcctggcaagcctgtggaagtttccaactggtgattgcatccactaggtgcaatccaatttttgcgatggtgacgaaaccaagtaaaagatggtacctcgacaagttatattttcctcttatcctgcttaaatctaaggatgtcctggaacatcactaacttaggatatgggtgatggtctgatcccaatggacaatggtctcctactttcttgatttgacgcctgagagacgcctgattccataccatatgcctgtggttgtagtttgtaaaatgttaaaaacttgactttgctagtatatttcctaatgctataacccaatcctgggtaaacagacgcatggggatgaattttggacggaaccatggacatttgatgtatgtgtttaatgttgtgtacaatctatgtcgaattctgttgtaagtgccgtccgcatcgttttatatctttgtgcccgttattacaggtcttaaagaatcatgctgcccgtatgtgactcttctcatg

SEQ ID NO: 29292 - DNA, 605 bp, Zea Mays
gtcatttggtgctgtctgtcttgttgaggttctatggatcacgcggaagggacgagagcagatcaaacaatgatggattccgtgctaggagcagaagtcctggcaagcctgtggaagtttccaactggtgattgcatccactaggtgcaatccaatttttgcgatggtgacgaaaccaagtaaaagatggtacctcgacaagttatattttcctcttatcctgcttaaatctaaggatgtcctggaacatcactaacttaggatatgggtgatggtctgatcccaatggacaatggtctcctactttcttgatttgacgcctgagagacgcctgattccataccatatgcctgtggttgtagtttgtaaaatgttaaaaacttgactttgctagtatatttcctaatgctataacccaatcctgggtaaacagacgcatggggatgaattttggacggaaccatggacatttgatgtatgtgtttaatgttgtgtacaatctatgtcgaattctgttgtaagtgccgtccgcatcgttttatatctttgtgcccgttattacaggtcttaaagaatcatgctgcccgtatgtgactcttctcatg

SEQ ID NO: 29293 - DNA, 2812 bp, Zea Mays
gcgctacggaaaggtggcgccgggcgtgaatcttcccgggatcccgtactcgttcgtgcctgtggctctgggattataccaatacgagcacgtcgagtagtgagccagtgagacgacgcgaggcaggttggcagggcccgcagtgcacaagcacaattggacttgttgcgtggcggcttttctttcttcgtccgaccttggcagttggtcgtgtactcgtgtccatgtcgtcggcagcttgaccctgttggatcgggcacatgttccttttttcctccgatccagaaagtagcgtcaccggtgaggtgagctcaggaatacatacacgcttgacgcgggggcggggacgagggagataaacggtcgaagatcaggcacatcatagtgctcgagaattcaattcgcaagatggggaataaggccaggggacatcatattcatttctctgaaagaaaaaaggactaacgggagaagagaaggacgcatcccaccaggcgtgcggcatgccctctcgtgtgctcggagcgtcaggtcagcccgcctcgtcggccatgctgtgatctgaaatgagtccggcggcgctttcgtcgcgatagtggatctttgctttccgcgaacggggccggcgataaagaggacgaagccccggtgagccatgggatgggaatataaagaattcgttggtggttggctgccaattcaaggcgagagcggcggggcgcgggtggaatcgaccgaaacgctgtcgtggccgtgcagtggaggatgacgcgcgctcgacggagacggcgaccgcccgccgagtgagacgacgacgacgacgaaagtccgatcgcaggcctcgtagcccaaagtcctttgctggtacaagtgagccgcgattgctctcacgcttcgggtagggtaggcccattattcagactgggggccgtgttggtaaaggcccacctcccatctcggcccgcctaactcaccggggcgcacacttcggcagttgagagaacaaacgaactggtgggtgggttggggggtcgtcgccgccggccggtggagttgctcgctcctgcctcttggatctgccgcccggtggtggctcgccgccaaggatggcgcgggcggagaagatacgctccggtagcacggcgttggcgacggcttcgacggagacgccaggcaggtcgacggaccaccggagggcgctctacttcgccgccttcctggtgctggccgacgccgcgctcgtcgccctcatcgtcgccttcgtcccgtataccaagatcgactgggacgcctacatgtcccaggtggacgcttttctggagggggagagggactacaccaagatcgagggagacacagggccattggtctacccggccggattcctctacgtctactccgccgttaagttccttacgggaggccgcgtcttccctgctcagcttccatggtgggctttaggtttgctttgtttgtccaagagggttcactccatctttgttctccgtcttttcaatgactgcttcgccatgacattgctccacgctgctatggttttgatcatttatcgcaagtggtaccttggtctagtagttttcagtggagctgtctcaattaagatgaatgtccttctttttgctccttctttgcttctacttatggtcaaggccatgagcatcaaaggagtcttctttgccttattgggagctgctgtcgtacaggttttgttgggtatgccattcttgctgtcacatccagttgagtacatctcaagagcattcaatctcggtcgcgtgtttatccatttctggtctgtgaactttaaattcgtcccagagaaggtgtttgtatcgaaagagcttgccattgcattgttgattcttcacctcaccacacttatgatatttgctcactacaagtggttaaagcatgaaggaggcctattcggtttcctgcattccagatttaaaaatgctaaatcaatcaagcagcttgtttccagccagcccagaccatccagtctcagcgcagaacatattgtaactgttatgtttgttggcaacttcattggcgttgtgtgtgcccgatcattgcactaccaattctattcctggtacttctattccttgccttttctattgtggaaaacacgttaccagacacctttgaggattattctatttctcgttgtggagtgctgctggaatgtttacccttccactgcctattcatcactccttttgctatttgtgcacttgtgcattttgtttggtatatggttttcacctgctgaatacccctatatcatcagtaaagggacaaaacggacataccaagaagttgcaaagctagacttccctgcaaaatagtgtaatctttgaaggtagcagtgaggatacaagtgtcaaaggcttctggaaattgtgaggtactttggtatgccaatactcttgggactagttggcccaaatttctcgagtagcatctagacatataccaaatatgtatgtccatgtgtaacttcttaacatagatgatagcgactctaactataagagtaactatggctgcggacttccccaggatcttgttttatcatcctttagacatgtctcagcagtcagcagccaaaagagatccatgcctcaccttataaggccttgtttgatccgacttgttactgaaggctctaaaacaacttcagctcttcatgtactagaacatggggcgccccttcgggcgccttatgaggcagtaagtaacacctaattatatgacaatagccacacacataaggcatattgaatagtat

SEQ ID NO: 29294 - DNA, 1912 bp, Zea Mays
gcgcacacttcggcagttgagagaacaaacgaactggtgggtgggttggggggtcgtcgccgccggccggtggagttgctcgctcctgcctcttggatctgccgcccggtggtggctcgccgccaaggatggcgcgggcggagaagatacgctccggtagcacggcgttggcgacggcttcgacggagacgccaggcaggtcgacggaccaccggagggcgctctacttcgccgccttcctggtgctggccgacgccgcgctcgtcgccctcatcgtcgccttcgtcccgtataccaagatcgactgggacgcctacatgtcccaggtggacgcttttctggagggggagagggactacaccaagatcgagggagacacagggccattggtctacccggccggattcctctacgtctactccgccgttaagttccttacgggaggccgcgtcttccctgctcagattttgtttggcgtcttgtacattgtcaacttgagcctcactcttctgctttacgtcaagactgaagtgcttccatggtgggctttaggtttgctttgtttgtccaagagggttcactccatctttgttctccgtcttttcaatgactgcttcgccatgacattgctccacgctgctatggttttgatcatttatcgcaagtggtaccttggtctagtagttttcaggtgaccatgtggagctgtctcaattaagatgaatgtccttctttttgctccttctttgcttctacttatggtcaaggccatgagcatcaaaggagtcttctttgccttattgggagctgctgtcgtacaggttttgttgggtatgccattcttgctgtcacatccagttgagtacatctcaagagcattcaatctcggtcgcgtgtttatccatttctggtctgtgaactttaaattcgtcccagagaaggtgtttgtatcgaaagagcttgccattgcattgttgattcttcacctcaccacacttatgatatttgctcactacaagtggttaaagcatgaaggaggcctattcggtttcctgcattccagatttaaaaatgctaaatcaatcaagcagcttgtttccagccagcccagaccatccagtctcagcgcagaacatattgtaactgttatgtttgttggcaacttcattggcgttgtgtgtgcccgatcattgcactaccaattctattcctggtacttctattccttgccttttctattgtggaaaacacgttaccagacacctttgaggattattctatttctcgttgtggagtgctgctggaatgtttacccttccactgcctattcatcactccttttgctatttgtgcacttgtgcattttgtttggtatatggttttcacctgctgaatacccctatatcatcagtaaagggacaaaacggacataccaagaagttgcaaagctagacttccctgcaaaatagtgtaatctttgaaggtagcagtgaggatacaagtgtcaaaggcttctggaaattgtgaggtactttggtatgccaatactcttgggactagttggcccaaatttctcgagtagcatctagacatataccaaatatgtatgtccatgtgtaacttcttaacatagatgatagcgactctaactataagagtaactatggctgcggacttccccaggatcttgttttatcatcctttagacatgtctcagcagtcagcagccaaaagagatccatgcctcaccttataaggccttgtttgatccgacttgttactgaaggctctaaaacaacttcagctcttcatgtactagaacatggggcgccccttcgggcgccttatgaggcagtaagtaacacctaattatatgacaatagccacacacataaggcatattgaatagtat

SEQ ID NO: 29295 - DNA, 1850 bp, Zea Mays
gcgcacacttcggcagttgagagaacaaacgaactggtgggtgggttggggggtcgtcgccgccggccggtggagttgctcgctcctgcctcttggatctgccgcccggtggtggctcgccgccaaggatggcgcgggcggagaagatacgctccggtagcacggcgttggcgacggcttcgacggagacgccaggcaggtcgacggaccaccggagggcgctctacttcgccgccttcctggtgctggccgacgccgcgctcgtcgccctcatcgtcgccttcgtcccgtataccaagatcgactgggacgcctacatgtcccaggtggacgcttttctggagggggagagggactacaccaagatcgagggagacacagggccattggtctacccggccggattcctctacgtctactccgccgttaagttccttacgggaggccgcgtcttccctgctcagattttgtttggcgtcttgtacattgtcaacttgagcctcactcttctgctttacgtcaagactgaagtgcttccatggtgggctttaggtttgctttgtttgtccaagagggttcactccatctttgttctccgtcttttcaatgactgcttcgccatgacattgctccacgctgctatggttttgatcatttatcgcaagtggtaccttggtctagtagttttcagtggagctgtctcaattaagatgaatgtccttctttttgctccttctttgcttctacttatggtcaaggccatgagcatcaaaggagtcttctttgccttattgggagctgctgtcgtacaggttttgttgggtatgccattcttgctgtcacatccagtctgtgaactttaaattcgtcccagagaaggtgtttgtatcgaaagagcttgccattgcattgttgattcttcacctcaccacacttatgatatttgctcactacaagtggttaaagcatgaaggaggcctattcggtttcctgcattccagatttaaaaatgctaaatcaatcaagcagcttgtttccagccagcccagaccatccagtctcagcgcagaacatattgtaactgttatgtttgttggcaacttcattggcgttgtgtgtgcccgatcattgcactaccaattctattcctggtacttctattccttgccttttctattgtggaaaacacgttaccagacacctttgaggattattctatttctcgttgtggagtgctgctggaatgtttacccttccactgcctattcatcactccttttgctatttgtgcacttgtgcattttgtttggtatatggttttcacctgctgaatacccctatatcatcagtaaagggacaaaacggacataccaagaagttgcaaagctagacttccctgcaaaatagtgtaatctttgaaggtagcagtgaggatacaagtgtcaaaggcttctggaaattgtgaggtactttggtatgccaatactcttgggactagttggcccaaatttctcgagtagcatctagacatataccaaatatgtatgtccatgtgtaacttcttaacatagatgatagcgactctaactataagagtaactatggctgcggacttccccaggatcttgttttatcatcctttagacatgtctcagcagtcagcagccaaaagagatccatgcctcaccttataaggccttgtttgatccgacttgttactgaaggctctaaaacaacttcagctcttcatgtactagaacatggggcgccccttcgggcgccttatgaggcagtaagtaacacctaattatatgacaatagccacacacataaggcatattgaatagtat

SEQ ID NO: 29296 - DNA, 1800 bp, Zea Mays
gcgcacacttcggcagttgagagaacaaacgaactggtgggtgggttggggggtcgtcgccgccggccggtggagttgctcgctcctgcctcttggatctgccgcccggtggtggctcgccgccaaggatggcgcgggcggagaagatacgctccggtagcacggcgttggcgacggcttcgacggagacgccaggcaggtcgacggaccaccggagggcgctctacttcgccgccttcctggtgctggccgacgccgcgctcgtcgccctcatcgtcgccttcgtcccgtataccaagatcgactgggacgcctacatgtcccaggtgctagcgcaattggggagcctttttttttatcgtttccccgctgttttggttcaagagtttcgaatttgggatggtggtgtgatcttggttggcggctgctggtgtgtgcttcctgcgctaggtggacgcttttctggagggggagagggactacaccaagatcgagggagacacagggccattggtctacccggccggattcctctacgtctactccgccgttaagttccttacgggaggccgcgtcttccctgctcagtggagctgtctcaattaagatgaatgtccttctttttgctccttctttgcttctacttatggtcaaggccatgagcatcaaaggagtcttctttgccttattgggagctgctgtcgtacaggttttgttgggtatgccattcttgctgtcacatccagttgagtacatctcaagagcattcaatctcggtcgcgtgtttatccatttctggtctgtgaactttaaattcgtcccagagaaggtgtttgtatcgaaagagcttgccattgcattgttgattcttcacctcaccacacttatgatatttgctcactacaagtggttaaagcatgaaggaggcctattcggtttcctgcattccagatttaaaaatgctaaatcaatcaagcagcttgtttccagccagcccagaccatccagtctcagcgcagaacatattgtaactgttatgtttgttggcaacttcattggcgttgtgtgtgcccgatcattgcactaccaattctattcctggtacttctattccttgccttttctattgtggaaaacacgttaccagacacctttgaggattattctatttctcgttgtggagtgctgctggaatgtttacccttccactgcctattcatcactccttttgctatttgtgcacttgtgcattttgtttggtatatggttttcacctgctgaatacccctatatcatcagtaaagggacaaaacggacataccaagaagttgcaaagctagacttccctgcaaaatagtgtaatctttgaaggtagcagtgaggatacaagtgtcaaaggcttctggaaattgtgaggtactttggtatgccaatactcttgggactagttggcccaaatttctcgagtagcatctagacatataccaaatatgtatgtccatgtgtaacttcttaacatagatgatagcgactctaactataagagtaactatggctgcggacttccccaggatcttgttttatcatcctttagacatgtctcagcagtcagcagccaaaagagatccatgcctcaccttataaggccttgtttgatccgacttgttactgaaggctctaaaacaacttcagctcttcatgtactagaacatggggcgccccttcgggcgccttatgaggcagtaagtaacacctaattatatgacaatagccacacacataaggcatattgaatagtat

SEQ ID NO: 29297 - DNA, 1395 bp, Zea Mays
agcaactccaaccatgagccttatacttccatggtgggctttaggtttgctttgtttgtccaagagggttcactccatctttgttctccgtcttttcaatgactgcttcgccatgacattgctccacgctgctatggttttgatcatttatcgcaagtggtaccttggtctagtagttttcagtggagctgtctcaattaagatgaatgtccttctttttgctccttctttgcttctacttatggtcaaggccatgagcatcaaaggagtcttctttgccttattgggagctgctgtcgtacaggttttgttgggtatgccattcttgctgtcacatccagttgagtacatctcaagagcattcaatctcggtcgcgtgtttatccatttctggtctgtgaactttaaattcgtcccagagaaggtgtttgtatcgaaagagcttgccattgcattgttgattcttcacctcaccacacttatgatatttgctcactacaagtggttaaagcatgaaggaggcctattcggtttcctgcattccagatttaaaaatgctaaatcaatcaagcagcttgtttccagccagcccagaccatccagtctcagcgcagaacatattgtaactgttatgtttgttggcaacttcattggcgttgtgtgtgcccgatcattgcactaccaattctattcctggtacttctattccttgccttttctattgtggaaaacacgttaccagacacctttgaggattattctatttctcgttgtggagtgctgctggaatgtttacccttccactgcctattcatcactccttttgctatttgtgcacttgtgcattttgtttggtatatggttttcacctgctgaatacccctatatcatcagtaaagggacaaaacggacataccaagaagttgcaaagctagacttccctgcaaaatagtgtaatctttgaaggtagcagtgaggatacaagtgtcaaaggcttctggaaattgtgaggtactttggtatgccaatactcttgggactagttggcccaaatttctcgagtagcatctagacatataccaaatatgtatgtccatgtgtaacttcttaacatagatgatagcgactctaactataagagtaactatggctgcggacttccccaggatcttgttttatcatcctttagacatgtctcagcagtcagcagccaaaagagatccatgcctcaccttataaggccttgtttgatccgacttgttactgaaggctctaaaacaacttcagctcttcatgtactagaacatggggcgccccttcgggcgccttatgaggcagtaagtaacacctaattatatgacaatagccacacacataaggcatattgaatagtat

SEQ ID NO: 29298 - DNA, 1175 bp, Zea Mays
ctttgttttaatgtggccaagctgaaagaggccatgagcatcaaaggagtcttctttgccttattgggagctgctgtcgtacaggttttgttgggtatgccattcttgctgtcacatccagttgagtacatctcaagagcattcaatctcggtcgcgtgtttatccatttctggtctgtgaactttaaattcgtcccagagaaggtgtttgtatcgaaagagcttgccattgcattgttgattcttcacctcaccacacttatgatatttgctcactacaagtggttaaagcatgaaggaggcctattcggtttcctgcattccagatttaaaaatgctaaatcaatcaagcagcttgtttccagccagcccagaccatccagtctcagcgcagaacatattgtaactgttatgtttgttggcaacttcattggcgttgtgtgtgcccgatcattgcactaccaattctattcctggtacttctattccttgccttttctattgtggaaaacacgttaccagacacctttgaggattattctatttctcgttgtggagtgctgctggaatgtttacccttccactgcctattcatcactccttttgctatttgtgcacttgtgcattttgtttggtatatggttttcacctgctgaatacccctatatcatcagtaaagggacaaaacggacataccaagaagttgcaaagctagacttccctgcaaaatagtgtaatctttgaaggtagcagtgaggatacaagtgtcaaaggcttctggaaattgtgaggtactttggtatgccaatactcttgggactagttggcccaaatttctcgagtagcatctagacatataccaaatatgtatgtccatgtgtaacttcttaacatagatgatagcgactctaactataagagtaactatggctgcggacttccccaggatcttgttttatcatcctttagacatgtctcagcagtcagcagccaaaagagatccatgcctcaccttataaggccttgtttgatccgacttgttactgaaggctctaaaacaacttcagctcttcatgtactagaacatggggcgccccttcgggcgccttatgaggcagtaagtaacacctaattatatgacaatagccacacacataaggcatattgaatagtat

SEQ ID NO: 29299 - DNA, 1142 bp, Zea Mays
gttactcttgcttcacttggatatatataaggttaaactgaatgctgccaggttttgttgggtatgccattcttgctgtcacatccagttgagtacatctcaagagcattcaatctcggtcgcgtgtttatccatttctggtctgtgaactttaaattcgtcccagagaaggtgtttgtatcgaaagagcttgccattgcattgttgattcttcacctcaccacacttatgatatttgctcactacaagtggttaaagcatgaaggaggcctattcggtttcctgcattccagatttaaaaatgctaaatcaatcaagcagcttgtttccagccagcccagaccatccagtctcagcgcagaacatattgtaactgttatgtttgttggcaacttcattggcgttgtgtgtgcccgatcattgcactaccaattctattcctggtacttctattccttgccttttctattgtggaaaacacgttaccagacacctttgaggattattctatttctcgttgtggagtgctgctggaatgtttacccttccactgcctattcatcactccttttgctatttgtgcacttgtgcattttgtttggtatatggttttcacctgctgaatacccctatatcatcagtaaagggacaaaacggacataccaagaagttgcaaagctagacttccctgcaaaatagtgtaatctttgaaggtagcagtgaggatacaagtgtcaaaggcttctggaaattgtgaggtactttggtatgccaatactcttgggactagttggcccaaatttctcgagtagcatctagacatataccaaatatgtatgtccatgtgtaacttcttaacatagatgatagcgactctaactataagagtaactatggctgcggacttccccaggatcttgttttatcatcctttagacatgtctcagcagtcagcagccaaaagagatccatgcctcaccttataaggccttgtttgatccgacttgttactgaaggctctaaaacaacttcagctcttcatgtactagaacatggggcgccccttcgggcgccttatgaggcagtaagtaacacctaattatatgacaatagccacacacataaggcatattgaatagtat

SEQ ID NO: 29300 - DNA, 1008 bp, Zea Mays
cagaacgttcgggtgtacttgttgcgacgtgagaaacataacattttgattccttgcggtcgcaaaggcaaatcgacacaagcaaatgataaatgtgtcatctatccatcgaatggtcccattccattccaagcaagcggtccaggtgggagaggaggcgccacacccagacgagaggcttcccgagtccaccgccagcacgagtccaccgccggcactttgactcggagccggagattcttgcgaggaactggcagggatctgctgcccatccgcatatcatgctgcaacagtagttcactcgtcggaggaaggcgcatcacacgaactaggtggaaggaaccggacggagcttggagagggcaagcgggcaaggggagtgagtagtggttctcggtgtcttctttaaccactctgtccgatccgctggtgtgtctgcgcgatcctgttgacgaatcaatcgccgggacggttaattaagcattccaatcctcagccatggccgtggacactactcaaccggagtactggctcaactggaggttcttgctgtgcgcgctctgggtctactcctgcatggccttggcattcttcctgattaagaagtacgagggggccagttcaccggacagcaatggcgatgacggtggagacagagaagaggcgttaccacgtgtcagacctggtgttgtttatcttgaagattgctggaagacatgccttgagggtatccaccctggctggctgctggcatttcgcgttgtggccttcttcgttttggcttcgctgctcgtggtcgacatcattactgatggatggagtatcttcctatactacactcagtggacgttcttgcttgtcaccttgtattttggggtatgtagtttgccaatggaactttggcttgcgttttgttttggttatttgtcacttttgttgttatacttaaccttgagtttcagtaactgacactgacatcacatctcactgcactcctgcaacatggac

SEQ ID NO: 29301 - DNA, 930 bp, Zea Mays
ggcaaatcgacacaagcaaatgataaatgtgtcatctatccatcgaatggtcccattccattccaagcaagcggtccaggtgggagaggaggcgccacacccagacgagaggcttcccgagtccaccgccagcacgagtccaccgccggcactttgactcggagccggagattcttgcgaggaactggcagggatctgctgcccatccgcatatctagttcactcgtcggaggaaggcgcatcacacgaactaggtggaaggaaccggacggagcttggagagggcaagcgggcaaggggagtgagtagtggttctcggtgtcttctttaaccactctgtccgatccgctggtgtgtctgcgcgatcctgttgacgaatcaatcgccgggacggttaattaagcattccaatcctcagccatggccgtggacactactcaaccggagtactggctcaactggaggttcttgctgtgcgcgctctgggtctactcctgcatggccttggcattcttcctgattaagaagtacgagggggccagttcaccggacagcaatggcgatgacggtggagacagagaagaggcgttaccacgtgtcagacctggtgttgtttatcttgaagattgctggaagacatgccttgagggtatccaccctggctggctgctggcatttcgcgttgtggccttcttcgttttggcttcgctgctcgtggtcgacatcattactgatggatggagtatcttcctatactacactcagtggacgttcttgcttgtcaccttgtattttggggtatgtagtttgccaatggaactttggcttgcgttttgttttggttatttgtcacttttgttgttatacttaaccttgagtttcagtaactgacactgacatcacatctcactgcactcctgcaacatggac

SEQ ID NO: 29302 - DNA, 703 bp, Zea Mays
attccattccaagcaagcggtccaggtgggagaggaggcgccacacccagacgagaggcttcccgagtccaccgccagcacgagtccaccgccggcactttgactcggagccggagattcttgcgaggaactggcagggatctgctgcccatccgcatatcggacggttaattaagcattccaatcctcagccatggccgtggacactactcaaccggagtactggctcaactggaggttcttgctgtgcgcgctctgggtctactcctgcatggccttggcattcttcctgattaagaagtacgagggggccagttcaccggacagcaatggcgatgacggtggagacagagaagaggcgttaccacgtgtcagacctggtgttgtttatcttgaagattgctggaagacatgccttgagggtatccaccctggctggctgctggcatttcgcgttgtggccttcttcgttttggcttcgctgctcgtggtcgacatcattactgatggatggagtatcttcctatactacactcagtggacgttcttgcttgtcaccttgtattttggggtatgtagtttgccaatggaactttggcttgcgttttgttttggttatttgtcacttttgttgttatacttaaccttgagtttcagtaactgacactgacatcacatctcactgcactcctgcaacatggac

SEQ ID NO: 29303 - DNA, 762 bp, Zea Mays
attccattccaagcaagcggtccaggtcggaaaaacttgctccatctcatcctcatcgcgtctcccagatcacctgaccccgtggtgggagaggaggcgccacacccagacgagaggcttcccgagtccaccgccagcacgagtccaccgccggcactttgactcggagccggagattcttgcgaggaactggcagggatctgctgcccatccgcatatcggacggttaattaagcattccaatcctcagccatggccgtggacactactcaaccggagtactggctcaactggaggttcttgctgtgcgcgctctgggtctactcctgcatggccttggcattcttcctgattaagaagtacgagggggccagttcaccggacagcaatggcgatgacggtggagacagagaagaggcgttaccacgtgtcagacctggtgttgtttatcttgaagattgctggaagacatgccttgagggtatccaccctggctggctgctggcatttcgcgttgtggccttcttcgttttggcttcgctgctcgtggtcgacatcattactgatggatggagtatcttcctatactacactcagtggacgttcttgcttgtcaccttgtattttggggtatgtagtttgccaatggaactttggcttgcgttttgttttggttatttgtcacttttgttgttatacttaaccttgagtttcagtaactgacactgacatcacatctcactgcactcctgcaacatggac

SEQ ID NO: 29304 - DNA, 944 bp, Zea Mays
attccattccaagcaagcggtccaggtcggaaaaacttgctccatctcatcctcatcgcgtctcccagatcacctgaccccgtgggagaggaggcgccacacccagacgagaggcttcccgagtccaccgccagcacgagtccaccgccggcactttgactcggagccggagattcttgcgaggaactggcagggatctgctgcccatccgcatatcatgctgcaacagtagttcactcgtcggaggaaggcgcatcacacgaactaggtggaaggaaccggacggagcttggagagggcaagcgggcaaggggagtgagtagtggttctcggtgtcttctttaaccactctgtccgatccgctggtgtgtctgcgcgatcctgttgacgaatcaatcgccgggacggttaattaagcattccaatcctcagccatggccgtggacactactcaaccggagtactggctcaactggaggttcttgctgtgcgcgctctgggtctactcctgcatggccttggcattcttcctgattaagaagtacgagggggccagttcaccggacagcaatggcgatgacggtggagacagagaagaggcgttaccacgtgtcagacctggtgttgtttatcttgaagattgctggaagacatgccttgagggtatccaccctggctggctgctggcatttcgcgttgtggccttcttcgttttggcttcgctgctcgtggtcgacatcattactgatggatggagtatcttcctatactacactcagtggacgttcttgcttgtcaccttgtattttggggtatgtagtttgccaatggaactttggcttgcgttttgttttggttatttgtcacttttgttgttatacttaaccttgagtttcagtaactgacactgacatcacatctcactgcactcctgcaacatggac

SEQ ID NO: 29305 - DNA, 3059 bp, Zea Mays
gctgtgtgctgctgcccctgctcgttggcgtttccctccctcgctccctgctgcggcccccctgcgtgcccccacactactcaccaggccacggccaccacaccccaccatctgcctctgcggagctcgcgtgaacccctctcgctttcgcgctgcgtccgcggtggcatcattgggtgtccggactccggactggacatggaccgtcggaaagacagggtccttcttggctgctgatttcgcgagcgctgccgctgccaccgccgcttcttcttcttcctcctccctgctgctgcggcggcggaattgtgcgttggagggctgtgggctggcgactggtctctgcccctccatcttctccggcttgttcgccgaattgaatctgcgggggttgcgttgcagcgatgcgggcgcgggagccccggatgtggatggggtggtgctgggtggcgctcgctgctctgctcgccttgatcctgccgccgtccaacgccacgctctcccctgccggcatcaactacgaagtggtggctctgatggccatcaagacggagctggaggacccctacaacgtgctcgacaactgggacatcaactccgtcgacccctgcagctggaggatggtcacgtgctcctccgacggctacgtctccgccttaggactgcctagccagagcttgtctgggaagttatcacccggcatcggtaacctcaccaggctgcaatctgtgctgttgcagaacaacgtgatttctggacctattcccagtacgataggaaggctggggatgctaaagactcttgacatgtcagataaccagctcacggggagtatcccaggctcgcttggaaatctgaagaacctcaattatttctctcgttgctaccaggaagttgaacaataatagcttgtctggagttctgcctgattcaattgccagcattgatggttttgctctcgtagatctttcgtttaacaatctcagtggcccattacccaagatttctgcaagaacctttatcatagctggaaatccaatgatttgtggtaataattctggagatagctgctcttctgtgtcacttgacccactctcttacccaccagatgatctgaaaactcagccacaacaaggtattggaaggagccatcatattgctacaatatgtggagcaactgttggttcagtggcttttgtcgctgttgtagttggtatgcttctttggtggcgtcataggcgaaatcagcagatcttttttgatgttaacgatcaatatgatccagaagtttgtttgggtcatctaaagcggtatgctttcaaggagctccgtgcagctactaataattttaactcaaagaacatcttaggtgaaggtggatatggcatagtatacaagggttatttgcgtgatggctccgttgttgctgttaaaaggctgaaggattataatgccgtcggtggggaagttcaattccaaactgaagttgaagtcataagcttggctgtgcatcgtaatctcctccgtcttattgggttctgcactacggagagcgagaggttacttgtttatccatatatgccaaatggaagtgttgcttctcaattgcgggaacatataaacggcaagccagctctagactggccaaggagaaagaggatagcgctaggcacggcacggggcctgctctaccttcacgagcaatgcgacccgaagataatccaccgggacgtaaaggcttccaacgtgcttctcgacgagtacttcgaagcgatcgtgggagacttcgggctggcgaaactcctggaccacagggagtcccacgtcacgaccgcggtgcgcgggaccgtcgggcacatcgcgccggagtacctgtcgacgggccagtcgtcggagaagaccgacgtgtttgggttcggggttctgttagtcgagctgatcactgggcagaaggcgctggatttcggaagggtggcgaaccagaagggtggagtgctcgactgggtgaagaaactccaccaagaaaagcagctaggcacgatggtggacaaggacctgggcagcagctacgacagggtggagctggaggagatggtccaggtgtccttgctgtgcacgcagtaccacccgtcccaccggcccaggatgtccgaggtgatcaggatgctggagggggacgggctcgcggagagatgggaggcgtcgcagaacgtggacacgccggagtccgtctcgtcggagctcctgctccagaagtacatggacttcgcagcggacgagtgctcgctcggcctggaagccatggagctctccggcccgaggtgaccgaccggctggttgaccggacccggcgggcatcgcacgggtcggcgtaggtgtttttgccgtatcaagccctatattgttgtgttgcgttggacacatagggaaggcgatggattgtatggtctatatagctgtggtggcattcatttgtacatacagcagcattgtgtgaggtgagcccatccttgttgcgcgtctacttggtggcaaagagatgaagatgaatgagtatatagagatagagatcaaagttcccagtgcggagcggttggtgcctgtttgtgttttctgctttgctgaaaggcaaggcgtgcgcagcgctgtctgacatgcgccactgcttgtaaaacagcggtccgttacgcattccggagaggatatggtagatacagacgtggtattaggggttcacagaatctgtttctgtgtgtttggttcatgactgtttttttactgtactgagaacttgctcgtttcaccgttgatccatatggatcgaatagtattaagtcggtttaaatcaataacgagttaaaatccatctcgatttgtttcaatccattctaatacacatagaattaaaataaccaaaccagacatgattagaagttactttaatttctatcctaattcacttcaatatataggtaaagctaaacacggccttaggtttgtcaacctgagggcagaattggttgaaagccaggctaaagttataccagtgagtgtgaatg

SEQ ID NO: 29306 - DNA, 2945 bp, Zea Mays
gtttccctccctcgctccctgctgcggcccccctgcgtgcccccacactactcaccaggccacggccaccacaccccaccatctgcctctgcggagctcgcgtgaacccctctcgctttcgcgctgcgtccgcggtggcatcattgggtgtccggactccggactggacatggaccgtcggaaagacagggtccttcttggctgctgatttcgcgagcgctgccgctgccaccgccgcttcttcttcttcctcctccctgctgctgcggcggcggaattgtgcgttggagggctgtgggctggcgactgcgatgcgggcgcgggagccccggatgtggatggggtggtgctgggtggcgctcgctgctctgctcgccttgatcctgccgccgtccaacgccacgctctcccctgccggcatcaactacgaagtggtggctctgatggccatcaagacggagctggaggacccctacaacgtgctcgacaactgggacatcaactccgtcgacccctgcagctggaggatggtcacgtgctcctccgacggctacgtctccgccttaggactgcctagccagagcttgtctgggaagttatcacccggcatcggtaacctcaccaggctgcaatctgtgctgttgcagaacaacgtgatttctggacctattcccagtacgataggaaggctggggatgctaaagactcttgacatgtcagataaccagctcacggggagtatcccaggctcgcttggaaatctgaagaacctcaattatttgaagttgaacaataatagcttgtctggagttctgcctgattcaattgccagcattgatggttttgctctcgtagatctttcgtttaacaatctcagtggcccattacccaagatttctgcaagaacctttatcatagctggaaatccaatgatttgtggtaataattctggagatagctgctcttctgtgtcacttgacccactctcttacccaccagatgatctgaaaaccacaacaaggtattggaaggagccatcatattgctacaatatgtggagcaactgttggttcagtggcttttgtcgctgttgtagttggtatgcttctttggtggcgtcataggcgaaatcagcagatcttttttgatgttaacgatcaatatgatccagaagtttgtttgggtcatctaaagcggtatgctttcaaggagctccgtgcagctactaataattttaactcaaagaacatcttaggtgaaggtggatatggcatagtatacaagggttatttgcgtgatggctccgttgttgctgttaaaaggctgaaggattataatgccgtcggtggggaagttcaattccaaactgaagttgaagtcataagcttggctgtgcatcgtaatctcctccgtcttattgggttctgcactacggagagcgagaggttacttgtttatccatatatgccaaatggaagtgttgcttctcaattgcgggaacatataaacggcaagccagctctagactggccaaggagaaagaggatagcgctaggcacggcacggggcctgctctaccttcacgagcaatgcgacccgaagataatccaccgggacgtaaaggcttccaacgtgcttctcgacgagtacttcgaagcgatcgtgggagacttcgggctggcgaaactcctggaccacagggagtcccacgtcacgaccgcggtgcgcgggaccgtcgggcacatcgcgccggagtacctgtcgacgggccagtcgtcggagaagaccgacgtgtttgggttcggggttctgttagtcgagctgatcactgggcagaaggcgctggatttcggaagggtggcgaaccagaagggtggagtgctcgactgggtgaagaaactccaccaagaaaagcagctaggcacgatggtggacaaggacctgggcagcagctacgacagggtggagctggaggagatggtccaggtgtccttgctgtgcacgcagtaccacccgtcccaccggcccaggatgtccgaggtgatcaggatgctggagggggacgggctcgcggagagatgggaggcgtcgcagaacgtggacacgccggagtccgtctcgtcggagctcctgctccagaagtacatggacttcgcagcggacgagtgctcgctcggcctggaagccatggagctctccggcccgaggtgaccgaccggctggttgaccggacccggcgggcatcgcacgggtcggcgtaggtgtttttgccgtatcaagccctatattgttgtgttgcgttggacacatagggaaggcgatggattgtatggtctatatagctgtggtggcattcatttgtacatacagcagcattgtgtgaggtgagcccatccttgttgcgcgtctacttggtggcaaagagatgaagatgaatgagtatatagagatagagatcaaagttcccagtgcggagcggttggtgcctgtttgtgttttctgctttgctgaaaggcaaggcgtgcgcagcgctgtctgacatgcgccactgcttgtaaaacagcggtccgttacgcattccggagaggatatggtagatacagacgtggtattaggggttcacagaatctgtttctgtgtgtttggttcatgactgtttttttactgtactgagaacttgctcgtttcaccgttgatccatatggatcgaatagtattaagtcggtttaaatcaataacgagttaaaatccatctcgatttgtttcaatccattctaatacacatagaattaaaataaccaaaccagacatgattagaagttactttaatttctatcctaattcacttcaatatataggtaaagctaaacacggccttaggtttgtcaacctgagggcagaattggttgaaagccaggctaaagttataccagtgagtgtgaatg

SEQ ID NO: 29307 - DNA, 1435 bp, Zea Mays
ccaccacaccccaccatctgcctctgcggagctcgcgtgaacccctctcgctttcgcgctgcgtccgcggtggcatcattgggtgtccggactccggactggacatggaccgtcggaaagacagggtccttcttggctgctgatttcgcgagcgctgccgctgccaccgccgcttcttcttcttcctcctccctgctgctgcggcggcggaattcgatgcgggcgcgggagccccggatgtggatggggtggtgctgggtggcgctcgctgctctgctcgccttgatcctgccgccgtccaacgccacgctctcccctgccggcatcaactacgaagtggtggctctgatggccatcaagacggagctggaggacccctacaacgtgctcgacaactgggacatcaactccgtcgacccctgcagctggaggatggtcacgtgctcctccgacggctacgtctccgccttaggactgcctagccagagcttgtctgggaagttatcacccggcatcggtaacctcaccaggctgcaatctgtgctgttgcagaacaacgtgatttctggacctattcccagtacgataggaaggctggggatgctaaagactcttgacatgtcagataaccagctcacggggagtatcccaggctcgcttggaaatctgaagaacctcaattatttgaagttgaacaataatagcttgtctggagttctgcctgattcaattgccagcattgatggttttgctctcgtagatctttcgtttaacaatctcagtggcccattacccaagatttctgcaagaacctttatcatagctggaaatccaatgatttgtggtaataattctggagatagctgctcttctgtgtcacttgacccactctcttacccaccagatgatctgaaaactcagccacaacaaggtattggaaggagccatcatattgctacaatatgtggagcaactgttggttcagtggcttttgtcgctgttgtagttggtatgcttctttggtggcgtcataggcgaaatcagcagatcttttttgatgttaacgatcaatatgatccagaagtttgtttgggtcatctaaagcggtatgctttcaaggagctccgtgcagctactaataattttaactcaaagaacatcttaggtgaaggtggatatggcatagtatacaagggttatttgcgtgatggctccgttgttgctgttaaaaggctgaaggattataatgccgtcggtggggaagttcaattccaaactgaagttgaagtcataagcttggctgtgcatcgtaatctcctccgtcttattgggttctgcactacggagagcgagaggttacttgtttatccatatatgccaaatggaagtgttgcttctcaattgcggggcaagctagcttgatatatactggtgt

SEQ ID NO: 29308 - DNA, 2956 bp, Zea Mays
cacaccccaccatctgcctctgcggagctcgcgtgaacccctctcgctttcgcgctgcgtccgcggtggcatcattgggtgtccggactccggactggacatggaccgtcggaaagacagggtccttcttggctgctgatttcgcgagcgctgccgctgccaccgccgcttcttcttcttcctcctccctgctgctgcggcggcggaattgtgcgttggagggctgtgggctggcgactggtctctgcccctccatcttctccggcttgttcgccgaattgaatctgcgggggttgcgttgcagcgatgcgggcgcgggagccccggatgtggatggggtggtgctgggtggcgctcgctgctctgctcgccttgatcctgccgccgtccaacgccacgctctcccctgccggcatcaactacgaagtggtggctctgatggccatcaagacggagctggaggacccctacaacgtgctcgacaactgggacatcaactccgtcgacccctgcagctggaggatggtcacgtgctcctccgacggctacgtctccgccttaggactgcctagccagagcttgtctgggaagttatcacccggcatcggtaacctcaccaggctgcaatctgtgctgttgcagaacaacgtgatttctggacctattcccagtacgataggaaggctggggatgctaaagactcttgacatgtcagataaccagctcacggggagtatcccaggctcgcttggaaatctgaagaacctcaattatttctctcgttgctaccaggaagttgaacaataatagcttgtctggagttctgcctgattcaattgccagcattgatggttttgctctcgtagatctttcgtttaacaatctcagtggcccattacccaagatttctgcaagaacctttatcatagctggaaatccaatgatttgtggtaataattctggagatagctgctcttctgtgtcacttgacccactctcttacccaccagatgatctgaaaaccacaacaaggtattggaaggagccatcatattgctacaatatgtggagcaactgttggttcagtggcttttgtcgctgttgtagttggtatgcttctttggtggcgtcataggcgaaatcagcagatcttttttgatgttaacgatcaatatgatccagaagtttgtttgggtcatctaaagcggtatgctttcaaggagctccgtgcagctactaataattttaactcaaagaacatcttaggtgaaggtggatatggcatagtatacaagggttatttgcgtgatggctccgttgttgctgttaaaaggctgaaggattataatgccgtcggtggggaagttcaattccaaactgaagttgaagtcataagcttggctgtgcatcgtaatctcctccgtcttattgggttctgcactacggagagcgagaggttacttgtttatccatatatgccaaatggaagtgttgcttctcaattgcgggaacatataaacggcaagccagctctagactggccaaggagaaagaggatagcgctaggcacggcacggggcctgctctaccttcacgagcaatgcgacccgaagataatccaccgggacgtaaaggcttccaacgtgcttctcgacgagtacttcgaagcgatcgtgggagacttcgggctggcgaaactcctggaccacagggagtcccacgtcacgaccgcggtgcgcgggaccgtcgggcacatcgcgccggagtacctgtcgacgggccagtcgtcggagaagaccgacgtgtttgggttcggggttctgttagtcgagctgatcactgggcagaaggcgctggatttcggaagggtggcgaaccagaagggtggagtgctcgactgggtgaagaaactccaccaagaaaagcagctaggcacgatggtggacaaggacctgggcagcagctacgacagggtggagctggaggagatggtccaggtgtccttgctgtgcacgcagtaccacccgtcccaccggcccaggatgtccgaggtgatcaggatgctggagggggacgggctcgcggagagatgggaggcgtcgcagaacgtggacacgccggagtccgtctcgtcggagctcctgctccagaagtacatggacttcgcagcggacgagtgctcgctcggcctggaagccatggagctctccggcccgaggtgaccgaccggctggttgaccggacccggcgggcatcgcacgggtcggcgtaggtgtttttgccgtatcaagccctatattgttgtgttgcgttggacacatagggaaggcgatggattgtatggtctatatagctgtggtggcattcatttgtacatacagcagcattgtgtgaggtgagcccatccttgttgcgcgtctacttggtggcaaagagatgaagatgaatgagtatatagagatagagatcaaagttcccagtgcggagcggttggtgcctgtttgtgttttctgctttgctgaaaggcaaggcgtgcgcagcgctgtctgacatgcgccactgcttgtaaaacagcggtccgttacgcattccggagaggatatggtagatacagacgtggtattaggggttcacagaatctgtttctgtgtgtttggttcatgactgtttttttactgtactgagaacttgctcgtttcaccgttgatccatatggatcgaatagtattaagtcggtttaaatcaataacgagttaaaatccatctcgatttgtttcaatccattctaatacacatagaattaaaataaccaaaccagacatgattagaagttactttaatttctatcctaattcacttcaatatataggtaaagctaaacacggccttaggtttgtcaacctgagggcagaattggttgaaagccaggctaaagttataccagtgagtgtgaatg

SEQ ID NO: 29309 - DNA, 3031 bp, Zea Mays
cgctttcgcgctgcgtccgcggtggcatcattgggtgtccggactccggactggacatggaccgtcggaaagacagggtccttcttggctgctgatttcgcgagcgctgccgctgccaccgccgcttcttcttcttcctcctccctgctgctgcggcggcggaattgtgcgttggagggctgtgggctggcgactggtctctgcccctccatcttctccggcttgttcgccgaattgaatctgcgggggttgcgttgcagcgatgcgggcgcgggagccccggatgtggatggggtggtgctgggtggcgctcgctgctctgctcgccttgatcctgccgccgtccaacgccacgctctcccctgccggcatcaactacgaagtggtggctctgatggccatcaagacggagctggaggacccctacaacgtgctcgacaactgggacatcaactccgtcgacccctgcagctggaggatggtcacgtgctcctccgacggctacgtctccgccttaggactgcctagccagagcttgtctgggaagttatcacccggcatcggtaacctcaccaggctgcaatctgtgctgttgcagaacaacgtgatttctggacctattcccagtacgataggaaggctggggatgctaaagactcttgacatgtcagataaccagctcacggggagtatcccaggctcgcttggaaatctgaagaacctcaattattttactgattcacttgagttggcttctgttatagagatctttcgtttaacaatctcagtggcccattacccaagatttctgcaagaacctttatcatagctggaaatccaatgatttgtggtaataattctggagatagctgctcttctgtgtcacttgacccactctcttacccaccagatgatctgaaaactcagccacaacaaggtattggaaggagccatcatattgctacaatatgtggagcaactgttggttcagtggcttttgtcgctgttgtagttggtatgcttctttggtggcgtcataggcgaaatcagcagatcttttttgatgttaacgatcaatatgatccagaagtttgtttgggtcatctaaagcggtatgctttcaaggagctccgtgcagctactaataattttaactcaaagaacatcttaggtgaaggtggatatggcatagtatacaagggttatttgcgtgatggctccgttgttgctgttaaaaggctgaaggattataatgccgtcggtggggaagttcaattccaaactgaagttgaagtcataagcttggctgtgcatcgtaatctcctccgtcttattgggttctgcactacggagagcgagaggttacttgtttatccatatatgccaaatggaagtgttgcttctcaattgcgggaacatataaacggcaagccagctctagactggccaaggagaaagaggatagcgctaggcacggcacggggcctgctctaccttcacgagcaatgcgacccgaagataatccaccgggacgtaaaggcttccaacgtgcttctcgacgagtacttcgaagcgatcgtgggagacttcgggctggcgaaactcctggaccacagggagtcccacgtcacgaccgcggtgcgcgggaccgtcgggcacatcgcgccggagtacctgtcgacgggccagtcgtcggagaagaccgacgtgtttgggttcggggttctgttagtcgagctgatcactgggcagaaggcgctggatttcggaagggtggcgaaccagaagggtggagtgctcgactgggtaagcatgcagcttgtgtttactttacttgtccgatttcaggtttgctttggaacttcaaaatgaagaacgtctgtctgtctgtctttcctctatcatacatacattgcaagctttctgtctgtactgtgccatgaacacgttctcctcgtcctggtcggtggttccaggtgaagaaactccaccaagaaaagcagctaggcacgatggtggacaaggacctgggcagcagctacgacagggtggagctggaggagatggtccaggtgtccttgctgtgcacgcagtaccacccgtcccaccggcccaggatgtccgaggtgatcaggatgctggagggggacgggctcgcggagagatgggaggcgtcgcagaacgtggacacgccggagtccgtctcgtcggagctcctgctccagaagtacatggacttcgcagcggacgagtgctcgctcggcctggaagccatggagctctccggcccgaggtgaccgaccggctggttgaccggacccggcgggcatcgcacgggtcggcgtaggtgtttttgccgtatcaagccctatattgttgtgttgcgttggacacatagggaaggcgatggattgtatggtctatatagctgtggtggcattcatttgtacatacagcagcattgtgtgaggtgagcccatccttgttgcgcgtctacttggtggcaaagagatgaagatgaatgagtatatagagatagagatcaaagttcccagtgcggagcggttggtgcctgtttgtgttttctgctttgctgaaaggcaaggcgtgcgcagcgctgtctgacatgcgccactgcttgtaaaacagcggtccgttacgcattccggagaggatatggtagatacagacgtggtattaggggttcacagaatctgtttctgtgtgtttggttcatgactgtttttttactgtactgagaacttgctcgtttcaccgttgatccatatggatcgaatagtattaagtcggtttaaatcaataacgagttaaaatccatctcgatttgtttcaatccattctaatacacatagaattaaaataaccaaaccagacatgattagaagttactttaatttctatcctaattcacttcaatatataggtaaagctaaacacggccttaggtttgtcaacctgagggcagaattggttgaaagccaggctaaagttataccagtgagtgtgaatg

SEQ ID NO: 29310 - DNA, 2802 bp, Zea Mays
cgctttcgcgctgcgtccgcggtggcatcattgggtgtccggactccggactggacatggaccgtcggaaagacagggtccttcttggctgctgatttcgcgagcgctgccgctgccaccgccgcttcttcttcttcctcctccctgctgctgcggcggcggaattcgatgcgggcgcgggagccccggatgtggatggggtggtgctgggtggcgctcgctgctctgctcgccttgatcctgccgccgtccaacgccacgctctcccctgccggcatcaactacgaagtggtggctctgatggccatcaagacggagctggaggacccctacaacgtgctcgacaactgggacatcaactccgtcgacccctgcagctggaggatggtcacgtgctcctccgacggctacgtctccgccttaggactgcctagccagagcttgtctgggaagttatcacccggcatcggtaacctcaccaggctgcaatctgtgctgttgcagaacaacgtgatttctggacctattcccagtacgataggaaggctggggatgctaaagactcttgacatgtcagataaccagctcacggggagtatcccaggctcgcttggaaatctgaagaacctcaattatttgaagttgaacaataatagcttgtctggagttctgcctgattcaattgccagcattgatggttttgctctcgtagatctttcgtttaacaatctcagtggcccattacccaagatttctgcaagaacctttatcatagctggaaatccaatgatttgtggtaataattctggagatagctgctcttctgtgtcacttgacccactctcttacccaccagatgatctgaaaaccacaacaaggtattggaaggagccatcatattgctacaatatgtggagcaactgttggttcagtggcttttgtcgctgttgtagttggtatgcttctttggtggcgtcataggcgaaatcagcagatcttttttgatgttaacgatcaatatgatccagaagtttgtttgggtcatctaaagcggtatgctttcaaggagctccgtgcagctactaataattttaactcaaagaacatcttaggtgaaggtggatatggcatagtatacaagggttatttgcgtgatggctccgttgttgctgttaaaaggctgaaggattataatgccgtcggtggggaagttcaattccaaactgaagttgaagtcataagcttggctgtgcatcgtaatctcctccgtcttattgggttctgcactacggagagcgagaggttacttgtttatccatatatgccaaatggaagtgttgcttctcaattgcgggaacatataaacggcaagccagctctagactggccaaggagaaagaggatagcgctaggcacggcacggggcctgctctaccttcacgagcaatgcgacccgaagataatccaccgggacgtaaaggcttccaacgtgcttctcgacgagtacttcgaagcgatcgtgggagacttcgggctggcgaaactcctggaccacagggagtcccacgtcacgaccgcggtgcgcgggaccgtcgggcacatcgcgccggagtacctgtcgacgggccagtcgtcggagaagaccgacgtgtttgggttcggggttctgttagtcgagctgatcactgggcagaaggcgctggatttcggaagggtggcgaaccagaagggtggagtgctcgactgggtgaagaaactccaccaagaaaagcagctaggcacgatggtggacaaggacctgggcagcagctacgacagggtggagctggaggagatggtccaggtgtccttgctgtgcacgcagtaccacccgtcccaccggcccaggatgtccgaggtgatcaggatgctggagggggacgggctcgcggagagatgggaggcgtcgcagaacgtggacacgccggagtccgtctcgtcggagctcctgctccagaagtacatggacttcgcagcggacgagtgctcgctcggcctggaagccatggagctctccggcccgaggtgaccgaccggctggttgaccggacccggcgggcatcgcacgggtcggcgtaggtgtttttgccgtatcaagccctatattgttgtgttgcgttggacacatagggaaggcgatggattgtatggtctatatagctgtggtggcattcatttgtacatacagcagcattgtgtgaggtgagcccatccttgttgcgcgtctacttggtggcaaagagatgaagatgaatgagtatatagagatagagatcaaagttcccagtgcggagcggttggtgcctgtttgtgttttctgctttgctgaaaggcaaggcgtgcgcagcgctgtctgacatgcgccactgcttgtaaaacagcggtccgttacgcattccggagaggatatggtagatacagacgtggtattaggggttcacagaatctgtttctgtgtgtttggttcatgactgtttttttactgtactgagaacttgctcgtttcaccgttgatccatatggatcgaatagtattaagtcggtttaaatcaataacgagttaaaatccatctcgatttgtttcaatccattctaatacacatagaattaaaataaccaaaccagacatgattagaagttactttaatttctatcctaattcacttcaatatataggtaaagctaaacacggccttaggtttgtcaacctgagggcagaattggttgaaagccaggctaaagttataccagtgagtgtgaatg

SEQ ID NO: 29311 - DNA, 1135 bp, Zea Mays
agcaaatccatgtacgtacgtcggtgagccctgaactgtacggagatagcagccccaggttcttcacatattggacgaccgacgcataccaggagaccgggtgctacaacctgcactgctccggcttcgtccagacgaacaaccggatcgccattggagccgctatctcgccgacctcggtctacaacggccggcagttcgacatcagcctgctcatatggaaggacccacaccgggggaactggtggctgcagctggggtcgacgggtcagctggtggggtactggccgtcgttcctgttcacgcacctgggcgggcacgccaacatggtgcagttcggcggcgaggtggtgaactcgcggccgtcggggtcgcacacgcccacgcagatggggagtgggcacttcccccgcgagggctccaaccgcgccgcctacttccgcaacgtgcaggtggtggacggcgacaacagcctcgtccccgccgccgcgctccgcctcgtcgccgaccacccggcctgctacgacatccagggcggctacaaccgcgcctggggaaactacttctactacggagggcctggcaggaacgtgcactgcccgtgatacatgatccggccggcgaccatgcatgcatggcgatggcatgaactgaatgaacgaagaagcagatacgtgcacagatacatatatatatatatactactacagagattcagagacggatcacagtatgcggccgtgccggaggattgatctctagtgggatcgtcgtcgccgctcatcaaccggacatggatcctatatatataggagcggtgctagtcgttatagcttagccatagtccctcgtttggttactgcgcatgctaatgagtaatgagtttttagtcgcccagcccagctgcgtacacgcgcgccgccggccgggccggtagtagcacaggcaaaaggtttcgatttgatgtatgtgaggcttctttcgtttgcatcggtctgatttttttttgtcttgagttctgtatacatgaagaaatccacagagtattttgatcaacatgcgtatatatagtacgaaccatgcatccacactgtgtttaataactattcctttgcatttgctactgatttcgaac

SEQ ID NO: 29312 - DNA, 1159 bp, Zea Mays
ctggtgctcattaattagattccatcactgtgaccccgattggaaatgtgagccctgaactgtacggagatagcagccccaggttcttcacatattggacgaccgacgcataccaggagaccgggtgctacaacctgcactgctccggcttcgtccagacgaacaaccggatcgccattggagccgctatctcgccgacctcggtctacaacggccggcagttcgacatcagcctgctcatatggaaggacccacaccgggggaactggtggctgcagctggggtcgacgggtcagctggtggggtactggccgtcgttcctgttcacgcacctgggcgggcacgccaacatggtgcagttcggcggcgaggtggtgaactcgcggccgtcggggtcgcacacgcccacgcagatggggagtgggcacttcccccgcgagggctccaaccgcgccgcctacttccgcaacgtgcaggtggtggacggcgacaacagcctcgtccccgccgccgcgctccgcctcgtcgccgaccacccggcctgctacgacatccagggcggctacaaccgcgcctggggaaactacttctactacggagggcctggcaggaacgtgcactgcccgtgatacatgatccggccggcgaccatgcatgcatggcgatggcatgaactgaatgaacgaagaagcagatacgtgcacagatacatatatatatatatactactacagagattcagagacggatcacagtatgcggccgtgccggaggattgatctctagtgggatcgtcgtcgccgctcatcaaccggacatggatcctatatatataggagcggtgctagtcgttatagcttagccatagtccctcgtttggttactgcgcatgctaatgagtaatgagtttttagtcgcccagcccagctgcgtacacgcgcgccgccggccgggccggtagtagcacaggcaaaaggtttcgatttgatgtatgtgaggcttctttcgtttgcatcggtctgatttttttttgtcttgagttctgtatacatgaagaaatccacagagtattttgatcaacatgcgtatatatagtacgaaccatgcatccacactgtgtttaataactattcctttgcatttgctactgatttcgaac

SEQ ID NO: 29313 - DNA, 2137 bp, Zea Mays
aaactaatctttactattccttaagagcataacgagggcgtccaccgtgcccccgcctgctcccgcaagtccgcaatacgtgcccccgcccccgtcagtgtccgcgagcgaccctctgcgctcgcgcaaatcccgcctgagatcgccgctgatccgaagcagcggcaccgtaaccctccccctcgcgagatccgcgaccgccccatcccggcgccacgggatccacgctccgccctcgcccttccccacccccatccgctaatctcgcggccgatccgcgcccggtcctgaccctgcctccgtcctccgcaccgccactccgtcccccgtcctcggcgccgccgtctcccgctcccctggcacgccttcggggtccttgcgggcggcaagcacctccgtcccggagacatctgccgctgcagcatagaccaccatgtcctcgctcggcagcaccgatgttgatgatggcaacgaggaggaggacggctccgcgagcacccccgagatctaccgctgccactcccacgcagttgcgtgtagcctctccatgtgatttccccaatgtttcccttcctctgtagcctctccgacggcgccgccgccgttcttcctcggccgtcggcgacattttaagaacgcctgaggctgttcaaccacttcatcgtctttttgactgcctcacattgaaggaactttgcagcggactgttatatgatctatgaaagaatgcatgcaacaagatctccagtctgatactgatgaagaaactacaaaagaacacatagccaccatcaatcaagacaaagggaaaactaccattacctcaattggatttctggtttttgggctatcattggatttctggctccagcttgatctggttcatgttttttctagattaccccagttgatgaagcaaagaaattatacctgttatttggccttggggctaatgttgccattatcttttctggccgtacaatgaagtatttctcaaatttgcgcaagacattgggtcctggaatgatgagcatagtggtacttcttgaacttgcatctattggggagtgagcaagtttgttttgaatgatccttcattgccaaagtcttatcgtaagaagaaaaaggaacttcataatgatttctggttaactgaaacgcatgggcacacatccatgagtcccccaccgctacatgcctcacgcctcgtcactgagtcgttcttagtcacgacatgctgatgtcgatccacccgtcaagaacaaggtgcagcagagatctttctcctcgtcgctgcttcctcgccatccggagatggtcgtcgccgcctaatatcacagcggtgggaaggcacaacgctcccccatctcctccggttctgcctgctcgccagcacgacgcgacgatgcccccctgacccccgcgcgcacagcctccgctggagaagcgacaacgctctcgtctccggtctccatgagtcagcctccaatccatttccatgccaggtatttacctaacgtacattgaacctgcacacaaccctgtctgtgagaccagaaggtagatttcttcaaggggaacaatgtggtgtaacttcatcagcacaaccactttgctgaaggtgtccggatcatgatgcagacaacaactggtgtactcattcccactttgatggtaatcgaaatggagacaaacacaattggagggaaaatatccaaagacaaaaggagtgagttttcacttcttcagattccaccaatcagaataagaactagacatcatagagaccaacttttggtaagagcaacaaaaaactggactactaaaatttactagcgtgatcttcaactgtcctgttaccaatattttttggggtctattatggatagcaatatgcatttgttctttgtacagagatttttcctcgcaatattatgttcgtttggtcatttgtaattattagcagtaaataaacgccatttgcttcaacggttctaggttgtacacaggtaaaggaacaatcgattaccaatgactaagggtattcataaattatgctacggtcccatggctaaaatccctaatcatcggcgacggagctcctattccctccaggctccagctgatggagtgagcg

SEQ ID NO: 29314 - DNA, 2446 bp, Zea Mays
aaactaatctttactattccttaagagcataacgagggcgtccaccgtgcccccgcctgctcccgcaagtccgcaatacgtgcccccgcccccgtcagtgtccgcgagcgaccctctgcgctcgcgcaaatcccgcctgagatcgccgctgatccgaagcagcggcaccgtaaccctccccctcgcgagatccgcgaccgccccatcccggcgccacgggatccacgctccgccctcgcccttccccacccccatccgctaatctcgcggccgatccgcgcccggtcctgaccctgcctccgtcctccgcaccgccactccgtcccccgtcctcggcgccgccgtctcccgctcccctggcacgccttcggggtccttgcgggcggcaagcacctccgtcccggagacatctgccgctgcagcatagaccaccatgtcctcgctcggcagcaccgatgttgatgatggcaacgaggaggaggacggctccgcgagcacccccgagatctaccgctgccactcccacgcagttgcgtgtagcctctccatgtgatttccccaatgtttcccttcctctgtagcctctccgacggcgccgccgccgttcttcctcggccgtcggcgacattttaagaacgcctgaggctgttcaaccacttcatcgtctttttgactgcctcacattgaaggaactttgcagcggactgttatatgatctatgaaagaatgcatgtaggaaatatctgtgaatgctacttatattttgttatgcctccttggtcattattctgaaccatagaacatgatctatctccagttgtattttccccttctatggaatcaccattgttggttagtggcaacaagatctccagtctgatactgatgaagaaactacaaaagaacacatagccaccatcaatcaagacaaagggaaaactaccattacctcaattggatttctggtttttgggctatcattggatttctggttaactgaaatatgtaccttgcagtagctctatgtctctatatggcattatggtgtctaaaactggatcattatattttcatttgagtgaaattcttatcaaatgttgaaccttcaggctccagcttgatctggttcatgttttttctagattaccccagttgatgaagcaaagaaattatacctgttatttggccttggggctaatgttgccattatcttttctggccgtacaatgaagtatttctcaaatttgcgcaagacattgggtcctggaatgatgagcatagtggtacttcttgaacttgcatctattggggagtgagcaagtttgttttgaatgatccttcattgccaaagtcttatcgtaagaagaaaaaggtcagtagttgtttatcatgcttcctttttcccccttactcaaaataatatgctaacaaaccaggaacttcataatgatttctggttaactgaaacgcatgggcacacatccatgagtcccccaccgctacatgcctcacgcctcgtcactgagtcgttcttagtcacgacatgctgatgtcgatccacccgtcaagaacaaggtgcagcagagatctttctcctcgtcgctgcttcctcgccatccggagatggtcgtcgccgcctaatatcacagcggtgggaaggcacaacgctcccccatctcctccggttctgcctgctcgccagcacgacgcgacgatgcccccctgacccccgcgcgcacagcctccgctggagaagcgacaacgctctcgtctccggtctccatgagtcagcctccaatccatttccatgccaggtatttacctaacgtacattgaacctgcacacaaccctgtctgtgagaccagaaggtagatttcttcaaggggaacaatgtggtgtaacttcatcagcacaaccactttgctgaaggtgtccggatcatgatgcagacaacaactggtgtactcattcccactttgatggtaatcgaaatggagacaaacacaattggagggaaaatatccaaagacaaaaggagtgagttttcacttcttcagattccaccaatcagaataagaactagacatcatagagaccaacttttggtaagagcaacaaaaaactggactactaaaatttactagcgtgatcttcaactgtcctgttaccaatattttttggggtctattatggatagcaatatgcatttgttctttgtacagagatttttcctcgcaatattatgttcgtttggtcatttgtaattattagcagtaaataaacgccatttgcttcaacggttctaggttgtacacaggtaaaggaacaatcgattaccaatgactaagggtattcataaattatgctacggtcccatggctaaaatccctaatcatcggcgacggagctcctattccctccaggctccagctgatggagtgagcg

SEQ ID NO: 29315 - DNA, 2059 bp, Zea Mays
cttcgacggtgtcgtcgccgtttttgccgatcgtcagcatcactgtcgtccgcttcgcttggatgcaccgttgcgaacatgcagctagacgcgtgcacatcctttttccgtaataaattcgtctgtatcatcatccaccgtctggtcttgttctgctcaacacatatacgtggttgcgaaccatgcgactagacgcgtgggggatttcaattgacgagtatgagaaacatgaatggccgatcgatcgtgcaggtcgattgaacaaattgctcaagagatttcaaggctaccattgcttgctcgctgcaaatactactgcagtatatttagattgtattgtacaatgttataggaaattaacaatgcatacatgtaattttgcaggctgttcaaccacttcatcgtctttttgactgcctcacattgaaggaactttgcagcggactgttatatgatctatgaaagaatgcatgcaacaagatctccagtctgatactgatgaagaaactacaaaagaacacatagccaccatcaatcaagacaaagggaaaactaccattacctcaattggatttctggtttttgggctatcattggatttctggttaactgaaatatgtaccttgcagtagctctatgtctctatatggcattatggtgtctaaaactggatcattatattttcatttgagtgaaattcttatcaaatgttgaaccttcaggctccagcttgatctggttcatgttttttctagattaccccagttgatgaagcaaagaaattatacctgttatttggccttggggctaatgttgccattatcttttctggccgtacaatgaagtatttctcaaatttgcgcaagacattgggtcctggaatgatgagcatagtggtacttcttgaacttgcatctattggggagtgagcaagtttgttttgaatgatccttcattgccaaagtcttatcgtaagaagaaaaaggtcagtagttgtttatcatgcttcctttttcccccttactcaaaataatatgctaacaaaccaggaacttcataatgatttctggttaactgaaacgcatgggcacacatccatgagtcccccaccgctacatgcctcacgcctcgtcactgagtcgttcttagtcacgacatgctgatgtcgatccacccgtcaagaacaaggtgcagcagagatctttctcctcgtcgctgcttcctcgccatccggagatggtcgtcgccgcctaatatcacagcggtgggaaggcacaacgctcccccatctcctccggttctgcctgctcgccagcacgacgcgacgatgcccccctgacccccgcgcgcacagcctccgctggagaagcgacaacgctctcgtctccggtctccatgagtcagcctccaatccatttccatgccaggtatttacctaacgtacattgaacctgcacacaaccctgtctgtgagaccagaaggtagatttcttcaaggggaacaatgtggtgtaacttcatcagcacaaccactttgctgaaggtgtccggatcatgatgcagacaacaactggtgtactcattcccactttgatggtaatcgaaatggagacaaacacaattggagggaaaatatccaaagacaaaaggagtgagttttcacttcttcagattccaccaatcagaataagaactagacatcatagagaccaacttttggtaagagcaacaaaaaactggactactaaaatttactagcgtgatcttcaactgtcctgttaccaatattttttggggtctattatggatagcaatatgcatttgttctttgtacagagatttttcctcgcaatattatgttcgtttggtcatttgtaattattagcagtaaataaacgccatttgcttcaacggttctaggttgtacacaggtaaaggaacaatcgattaccaatgactaagggtattcataaattatgctacggtcccatggctaaaatccctaatcatcggcgacggagctcctattccctccaggctccagctgatggagtgagcg

SEQ ID NO: 29316 - DNA, 2115 bp, Zea Mays
cttcgacggtgtcgtcgccgtttttgccgatcgtcagcatcactgtcgtccgcttcgcttggatgcaccgttgcgaacatgcagctagacgcgtgcacatcctttttccgtaataaattcgtctgtatcatcatccaccgtctggtcttgttctgctcaacacatatacgtggttgcgaaccatgcgactagacgcgtgggggatttcaattgacgagtatgagaaacatgaatggccgatcgatcgtgcaggtcgattgaacaaattgctcaagagatttcaaggctaccattgcttgctcgctgcaaatactactgcagtatatttagattgtattgtacaatgttataggaaattaacaatgcatacatgtaattttgcaggctgttcaaccacttcatcgtctttttgactgcctcacattgaaggaactttgcagcggactgttatatgatctatgaaagaatgcatgtaggaaatatctgtgaatgctacttatattttgttatgcctccttggtcattattctgaaccatagaacatgatctatctccagttgtattttccccttctatggaatcaccattgttggcaacaagatctccagtctgatactgatgaagaaactacaaaagaacacatagccaccatcaatcaagacaaagggaaaactaccattacctcaattggatttctggtttttgggctatcattggatttctggttaactgaaatatgtaccttgcagtagctctatgtctctatatggcattatggtgtctaaaactggatcattatattttcatttgagtgaaattcttatcaaatgttgaaccttcaggctccagcttgatctggttcatgttttttctagattaccccagttgatgaagcaaagaaattatacctgttatttggccttggggctaatgttgccattatcttttctggccgtacaatgaagtatttctcaaatttgcgcaagacattgggtcctggaatgatgagcatagtggtacttcttgaacttgcatctattggggagtgagcaagtttgttttgaatgatccttcattgccaaagtcttatcgtaagaagaaaaaggaacttcataatgatttctggttaactgaaacgcatgggcacacatccatgagtcccccaccgctacatgcctcacgcctcgtcactgagtcgttcttagtcacgacatgctgatgtcgatccacccgtcaagaacaaggtgcagcagagatctttctcctcgtcgctgcttcctcgccatccggagatggtcgtcgccgcctaatatcacagcggtgggaaggcacaacgctcccccatctcctccggttctgcctgctcgccagcacgacgcgacgatgcccccctgacccccgcgcgcacagcctccgctggagaagcgacaacgctctcgtctccggtctccatgagtcagcctccaatccatttccatgccaggtatttacctaacgtacattgaacctgcacacaaccctgtctgtgagaccagaaggtagatttcttcaaggggaacaatgtggtgtaacttcatcagcacaaccactttgctgaaggtgtccggatcatgatgcagacaacaactggtgtactcattcccactttgatggtaatcgaaatggagacaaacacaattggagggaaaatatccaaagacaaaaggagtgagttttcacttcttcagattccaccaatcagaataagaactagacatcatagagaccaacttttggtaagagcaacaaaaaactggactactaaaatttactagcgtgatcttcaactgtcctgttaccaatattttttggggtctattatggatagcaatatgcatttgttctttgtacagagatttttcctcgcaatattatgttcgtttggtcatttgtaattattagcagtaaataaacgccatttgcttcaacggttctaggttgtacacaggtaaaggaacaatcgattaccaatgactaagggtattcataaattatgctacggtcccatggctaaaatccctaatcatcggcgacggagctcctattccctccaggctccagctgatggagtgagcg

SEQ ID NO: 29317 - DNA, 2858 bp, Zea Mays
ataaaaaaaaggcacggattaattaggggccgaagcttcgccacacgcaataggtcggtcgcctctggactcctcacacgaaacctctataaaaggagtgccaagaggcagccaaggtttccgcaaaacaaaacaccaacctttagcaccaggcaaaccaaacactaggccaacgcaattctctagagcactgtaggctctagttctccagaggcccgccacaaccacaagccaaggccacagccagtgccctcgccatggctcccaacctcagcaagaagacgcctgctggcctcctcggcgacgaggtggccccggtggagggactcaagccgtcgcggttcacccttaagggcaaggacctggccgtggacgggcacccggtcctgctggacgtgccggccaacatccgtctcaccccggcgtcgacgctcgtgcccgccgcggacgtccccgcagcgggcggcggcagcttcctcggcttcgacgcggcggcggccgagagccggcacgtggtgcccgtcggaaagctccgtgacattcggttcatgagcatcttccgtttcaaggtgtggtggacgacgcactgggtgggggacagcggcagggacgtggagaacgagacgcagatgatggtgctcgaccgctccgccggcgagcccggcggcggcggccgaccctacgtgctgctgctccccatcatcgagggctcgttccgggcctgcctcgaggccgggaaggtggaagactacgtggacctgtgcgtggagagcgggtcgtcggcggtgcgcggcgccgcgttccggagctcgctgtacctgcacgcgggcgacgacccgttcgagctcgtcgcggacgccgtcagggtggtccgtgcgcacctgggcacgttccggaccatggaggagaagacgccgccgccgatcgtggacaagttcgggtggtgcacgtgggacgccttctacctcaaggtgcacccggagggcgtgtgggagggcgtgcgccgcctggcggagggcggctgcccgccggggctggtgctcatcgacgacggctggcagtccatctgccacgacgaggacgacccgaacagcggcgaggagggcatgaaccgcacctccgccggcgagcagatgccctgccgcctcatcaagttccaggagaaccacaagttcagggagtacaagcagggcgggatgggcgcgttcgtgcgggagatgaaggcggcgttccccaccgtggagcaggtgtacgtgtggcacgcgctgtgcgggtactggggcggcctccgccccggcgcgcccggcctgccgcccgccaaggtggtggcgcccaagctctcccccggcctgcagcgcaccatggaggacctcgccgtcgacaagatcgtcaacaacggtgtcggcctcgtcgaccccaagcgcgcgcacgagctctacgatggtttgcactcccacctccaggcctccggcatcgacggcgtcaaggtcgacgtcattcactgctggagatgctgtgcgaggagtacggcggccgtgtcgagctggccaaggcctacttcgccgggctgacggcgtcggtgcggcggcacttcggcggcaacggcgtgatcgcgagcatggagcactgcaacgacttcatgctgctgggcacggaggcggtggcgctgggccgcgtgggcgacgacttctggtgcacggacccctccggcgaccccaacggcaccttctggctgcaggggtgccacatggtgcactgcgcctacaactcgctgtggatgggcaacttcatccacccggactgggacatgttccagtccacgcacccctgcgccgccttccacgccgcgtcccgcgccatctccggcgggcccatctacgtcagcgactcggtggggcagcacgacttcgcgctgctccgccgcctggcgctccccgacggcaccgtcctccggtgcgagggccacgcgctgcccacgcgcgactgcctcttcgccgacccgctccacgacggccggaccgtgctcaagatctggaacgtgaaccgcttcgccggcgtcgtcggcgccttcaactgccagggcggcgggtggagccccgaggcgcggcggaacaagtgcttctcggagttctccgtgcccctggccgcgcgcgcctcgccgtccgacgtcgaatggaagagcggcaaagcgggaccaggcgtcagcgtcaagggcgtctcccagttcgccgtgtacgcggtcgaggccaggacgctgcagctgctgcgccccgacgagggcgtcgacctcacgctgcagcccttcacctacgagctcttcgtcgtcgcccccgtgcgcgtcatctcgcacgagcgggccatcaagttcgcgcccatcggactcgccaacatgctcaacaccgccggcgccgtgcaggcgttcgaggccaagaaagatgctagcggcgtcacggcagaggtgttcgtgaagggcgcaggggagctggtggcgtactcgtcggcgacgcccaggctctgcaaggtgaacggcgacgaggccgagttcacgtacaaggacggcgtggtcaccgtcgacgtgccgtggtcggggtcgtcgtcgaagctgtgtcgcgtccagtacgtctactgagccggacgggccgatgactctgctccctgctggcctgctcaggacgcaataatctaatgtttagagcttaccaagttttacagctctatcagtttacttttgtttgtctgctcttcgttttttaagaattatttctattgtgtgaattaatgagtgctttccttctagttttctgattactcctattcgagcactctgcgtgaacactcttttgggagcaaatgagggg

SEQ ID NO: 29318 - DNA, 1518 bp, Zea Mays
agtactcagttcaaagctttcctgcttttcttgctgccgcgcgcgtttgcatgccagctcgtttgttccccagcggcgacccaaccatgttcgaggagttctggcgggggacgggggccgccgccgagatcgtcatcccggggtggcagaccatgagctacttctccgacgtgggcaacgtgtgctggttcctggagccgggcctggaccaggaggtgcggcgggtgcaccggctggtcggcaacgccgccgtggacgggtaccacgtcgtcgtcggcaccggctccacgcagctcttcatggccgcgctgtacgcgctgtcgccgcccgcgggagccggcgccggcgctgcgcccatgagcgtggtgtccacggcgccctactactcgtcctaccctgccgtcacggatttcctccggtcggggctcttccgctgggccggcgacgccagctcgttcaggggcgacacctacatcgagctggtgtgctcgccgaacaaccccgacggcgccatccgcgaggccgtcctgtcctccgccggctccggcgtggcggtccacgacctggcgtactactggccgcagtacacagccatcaccaaacgggccgaccacgacgtcatgctcttcaccgtgtccaagagcacaggccacgccgggacgcggatcgggtgggcgctggtgaaggaccgcgacgtcgcgaggaagatggccaagttcatcgagctcaacacgatcggcgtctccaaggactcgcagctgcgcgccgccaaggtcctcagggcggtctccgacgcctacgagctcccggaggcgggagatgcccgccgccgccgcctgttcgactacggccggcgcaagatggtggagcgctggcgcatgctgcgtggagcggccgccgcctccggcatcttcagcctgtccgaggagacctcggccttgtgcaacttcaccaaagagatggcggtcactaaccctgcgttcgcgtggctgcgctgcgacagggaggacgtggaggactgcgcgggcttcctgcgcgcccacaggatactgacgcggagcggggaccagttcggagcggacccgaggtacgtccgggtcagcatgctcgacagggacgacgcctacgacatatttgtgaagcgtctctcgtctctgcgatgaagacggcaggctactcacggtcacggagatgggcctagttggagaggagggtcgatgccacccggccggccggcgtcggcatgccggcccgtcgcccgtcggactgtgggagcatgcatgagtagggcagcagcgttcagtaggaagaagcgcaggaggagcgacgatttgttttgcctttcctgctgtatgttttgcggtgttccggatgtcgcatcgtctcaaaggtttcttttggtttcttgctaattgctacgtgagactgaactgttgtaacaaaaagtcaacataaattggactgacgacgagaaccgcacagctccaaaaaaaaaaaaaaatggtactctgctcgcaa

SEQ ID NO: 29319 - DNA, 1183 bp, Zea Mays
gtctctttaaacaatgatccatccatcattagcagctccccttctagaatctcgtcctaccctgccgtcacggatttcctccggtcggggctcttccgctgggccggcgacgccagctcgttcaggggcgacacctacatcgagctggtgtgctcgccgaacaaccccgacggcgccatccgcgaggccgtcctgtcctccgccggctccggcgtggcggtccacgacctggcgtactactggccgcagtacacagccatcaccaaacgggccgaccacgacgtcatgctcttcaccgtgtccaagagcacaggccacgccgggacgcggatcgggtgggcgctggtgaaggaccgcgacgtcgcgaggaagatggccaagttcatcgagctcaacacgatcggcgtctccaaggactcgcagctgcgcgccgccaaggtcctcagggcggtctccgacgcctacgagctcccggaggcgggagatgcccgccgccgccgcctgttcgactacggccggcgcaagatggtggagcgctggcgcatgctgcgtggagcggccgccgcctccggcatcttcagcctgtccgaggagacctcggccttgtgcaacttcaccaaagagatggcggtcactaaccctgcgttcgcgtggctgcgctgcgacagggaggacgtggaggactgcgcgggcttcctgcgcgcccacaggatactgacgcggagcggggaccagttcggagcggacccgaggtacgtccgggtcagcatgctcgacagggacgacgcctacgacatatttgtgaagcgtctctcgtctctgcgatgaagacggcaggctactcacggtcacggagatgggcctagttggagaggagggtcgatgccacccggccggccggcgtcggcatgccggcccgtcgcccgtcggactgtgggagcatgcatgagtagggcagcagcgttcagtaggaagaagcgcaggaggagcgacgatttgttttgcctttcctgctgtatgttttgcggtgttccggatgtcgcatcgtctcaaaggtttcttttggtttcttgctaattgctacgtgagactgaactgttgtaacaaaaagtcaacataaattggactgacgacgagaaccgcacagctccaaaaaaaaaaaaaaatggtactctgctcgcaa

SEQ ID NO: 29320 - DNA, 5877 bp, Zea Mays
ctgggatgaaacggactcccaaacaggcccaacgctaaaaaaaccacccccagctccgttctcttccaagtggccagtgccgtctccggccaccgcccatggctatgccttcctccaccacggcggcgctctcccgcctcgtcgaccgcacccgggttccggaccccacactgcaacgccatgcggttggggccgtcttccgccacctcctctccctccccgcgcccctcccagcggccgcccacgacgccacctcagccctcctcgcttcgccccaccctgcagtcgccgcgcacgctgcggcctccatcgcccgtctcaccgccacccgccccgatctcctcccctcggatgtcgccctcccgctcctcatcgcgcccctcgcggcctcaccgtcccccctgctcgcctcctgcctcgtcaaggcagtctccgcgctcgcaacctgcgccctccgctccggctctcgcttcccggcccacgaccaccccttcatccaggcgctcgcgtcgggggctgacggcgctcgagcggagctgatgcggcaggcagccgggatggttgccgaccgggtggattgggtggtcaagtttctgaggccgttcgtgatgttctccgtggtgaggaagggggacgccgcatttgccagggatttgatcggtgcattggccgcagcagccgtggcagcagggaaggctagtgtcgcgatcccggttctgaagatgctccaagacagcatgctgcatttcggccgcggggacgatcaggaagtgcggctatggcttagttccgcagagtgtttggttgatgcttatgtcgtgctactgaggaagttagctcatggtcaaatgcctacatatgatgctcaagcaagtagtgcgacattgatggaaacactcctatcacaatattcatttcatcaaaaatttctgggaattgattcaacaatttttgggttatcaaaacatttattcttggtgcaaaaggatcttggattatgctatatacctgagatttctgttgtccttagctctctttcttactctctcactgggctagagtttgaacatgaacagctagctgccttgaaacttctgagctttttgattgattggaaatatgaaaatgtgcttgacagtaaagaacaaacacatcacgtcagtgtggagcttctctgtgttctggcagttatcaaccttaccatttcaccatccaaatctgtgaaagcagtggcatatcatgttctgtcaaggttcagcttgtttgttttagacttgccagcttctcattcatcagaggaacaagatatttcaacgagttaccacataagcaaacctgcacttcttcttcctaaacttttgcatcatctatggtccaagccatcttcatcatgcttcagttttatgaagtacatagctaccaaggcctcacctgattctggccagagtgacttggaagcaaattattggactcatcaaataaatgcctatctgacagcccttcacagagaaaagcatacattagatgtcaggtcttcaaaaacgacttcagtagccatatcatctctgataagctctgtagcatctgttttggtaatgcatccaaaacttggtacttctgcagcagaatctttggccatgcttggcacatcggacccaagattgggtatgccactttttgtagttatcctcttctacagcaagattctatgcagcagcggtaaattttcagcggaaatctcgctcagtttgctagagtcattgccatcacttgctatacatggttttgttcttccactagctctgcaatggatatcgccaatgcttaaaagggactcaaattcggttttgtatgctatggctgttcgattactctgcaagatatgggctgtaaccgactgggcatttccaaacttacaagtggttctggatcctgagaatttttccaatttcatctctgacagagagatctctgcaagtattgccacatcaatacgcgatgtttgcaagcaaaatccagatagaggcgttgatataatattatctgtctctttttgtattgagagtcgtgattctgtggttcaagctcttggcctcgagagcctctcgtacctttgtgaagcagatgtggtcgatttctacacggcgtggaaagttatatcaaagcaggtgcttgattattacgttgagcctgctgttgctcacagtttgtgtattctgttgaggtgcggagcgatggatgctgaggcatattctgtaatatctggtaaccttgtaagaacattgtggagaattggaacatccaagaaaaataatcccgatccactctgggataaagcaagaggaactgcttttcactccttgtccaactacaaggtatcacttattcaagatgctattcctgatttctggaaactaaactatgagttctttacgaacgaacataatctggcagttctcaaggccatggagcaccttcaagatgagatcatcagatatgagcacataaatcgtcgtcgagtgactactgacaaaagaactgcagtgcataaatttgagaagctactggaggtttttcctcgggcggtatttaaagggatgttatctcatcatcagttgcctggtgctgctcttttaactctcaattttactccaaaggacatacttaatgaagggaaacctaaggatttgcctagagttcattccgcttttgagcaagcttttgtggaaattgctgaatctatgtatgtgtcaagaaacatagtggtagctcttcttgccttgcagtcatggaagtcatttgtttccaactggatgcaagcagttgtggcattgcttgacactaaagactcgtcaaagttgaacaaagcaatgaaagctgctaatgatatatttaagattctgtgcgaccaagttccggtgtctactcctcaagttgttgttaacatagctcttgttattggggcactggccttgattgttccgccaactgctcatttggtagtatcttcggtatcagattttcttttaaaatggttgcttcaatacgagcatgagcacaagcaatggtcagcagctctctctcttggattaatattcaattgttttcatcctacggacaaaaagagcagacttcaggttattaatgggtttcttgaggttatctcaaaaactgaaagctgtcttgtaaaaggagcttgtggactggcattaggctatgtttgccacggtcttttgacaagagcacataatgctgttgattcagaagtagaggctattacacaactcaatgagcgtgcatcagttgaggatattcttcatgctttggttaccttgttaattcaactatgtccatcctcatgctattctctgaagaagcttagtatatacggaatatcctccatgggagggatggaagaaaatattcatagcttcagtgatgatccttgggctgtcgctggacttgtcattggtctgggaaactctgttgttgctctgtatagacttggagcttatgaagcagttactgaagtcaaggatgtattgatatcatggataccaaatgttgattcgaactctgcattatttgatgaaatagattcagtatcactatgtatgggttcatgtcttgctcttccatctgttgtggctttttgccaaagagtggagctgttgaatgacgacttggatgcattgttcaatcgctacacttctttagcttctgagctcctgaacctcaataaatctgggattatctttcagaatttgttaatggcaatctgtattggtgctggatcttttctctcttctatattgaatgatggcgtgcatgctatggaatttaatggtgttaaaggctttctggacactctcagacatatatatacccacccttttcctccccttgttcatttgggaggcatgtttggtgtggtcaacgcttttggtgcaggtgcaggagatcttactggggtgttttcaaagcctatgacttctcaaatcaaacatgaggatgctaaggataagcacatacaagattatgctgcatgggctatttcatttctcagaagcaggtggtcgaagaatcagaatcagattctttatgaggacaatggttctaatagaagtcctgatgatcatgatcaagcttcaagtttttctgaacaaagcttagtttggaacttaagtctctggttgagtgatctaaaatttgaaaagtctggtgatgtggtgccaataagtacagttggaacagttttaaaatgcctttccaaagctccccgattgccaactacagactggggagctattgtacggaggtgcattaaagctgaggcgcagatttctcataagttaaccaatcaggaagatcctaagatactaaaggaggcatgcttatatttgactctagctcatgctgctcacataagtccccttctgcagtttttggatgatctgactgacatactcagattccagagattagatataaatgttcagtctattttgctcaaacatttgttacacctaatgaagctattctctgattcaagattggataaattgcatgaggattttaccgaatacttgtattcccccacttcttcatacttgaattactcatctgaacagaaaagcatgctaagaatgtcgttctgggaaggcatttatacgtgcctggtggatgtttctgaagaatctggtgttttttcattcattgaaaaatgcattcagtgcttgttgcctcttttgacgctccatagtgatggtcaacctgaattcatgaaagagtggtctgttgctatcttatgtcttacaaacgcccagaaaaaatggctggatgatattttgcagattcgcagtactgccttagtcaatgaaggacatgttgatgttgcaaaaaagattatcctcagagcaagattgtgtgcaactggttgtggttcaacacatgagctgggaaatataaagacagcaatattgtgtacaaaagctgatggtgtttggtggagtgtccttgttgagatcacttcagccttaaactcagccgaaaacatcatcaaaagacagtggcttctggatgcattagacattggctgtgttacagctcacccctcaacggtgctgtgttttgttggcttgctttgtggtagctgctgcatctatatgccgcttcttcttgttaattcgataaatgtactgagcgacttgccggtcaccctgcctgcctttctctccaccatcgtttctgatgatttcaggaactctgtggcagacaggctatggctgttgactactgacatctatacttgggctgaacaattagctcacggacacgatcaacctggacatgatcgtattcatagaagtgaaactgagattgcgacttttttggccaatattctgctctctacatgcattacagtcgaggactacctgtctgttgataagcggctaaagcttgcaaatcttgaagcactctaatcaaagggagatgtgtttcttttctattttatgtatgtatttatgtacggtatcagtcatgttttaatagttgatgtccctgctgatgatccagcaatgtttttttcatgtacataattaatttaactaactcatcttatgcactgaaaacaatctattgttcaaagatagatagacctatgaaataatattgttgtgtacactcactttgtcataccgccactgaacaatttaagagcagtcaccttacaatttgatgggagtaaacttctgaggtattaacagagattatctgagaccatagctgagatgtaaaagctcccatgcaagtttacttggattatgccataactgtaaatgagtctaatcgcaattacatttgccttgagctcag

SEQ ID NO: 29321 - DNA, 6042 bp, Zea Mays
gaaacggactcccaaacaggcccaacgctaaaaaaaccacccccagctccgttctcttccaagtggccagtgccgtctccggccaccgcccatggctatgccttcctccaccacggcggcgctctcccgcctcgtcgaccgcacccgggttccggaccccacactgcaacgccatgcggttggggccgtcttccgccacctcctctccctccccgcgcccctcccagcggccgcccacgacgccacctcagccctcctcgcttcgccccaccctgcagtcgccgcgcacgctgcggcctccatcgcccgtctcaccgccacccgccccgatctcctcccctcggatgtcgccctcccgctcctcatcgcgcccctcgcggcctcaccgtcccccctgctcgcctcctgcctcgtcaaggcagtctccgcgctcgcaacctgcgccctccgctccggctctcgcttcccggcccacgaccaccccttcatccaggcgctcgcgtcgggggctgacggcgctcgagcggagctgatgcggcaggcagccgggatggttgccgaccgggtggattgggtggtcaagtttctgaggccgttcgtgatgttctccgtggtgaggaagggggacgccgcatttgccagggatttgatcggtgcattggccgcagcagccgtggcagcagggaaggctagtgtcgcgatcccggttctgaagatgctccaagacagcatgctgcatttcggccgcggggacgatcaggaagtgcggctatggcttagttccgcagagtgtttggttgatgcttatgtcgtgctactgaggaagttagctcatggtcaaatgcctacatatgatgctcaagcaagtagtgcgacattgatggaaacactcctatcacaatattcatttcatcaaaaatttctgggaattgattcaacaatttttgggttatcaaaacatttattcttggtgcaaaaggatcttggattatgctatatacctgagatttctgttgtccttagctctctttcttactctctcactgggctagagtttgaacatgaacagctagctgccttgaaacttctgagctttttgattgattggaaatatgaaaatgtgcttgacagtaaagaacaaacacatcacgtcagtgtggagcttctctgtgttctggcagttatcaaccttaccatttcaccatccaaatctgtgaaagcagtggcatatcatgttctgtcaaggttcagcttgtttgttttagacttgccagcttctcattcatcagaggaacaagatatttcaacgagttaccacataagcaaacctgcacttcttcttcctaaacttttgcatcatctatggtccaagccatcttcatcatgcttcagttttatgaagtacatagctaccaaggcctcacctgattctggccagagtgacttggaagcaaattattggactcatcaaataaatgcctatctgacagcccttcacagagaaaagcatacattagatgtcaggtcttcaaaaacgacttcagtagccatatcatctctgataagctctgtagcatctgttttggtaatgcatccaaaacttggtacttctgcagcagaatctttggccatgcttggcacatcggacccaagattgggtatgccactttttgtagttatcctcttctacagcaagattctatgcagcagcggtaaattttcagcggaaatctcgctcagtttgctagagtcattgccatcacttgctatacatggttttgttcttccactagctctgcaatggatatcgccaatgcttaaaagggactcaaattcggttttgtatgctatggctgttcgattactctgcaagatatgggctgtaaccgactgggcatttccaaacttacaagtaagaagtggttctggatcctgagaatttttccaatttcatctctgacagagagatctctgcaagtattgccacatcaatacgcgatgtttgcaagcaaaatccagatagaggcgttgatataatattatctgtctctttttgtattgagagtcgtgattctgtggttcaagctcttggcctcgagagcctctcgtacctttgtgaagcagatgtggtcgatttctacacggcgtggaaagttatatcaaagcaggtgcttgattattacgttgagcctgctgttgctcacagtttgtgtattctgttgaggtgcggagcgatggatgctgaggcatattctgtaatatctggtaaccttgtaagaacattgtggagaattggaacatccaagaaaaataatcccgatccactctgggataaagcaagaggaactgcttttcactccttgtccaactacaaggtatcacttattcaagatgctattcctgatttctggaaactaaactatgagttctttacgaacgaacataatctggcagttctcaaggccatggagcaccttcaagatgagatcatcagatatgagcacataaatcgtcgtcgagtgactactgacaaaagaactgcagtgcataaatttgagaagctactggaggtttttcctcgggcggtatttaaagggatgttatctcatcatcagttgcctggtgctgctcttttaactctcaattttactccaaaggacatacttaatgaagggaaacctaaggatttgcctagagttcattccgcttttgagcaagcttttgtggaaattgctgaatctatgtatgtgtcaagaaacatagtggtagctcttcttgccttgcagtcatggaagtcatttgtttccaactggatgcaagcagttgtggcattgcttgacactaaagactcgtcaaagttgaacaaagcaatgaaagctgctaatgatatatttaagattctgtgcgaccaagttccggtgtctactcctcaagttgttgttaacatagctcttgttattggggcactggccttgattgttccgccaactgctcatttggtagtatcttcggtatcagattttcttttaaaatggttgcttcaatacgagcatgagcacaagcaatggtcagcagctctctctcttggattaatattcaattgttttcatcctacggacaaaaagagcagacttcaggttattaatgggtttcttgaggttatctcaaaaactgaaagctgtcttgtaaaaggagcttgtggactggcattaggctatgtttgccacggtcttttgacaagagcacataatgctgttgattcagaagtagaggctattacacaactcaatgagcgtgcatcagttgaggatattcttcatgctttggttaccttgttaattcaactatgtccatcctcatgctattctctgaagaagcttagtatatacggaatatcctccatgggagggatggaagaaaatattcatagcttcagtgatgatccttgggctgtcgctggacttgtcattggtctgggaaactctgttgttgctctgtatagacttggagcttatgaagcagttactgaagtcaaggatgtattgatatcatggataccaaatgttgattcgaactctgcattatttgatgaaatagattcagtatcactatgtatgggttcatgtcttgctcttccatctgttgtggctttttgccaaagagtggagctgttgaatgacgacttggatgcattgttcaatcgctacacttctttagcttctgagctcctgaacctcaataaatctgggattatctttcagaatttgttaatggcaatctgtattggtgctggatcttttctctcttctatattgaatgatggcgtgcatgctatggaatttaatggtgttaaaggctttctggacactctcagacatatatatacccacccttttcctccccttgttcatttgggaggcatgtttggtgtggtcaacgcttttggtgcaggtgcaggagatcttactggggtgttttcaaagcctatgacttctcaaatcaaacatgaggtttccttcatacatcttaacacttaatgttctgtaaaattgttagaataatctatttagttgtgtgcacaggagtcatcttttgtgagtggttcattactgacaagtcctgttggtgagactctgtcaacatcaatgattcaggaaatatttcttcttgctaaggatgctaaggataagcacatacaagattatgctgcatgggctatttcatttctcagaagcaggtggtcgaagaatcagaatcagattctttatgaggacaatggttctaatagaagtcctgatgatcatgatcaagcttcaagtttttctgaacaaagcttagtttggaacttaagtctctggttgagtgatctaaaatttgaaaagtctggtgatgtggtgccaataagtacagttggaacagttttaaaatgcctttccaaagctccccgattgccaactacagactggggagctattgtacggaggtgcattaaagctgaggcgcagatttctcataagttaaccaatcaggaagatcctaagatactaaaggaggcatgcttatatttgactctagctcatgctgctcacataagtccccttctgcagtttttggatgatctgactgacatactcagattccagagattagatataaatgttcagtctattttgctcaaacatttgttacacctaatgaagctattctctgattcaagattggataaattgcatgaggattttaccgaatacttgtattcccccacttcttcatacttgaattactcatctgaacagaaaagcatgctaagaatgtcgttctgggaaggcatttatacgtgcctggtggatgtttctgaagaatctggtgttttttcattcattgaaaaatgcattcagtgcttgttgcctcttttgacgctccatagtgatggtcaacctgaattcatgaaagagtggtctgttgctatcttatgtcttacaaacgcccagaaaaaatggctggatgatattttgcagattcgcagtactgccttagtcaatgaaggacatgttgatgttgcaaaaaagattatcctcagagcaagattgtgtgcaactggttgtggttcaacacatgagctgggaaatataaagacagcaatattgtgtacaaaagctgatggtgtttggtggagtgtccttgttgagatcacttcagccttaaactcagccgaaaacatcatcaaaagacagtggcttctggatgcattagacattggctgtgttacagctcacccctcaacggtgctgtgttttgttggcttgctttgtggtagctgctgcatctatatgccgcttcttcttgttaattcgataaatgtactgagcgacttgccggtcaccctgcctgcctttctctccaccatcgtttctgatgatttcaggaactctgtggcagacaggctatggctgttgactactgacatctatacttgggctgaacaattagctcacggacacgatcaacctggacatgatcgtattcatagaagtgaaactgagattgcgacttttttggccaatattctgctctctacatgcattacagtcgaggactacctgtctgttgataagcggctaaagcttgcaaatcttgaagcactctaatcaaagggagatgtgtttcttttctattttatgtatgtatttatgtacggtatcagtcatgttttaatagttgatgtccctgctgatgatccagcaatgtttttttcatgtacataattaatttaactaactcatcttatgcactgaaaacaatctattgttcaaagatagatagacctatgaaataatattgttgtgtacactcactttgtcataccgccactgaacaatttaagagcagtcaccttacaatttgatgggagtaaacttctgaggtattaacagagattatctgagaccatagctgagatgtaaaagctcccatgcaagtttacttggattatgccataactgtaaatgagtctaatcgcaattacatttgccttgagctcag

SEQ ID NO: 29322 - DNA, 3192 bp, Zea Mays
aaacggactcccaaacaggcccaacgctaaaaaaaccacccccagctccgttctcttccaagtggccagtgccgtctccggccaccgcccatggctatgccttcctccaccacggcggcgctctcccgcctcgtcgaccgcacccgggttccggaccccacactgcaacgccatgcggttggggccgtcttccgccacctcctctccctccccgcgcccctcccagcggccgcccacgacgccacctcagccctcctcgcttcgccccaccctgcagtcgccgcgcacgctgcggcctccatcgcccgtctcaccgccacccgccccgatctcctcccctcggatgtcgccctcccgctcctcatcgcgcccctcgcggcctcaccgtcccccctgctcgcctcctgcctcgtcaaggcagtctccgcgctcgcaacctgcgccctccgctccggctctcgcttcccggcccacgaccaccccttcatccaggcgctcgcgtcgggggctgacggcgctcgagcggagctgatgcggcaggcagccgggatggttgccgaccgggtggattgggtggtcaagtttctgaggccgttcgtgatgttctccgtggtgaggaagggggacgccgcatttgccagggatttgatcggtgcattggccgcagcagccgtggcagcagggaaggctagtgtcgcgatcccggttctgaagatgctccaagacagcatgctgcatttcggccgcggggacgatcaggaagtgcggctatggcttagttccgcagagtgtttggttgatgcttatgtcgtgctactgaggaagttagctcatggtcaaatgcctacatatgatgctcaagcaagtagtgcgacattgatggaaacactcctatcacaatattcatttcatcaaaaatttctgggaattgattcaacaatttttgggttatcaaaacatttattcttggtgcaaaaggatcttggattatgctatatacctgagatttctgttgtccttagctctctttcttactctctcactgggctagagtttgaacatgaacagctagctgccttgaaacttctgagctttttgattgattggaaatatgaaaatgtgcttgacagtaaagaacaaacacatcacgtcagtgtggagcttctctgtgttctggcagttatcaaccttaccatttcaccatccaaatctgtgaaagcagtggcatatcatgttctgtcaaggttcagcttgtttgttttagacttgccagcttctcattcatcagaggaacaagatatttcaacgagttaccacataagcaaacctgcacttcttcttcctaaacttttgcatcatctatggtccaagccatcttcatcatgcttcagttttatgaagtacatagctaccaaggcctcacctgattctggccagagtgacttggaagcaaattattggactcatcaaataaatgcctatctgacagcccttcacagagaaaagcatacattagatgtcaggtcttcaaaaacgacttcagtagccatatcatctctgataagctctgtagcatctgttttggtaatgcatccaaaacttggtacttctgcagcagaatctttggccatgcttggcacatcggacccaagattgggtatgccactttttgtagttatcctcttctacagcaagattctatgcagcagcggtaaattttcagcggaaatctcgctcagtttgctagagtcattgccatcacttgctatacatggttttgttcttccactagctctgcaatggatatcgccaatgcttaaaagggactcaaattcggttttgtatgctatggctgttcgattactctgcaagatatgggctgtaaccgactgggcatttccaaacttacaagtggttctggatcctgagaatttttccaatttcatctctgacagagagatctctgcaagtattgccacatcaatacgcgatgtttgcaagcaaaatccagatagaggcgttgatataatattatctgtctctttttgtattgagagtcgtgattctgtggttcaagctcttggcctcgagagcctctcgtacctttgtgaagcagatgtggtcgatttctacacggcgtggaaagttatatcaaagcaggtgcttgattattacgttgagcctgctgttgctcacagtttgtgtattctgttgaggtgcggagcgatggatgctgaggcatattctgtaatatctggtaaccttgtaagaacattgtggagaattggaacatccaagaaaaataatcccgatccactctgggataaagcaagaggaactgcttttcactccttgtccaactacaaggtatcacttattcaagatgctattcctgatttctggaaactaaactatgagttctttacgaacgaacataatctggcagttctcaaggccatggagcaccttcaagatgagatcatcagatatgagcacataaatcgtcgtcgagtgactactgacaaaagaactgcagtgcataaatttgagaagctactggaggtttttcctcgggcggtatttaaagggatgttatctcatcatcagttgcctggtgctgctcttttaactctcaattttactccaaaggacatacttaatgaagggaaacctaaggatttgcctagagttcattccgcttttgagcaagcttttgtggaaattgctgaatctatgtatgtgtcaagaaacatagtggtagctcttcttgccttgcagtcatggaagtcatttgtttccaactggatgcaagcagttgtggcattgcttgacactaaagactcgtcaaagttgaacaaagcaatgaaagctgctaatgatatatttaagattctgtgcgaccaagttccggtgtctactcctcaagttgttgttaacatagctcttgttattggggcactggccttgattgttccgccaactgctcatttggtagtatcttcggtatcagattttcttttaaaatggttgcttcaatacgagcatgagcacaagcaatggtcagcagctctctctcttggattaatattcaattgttttcatcctacggacaaaaagagcagacttcaggttattaatgggtttcttgagtgaaacaatgttcatgatgctggaaggtggagcaggaccagt

SEQ ID NO: 29323 - DNA, 3157 bp, Zea Mays
aacggactcccaaacaggcccaacgctaaaaaaaccacccccagctccgttctcttccaagtggccagtgccgtctccggccaccgcccatggctatgccttcctccaccacggcggcgctctcccgcctcgtcgaccgcacccgggttccggaccccacactgcaacgccatgcggttggggccgtcttccgccacctcctctccctccccgcgcccctcccagcggccgcccacgacgccacctcagccctcctcgcttcgccccaccctgcagtcgccgcgcacgctgcggcctccatcgcccgtctcaccgccacccgccccgatctcctcccctcggatgtcgccctcccgctcctcatcgcgcccctcgcggcctcaccgtcccccctgctcgcctcctgcctcgtcaaggcagtctccgcgctcgcaacctgcgccctccgctccggctctcgcttcccggcccacgaccaccccttcatccaggcgctcgcgtcgggggctgacggcgctcgagcggagctgatgcggcaggcagccgggatggttgccgaccgggtggattgggtggtcaagtttctgaggccgttcgtgatgttctccgtggtgaggaagggggacgccgcatttgccagggatttgatcggtgcattggccgcagcagccgtggcagcagggaaggctagtgtcgcgatcccggttctgaagatgctccaagacagcatgctgcatttcggccgcggggacgatcaggaagtgcggctatggcttagttccgcagagtgtttggttgatgcttatgtcgtgctactgaggaagttagctcatggtcaaatgcctacatatgatgctcaagcaagtagtgcgacattgatggaaacactcctatcacaatattcatttcatcaaaaatttctgggaattgattcaacaatttttgggttatcaaaacatttattcttggtgcaaaaggatcttggattatgctatatacctgagatttctgttgtccttagctctctttcttactctctcactgggctagagtttgaacatgaacagctagctgccttgaaacttctgagctttttgattgattggaaatatgaaaatgtgcttgacagtaaagaacaaacacatcacgtcagtgtggagcttctctgtgttctggcagttatcaaccttaccatttcaccatccaaatctgtgaaagcagtggcatatcatgttctgtcaaggttcagcttgtttgttttagacttgccagcttctcattcatcagaggaacaagatatttcaacgagttaccacataagcaaacctgcacttcttcttcctaaacttttgcatcatctatggtccaagccatcttcatcatgcttcagttttatgaagtacatagctaccaaggcctcacctgattctggccagagtgacttggaagcaaattattggactcatcaaataaatgcctatctgacagcccttcacagagaaaagcatacattagatgtcaggtcttcaaaaacgacttcagtagccatatcatctctgataagctctgtagcatctgttttggtaatgcatccaaaacttggtacttctgcagcagaatctttggccatgcttggcacatcggacccaagattgggtatgccactttttgtagttatcctcttctacagcaagattctatgcagcagcggtaaattttcagcggaaatctcggcttctcttctctcctgctactgggttgaggcgctgaacacggccacctacgaggcctatgatcgatgtaaacaggttttgctgtgtctgatgatgaagtgtcgacctctgaaggtcctgctcctttcgagaccgagccccctggtgctggtgattgcgatggtcttgctggagatggtggagcacgaacatgggatcctgcaggtcccggagatgcttttgacaagtcattaccccccccccccccttagaccagcattggtaatagagggaggagtaacacacttctgtacaactggtccgggtgttgataatagatggtcatagggcaactgaccctgcacaaaaggtgttgctgcatcagttgacaccgaacaagaacttcaccatcttcgtcatgtctgtcattaccagaatctccaaaaactttctcagcaacattagcattagtagataaatcattagacaacaaaggatcagttgtattacaattgcccctgttgtcatagttagatgaaggtaaagagttgaaggcaacaaattgattttggcccttagtttagcattagcattatgatgaagttctacatgtattagggtgcagttctgtagaaggaaaaccttcttcatcaaagtcaacatcacgagaaatataaatgtgcgcaatggatacttctagacacttgtacccattatgcatgctgttacaacctaagaaaacacaacaaatgcactaacaagacaacttgcgagtattataagaatataaggacacaaatttggccagcctgcacatgcaaagatcttaaggaaagaataatcaggggtttgttgacacaactttttgaaaggagttgaataatcaagcaacttactaggtgcatgatttataagatatgcaacaacatgtaacatcccctccactcctgtattttgtcctcactcatgtagtcatgtgcactcgagaaaacttcctggtcggtcacccatcccacattgctccgagccaagcacgcttaacccagatgtttttttgagatatgctttcgaaaaagaagatgcaccttgctggtatgaatattctatcaatctattaagccttggaccaggatatcaccatcctccatggccaggatatcacatagcaacaaaagcttcatcctagaacttcagaggcaagatgcatgcacaagcaaaattaggccaacttcaactatataacgatgttttctctcagcaggaccattttgctgttttggtgaaaagcgagttcaaatgctgatactcgcctccccaattagttcggacaacaatgattttggtgttgaagcgacactcaaccatattatgaaactcaacaaaattttcaaagacttcagagttgaattcaagcatgttaatctagataaacttgctaaaatcat

SEQ ID NO: 29324 - DNA, 5956 bp, Zea Mays
cggactcccaaacaggcccaacgctaaaaaaaccacccccagctccgttctcttccaagtggccagtgccgtctccggccaccgcccatggctatgccttcctccaccacggcggcgctctcccgcctcgtcgaccgcacccgggttccggaccccacactgcaacgccatgcggttggggccgtcttccgccacctcctctccctccccgcgcccctcccagcggccgcccacgacgccacctcagccctcctcgcttcgccccaccctgcagtcgccgcgcacgctgcggcctccatcgcccgtctcaccgccacccgccccgatctcctcccctcggatgtcgccctcccgctcctcatcgcgcccctcgcggcctcaccgtcccccctgctcgcctcctgcctcgtcaaggcagtctccgcgctcgcaacctgcgccctccgctccggctctcgcttcccggcccacgaccaccccttcatccaggcgctcgcgtcgggggctgacggcgctcgagcggagctgatgcggcaggcagccgggatggttgccgaccgggtggattgggtggtcaagtttctgaggccgttcgtgatgttctccgtggtgaggaagggggacgccgcatttgccagggatttgatcggtgcattggccgcagcagccgtggcagcagggaaggctagtgtcgcgatcccggttctgaagatgctccaagacagcatgctgcatttcggccgcggggacgatcaggaagtgcggctatggcttagttccgcagagtgtttggttgatgcttatgtcgtgctactgaggaagttagctcatggtcaaatgcctacatatgatgctcaagcaagtagtgcgacattgatggaaacactcctatcacaatattcatttcatcaaaaatttctgggaattgattcaacaatttttgggttatcaaaacatttattcttggtgcaaaaggatcttggattatgctatatacctgagatttctgttgtccttagctctctttcttactctctcactgggctagagtttgaacatgaacagctagctgccttgaaacttctgagctttttgattgattggaaatatgaaaatgtgcttgacagtaaagaacaaacacatcacgtcagtgtggagcttctctgtgttctggcagttatcaaccttaccatttcaccatccaaatctgtgaaagcagtggcatatcatgttctgtcaaggttcagcttgtttgttttagacttgccagcttctcattcatcagaggaacaagatatttcaacgagttaccacataagcaaacctgcacttcttcttcctaaacttttgcatcatctatggtccaagccatcttcatcatgcttcagttttatgaagtacatagctaccaaggcctcacctgattctggccagagtgacttggaagcaaattattggactcatcaaataaatgcctatctgacagcccttcacagagaaaagcatacattagatgtcaggtcttcaaaaacgacttcagccatatcatctctgataagctctgtagcatctgttttggtaatgcatccaaaacttggtacttctgcagcagaatctttggccatgcttggcacatcggacccaagattgggtatgccactttttgtagttatcctcttctacagcaagattctatgcagcagcggtaaattttcagcggaaatctcgctcagtttgctagagtcattgccatcacttgctatacatggttttgttcttccactagctctgcaatggatatcgccaatgcttaaaagggactcaaattcggttttgtatgctatggctgttcgattactctgcaagatatgggctgtaaccgactgggcatttccaaacttacaagtggttctggatcctgagaatttttccaatttcatctctgacagagagatctctgcaagtattgccacatcaatacgcgatgtttgcaagcaaaatccagatagaggcgttgatataatattatctgtctctttttgtattgagagtcgtgattctgtggttcaagctcttggcctcgagagcctctcgtacctttgtgaagcagatgtggtcgatttctacacggcgtggaaagttatatcaaagcaggtgcttgattattacgttgagcctgctgttgctcacagtttgtgtattctgttgaggtgcggagcgatggatgctgaggcatattctgtaatatctggtaaccttgtaagaacattgtggagaattggaacatccaagaaaaataatcccgatccactctgggataaagcaagaggaactgcttttcactccttgtccaactacaaggtatcacttattcaagatgctattcctgatttctggaaactaaactatgagttctttacgaacgaacataatctggcagttctcaaggccatggagcaccttcaagatgagatcatcagatatgagcacataaatcgtcgtcgagtgactactgacaaaagaactgcagtgcataaatttgagaagctactggaggtttttcctcgggcggtatttaaagggatgttatctcatcatcagttgcctggtgctgctcttttaactctcaattttactccaaaggacatacttaatgaagggaaacctaaggatttgcctagagttcattccgcttttgagcaagcttttgtggaaattgctgaatctatgtatgtgtcaagaaacatagtggtagctcttcttgccttgcagtcatggaagtcatttgtttccaactggatgcaagcagttgtggcattgcttgacactaaagactcgtcaaagttgaacaaagcaatgaaagctgctaatgatatatttaagattctgtgcgaccaagttccggtgtctactcctcaagttgttgttaacatagctcttgttattggggcactggccttgattgttccgccaactgctcatttggtagtatcttcggtatcagattttcttttaaaatggttgcttcaatacgagcatgagcacaagcaatggtcagcagctctctctcttggattaatattcaattgttttcatcctacggacaaaaagagcagacttcaggttattaatgggtttcttgaggttatctcaaaaactgaaagctgtcttgtaaaaggagcttgtggactggcattaggctatgtttgccacggtcttttgacaagagcacataatgctgttgattcagaagtagaggctattacacaactcaatgagcgtgcatcagttgaggatattcttcatgctttggttaccttgttaattcaactatgtccatcctcatgctattctctgaagaagcttagtatatacggaatatcctccatgggagggatggaagaaaatattcatagcttcagtgatgatccttgggctgtcgctggacttgtcattggtctgggaaactctgttgttgctctgtatagacttggagcttatgaagcagttactgaagtcaaggatgtattgatatcatggataccaaatgttgattcgaactctgcattatttgatgaaatagattcagtatcactatgtatgggttcatgtcttgctcttccatctgttgtggctttttgccaaagagtggagctgttgaatgacgacttggatgcattgttcaatcgctacacttctttagcttctgagctcctgaacctcaataaatctgggattatctttcagaatttgttaatggcaatctgtattggtgctggatcttttctctcttctatattgaatgatggcgtgcatgctatggaatttaatggtgttaaaggctttctggacactctcagacatatatatacccacccttttcctccccttgttcatttgggaggcatgtttggtgtggtcaacgcttttggtgcaggtgcaggagatcttactggggtgttttcaaagcctatgacttctcaaatcaaacatgaggagtcatcttttgtgagtggttcattactgacaagtcctgttggtgagactctgtcaacatcaatgattcaggaaatatttcttcttgctaaggatgctaaggataagcacatacaagattatgctgcatgggctatttcatttctcagaagcaggtggtcgaagaatcagaatcagattctttatgaggacaatggttctaatagaagtcctgatgatcatgatcaagcttcaagtttttctgaacaaagcttagtttggaacttaagtctctggttgagtgatctaaaatttgaaaagtctggtgatgtggtgccaataagtacagttggaacagttttaaaatgcctttccaaagctccccgattgccaactacagactggggagctattgtacggaggtgcattaaagctgaggcgcagatttctcataagttaaccaatcaggaagatcctaagatactaaaggaggcatgcttatatttgactctagctcatgctgctcacataagtccccttctgcagtttttggatgatctgactgacatactcagattccagagattagatataaatgttcagtctattttgctcaaacatttgttacacctaatgaagctattctctgattcaagattggataaattgcatgaggattttaccgaatacttgtattcccccacttcttcatacttgaattactcatctgaacagaaaagcatgctaagaatgtcgttctgggaaggcatttatacgtgcctggtggatgtttctgaagaatctggtgttttttcattcattgaaaaatgcattcagtgcttgttgcctcttttgacgctccatagtgatggtcaacctgaattcatgaaagagtggtctgttgctatcttatgtcttacaaacgcccagaaaaaatggctggatgatattttgcagattcgcagtactgccttagtcaatgaaggacatgttgatgttgcaaaaaagattatcctcagagcaagattgtgtgcaactggttgtggttcaacacatgagctgggaaatataaagacagcaatattgtgtacaaaagctgatggtgtttggtggagtgtccttgttgagatcacttcagccttaaactcagccgaaaacatcatcaaaagacagtggcttctggatgcattagacattggctgtgttacagctcacccctcaacggtgctgtgttttgttggcttgctttgtggtagctgctgcatctatatgccgcttcttcttgttaattcgataaatgtactgagcgacttgccggtcaccctgcctgcctttctctccaccatcgtttctgatgatttcaggaactctgtggcagacaggctatggctgttgactactgacatctatacttgggctgaacaattagctcacggacacgatcaacctggacatgatcgtattcatagaagtgaaactgagattgcgacttttttggccaatattctgctctctacatgcattacagtcgaggactacctgtctgttgataagcggctaaagcttgcaaatcttgaagcactctaatcaaagggagatgtgtttcttttctattttatgtatgtatttatgtacggtatcagtcatgttttaatagttgatgtccctgctgatgatccagcaatgtttttttcatgtacataattaatttaactaactcatcttatgcactgaaaacaatctattgttcaaagatagatagacctatgaaataatattgttgtgtacactcactttgtcataccgccactgaacaatttaagagcagtcaccttacaatttgatgggagtaaacttctgaggtattaacagagattatctgagaccatagctgagatgtaaaagctcccatgcaagtttacttggattatgccataactgtaaatgagtctaatcgcaattacatttgccttgagctcag

SEQ ID NO: 29325 - DNA, 6565 bp, Zea Mays
cggactcccaaacaggcccaacgctaaaaaaaccacccccagctccgttctcttccaagtggccagtgccgtctccggccaccgcccatggctatgccttcctccaccacggcggcgctctcccgcctcgtcgaccgcacccgggttccggaccccacactgcaacgccatgcggttggggccgtcttccgccacctcctctccctccccgcgcccctcccagcggccgcccacgacgccacctcagccctcctcgcttcgccccaccctgcagtcgccgcgcacgctgcggcctccatcgcccgtctcaccgccacccgccccgatctcctcccctcggatgtcgccctcccgctcctcatcgcgcccctcgcggcctcaccgtcccccctgctcgcctcctgcctcgtcaaggcagtctccgcgctcgcaacctgcgccctccgctccggctctcgcttcccggcccacgaccaccccttcatccaggcgctcgcgtcgggggctgacggcgctcgagcggagctgatgcggcaggcagccgggatggttgccgaccgggtggattgggtggtcaagtttctgaggccgttcgtgatgttctccgtggtgaggaagggggacgccgcatttgccagggatttgatcggtgcattggccgcagcagccgtggcagcagggaaggctagtgtcgcgatcccggttctgaagatgctccaagacagcatgctgcatttcggccgcggggacgatcaggaagtgcggctatggcttagttccgcagagtgtttggttgatgcttatgtcgtgctactgaggaagttagctcatggtcaaatgcctacatatgatgctcaagcaagtagtgcgacattgatggaaacactcctatcacaatattcatttcatcaaaaatttctgggaattgattcaacaatttttgggttatcaaaacatttattcttggtgcaaaaggatcttggattatgctatatacctgagatttctgttgtccttagctctctttcttactctctcactgggctagagtttgaacatgaacagctagctgccttgaaacttctgagctttttgattgattggaaatatgaaaatggtacattcccaaatattcataatcacaagcgctctgtaaatttccaaatccaactgctggaggggctaggaacttggttctcttatttttctaatcttaagctactgtgttttgtttcataccaataatcttaagcatggaatgggtatcatctttctcttcactaaatttgatgagagttttggtttgctttgcatgtaatagtccacctggagaaggtttgcagcatacaaatcatttgggctgaataaaatcataatttttagagggatatctatctatattttcaatgcaaaccctgaccatatcattcatatatttgtcacttcatgtcttcatgtatgtgtttcttgtgggctggacaaaaatcaatgaaactcaaattaaactgggtgcacactgatatgatagatatgctagacaaaaatctcttcagagattaaatagcatacttgttagcagtaaatttttagatttttatgacaaacgttgaaacataccatgaccattaacatttggaaccaaaaggcatatttgaatacagaggaagtgatgtttagttcaatccttttataggatgtgcagtcaatctaaccttacttttgttaccattgacatggcatacaatgcctgtcaattattatcattgtaaagtttcatatatgtgtatggctgcagtgcttgacagtaaagaacaaacacatcacgtcagtgtggagcttctctgtgttctggcagttatcaaccttaccatttcaccatccaaatctgtgaaagcagtggcatatcatgttctgtcaaggttcagcttgtttgttttagacttgccagcttctcattcatcagaggaacaagatatttcaacgagttaccacataagcaaacctgcacttcttcttcctaaacttttgcatcatctatggtccaagccatcttcatcatgcttcagttttatgaagtacatagctaccaaggcctcacctgattctggccagagtgacttggaagcaaattattggactcatcaaataaatgcctatctgacagcccttcacagagaaaagcatacattagatgtcaggtcttcaaaaacgacttcagtagccatatcatctctgataagctctgtagcatctgttttggtaatgcatccaaaacttggtacttctgcagcagaatctttggccatgcttggcacatcggacccaagattgggtatgccactttttgtagttatcctcttctacagcaagattctatgcagcagcggtaaattttcagcggaaatctcgctcagtttgctagagtcattgccatcacttgctatacatggttttgttcttccactagctctgcaatggatatcgccaatgcttaaaagggactcaaattcggttttgtatgctatggctgttcgattactctgcaagatatgggctgtaaccgactgggcatttccaaacttacaagtggttctggatcctgagaatttttccaatttcatctctgacagagagatctctgcaagtattgccacatcaatacgcgatgtttgcaagcaaaatccagatagaggcgttgatataatattatctgtctctttttgtattgagagtcgtgattctgtggttcaagctcttggcctcgagagcctctcgtacctttgtgaagcagatgtggtcgatttctacacggcgtggaaagttatatcaaagcaggtgcttgattattacgttgagcctgctgttgctcacagtttgtgtattctgttgaggtgcggagcgatggatgctgaggcatattctgtaatatctggtaaccttgtaagaacattgtggagaattggaacatccaagaaaaataatcccgatccactctgggataaagcaagaggaactgcttttcactccttgtccaactacaaggtatcacttattcaagatgctattcctgatttctggaaactaaactatgagttctttacgaacgaacataatctggcagttctcaaggccatggagcaccttcaagatgagatcatcagatatgagcacataaatcgtcgtcgagtgactactgacaaaagaactgcagtgcataaatttgagaagctactggaggtttttcctcgggcggtatttaaagggatgttatctcatcatcagttgcctggtgctgctcttttaactctcaattttactccaaaggacatacttaatgaagggaaacctaaggatttgcctagagttcattccgcttttgagcaagcttttgtggaaattgctgaatctatgtatgtgtcaagaaacatagtggtagctcttcttgccttgcagtcatggaagtcatttgtttccaactggatgcaagcagttgtggcattgcttgacactaaagactcgtcaaagttgaacaaagcaatgaaagctgctaatgatatatttaagattctgtgcgaccaagttccggtgtctactcctcaagttgttgttaacatagctcttgttattggggcactggccttgattgttccgccaactgctcatttggtagtatcttcggtatcagattttcttttaaaatggttgcttcaatacgagcatgagcacaagcaatggtcagcagctctctctcttggattaatattcaattgttttcatcctacggacaaaaagagcagacttcaggttattaatgggtttcttgaggttatctcaaaaactgaaagctgtcttgtaaaaggagcttgtggactggcattaggctatgtttgccacggtcttttgacaagagcacataatgctgttgattcagaagtagaggctattacacaactcaatgagcgtgcatcagttgaggatattcttcatgctttggttaccttgttaattcaactatgtccatcctcatgctattctctgaagaagcttagtatatacggaatatcctccatgggagggatggaagaaaatattcatagcttcagtgatgatccttgggctgtcgctggacttgtcattggtctgggaaactctgttgttgctctgtatagacttggagcttatgaagcagttactgaagtcaaggatgtattgatatcatggataccaaatgttgattcgaactctgcattatttgatgaaatagattcagtatcactatgtatgggttcatgtcttgctcttccatctgttgtggctttttgccaaagagtggagctgttgaatgacgacttggatgcattgttcaatcgctacacttctttagcttctgagctcctgaacctcaataaatctgggattatctttcagaatttgttaatggcaatctgtattggtgctggatcttttctctcttctatattgaatgatggcgtgcatgctatggaatttaatggtgttaaaggctttctggacactctcagacatatatatacccacccttttcctccccttgttcatttgggaggcatgtttggtgtggtcaacgcttttggtgcaggtgcaggagatcttactggggtgttttcaaagcctatgacttctcaaatcaaacatgaggaaatatttcttcttgctaaggatgctaaggataagcacatacaagattatgctgcatgggctatttcatttctcagaagcaggtggtcgaagaatcagaatcagattctttatgaggacaatggttctaatagaagtcctgatgatcatgatcaagcttcaagtttttctgaacaaagcttagtttggaacttaagtctctggttgagtgatctaaaatttgaaaagtctggtgatgtggtgccaataagtacagttggaacagttttaaaatgcctttccaaagctccccgattgccaactacagactggggagctattgtacggaggtgcattaaagctgaggcgcagatttctcataagttaaccaatcaggaagatcctaagatactaaaggaggcatgcttatatttgactctagctcatgctgctcacataagtccccttctgcagtttttggatgatctgactgacatactcagattccagagattagatataaatgttcagtctattttgctcaaacatttgttacacctaatgaagctattctctgattcaagattggataaattgcatgaggattttaccgaatacttgtattcccccacttcttcatacttgaattactcatctgaacagaaaagcatgctaagaatgtcgttctgggaaggcatttatacgtgcctggtggatgtttctgaagaatctggtgttttttcattcattgaaaaatgcattcagtgcttgttgcctcttttgacgctccatagtgatggtcaacctgaattcatgaaagagtggtctgttgctatcttatgtcttacaaacgcccagaaaaaatggctggatgatattttgcagattcgcagtactgccttagtcaatgaaggacatgttgatgttgcaaaaaagattatcctcagagcaagattgtgtgcaactggttgtggttcaacacatgagctgggaaatataaagacagcaatattgtgtacaaaagctgatggtgtttggtggagtgtccttgttgagatcacttcagccttaaactcagccgaaaacatcatcaaaagacagtggcttctggatgcattagacattggctgtgttacagctcacccctcaacggtgctgtgttttgttggcttgctttgtggtagctgctgcatctatatgccgcttcttcttgttaattcgataaatgtactgagcgacttgccggtcaccctgcctgcctttctctccaccatcgtttctgatgatttcaggaactctgtggcagacaggctatggctgttgactactgacatctatacttgggctgaacaattagctcacggacacgatcaacctggacatgatcgtattcatagaagtgaaactgagattgcgacttttttggccaatattctgctctctacatgcattacagtcgaggactacctgtctgttgataagcggctaaagcttgcaaatcttgaagcactctaatcaaagggagatgtgtttcttttctattttatgtatgtatttatgtacggtatcagtcatgttttaatagttgatgtccctgctgatgatccagcaatgtttttttcatgtacataattaatttaactaactcatcttatgcactgaaaacaatctattgttcaaagatagatagacctatgaaataatattgttgtgtacactcactttgtcataccgccactgaacaatttaagagcagtcaccttacaatttgatgggagtaaacttctgaggtattaacagagattatctgagaccatagctgagatgtaaaagctcccatgcaagtttacttggattatgccataactgtaaatgagtctaatcgcaattacatttgccttgagctcag

SEQ ID NO: 29326 - DNA, 6923 bp, Zea Mays
caaacaggcccaacgctaaaaaaaccacccccagctccgttctcttccaagtggccagtgccgtctccggccaccgcccatggctatgccttcctccaccacggcggcgctctcccgcctcgtcgaccgcacccgggttccggaccccacactgcaacgccatgcggttggggccgtcttccgccacctcctctccctccccgcgcccctcccagcggccgcccacgacgccacctcagccctcctcgcttcgccccaccctgcagtcgccgcgcacgctgcggcctccatcgcccgtctcaccgccacccgccccgatctcctcccctcggatgtcgccctcccgctcctcatcgcgcccctcgcggcctcaccgtcccccctgctcgcctcctgcctcgtcaaggcagtctccgcgctcgcaacctgcgccctccgctccggctctcgcttcccggcccacgaccaccccttcatccaggcgctcgcgtcgggggctgacggcgctcgagcggagctgatgcggcaggcagccgggatggttgccgaccgggtggattgggtggtcaagtttctgaggccgttcgtgatgttctccgtggtgaggaagggggacgccgcatttgccagggatttgatcggtgcattggccgcagcagccgtggcagcagggaaggctagtgtcgcgatcccggttctgaagatgctccaagacagcatgctgcatttcggccgcggggacgatcaggaagtgcggctatggcttagttccgcagagtgtttggttgatgcttatgtcgtgctactgaggaagttagctcatggtcaaatgcctacatatgatgctcaagcaagtagtgcgacattgatggaaacactcctatcacaatattcatttcatcaaaaatttctgggaattgattcaacaatttttgggttatcaaaacatttattcttggtgcaaaaggatcttggattatgctatatacctgagatttctgttgtccttagctctctttcttactctctcactgggctagagtttgaacatgaacagctagctgccttgaaacttctgagctttttgattgattggaaatatgaaaatggtacattcccaaatattcataatcacaagcgctctgtaaatttccaaatccaactgctggaggggctaggaacttggttctcttatttttctaatcttaagctactgtgttttgtttcataccaataatcttaagcatggaatgggtatcatctttctcttcactaaatttgatgagagttttggtttgctttgcatgtaatagtccacctggagaaggtttgcagcatacaaatcatttgggctgaataaaatcataatttttagagggatatctatctatattttcaatgcaaaccctgaccatatcattcatatatttgtcacttcatgtcttcatgtatgtgtttcttgtgggctggacaaaaatcaatgaaactcaaattaaactgggtgcacactgatatgatagatatgctagacaaaaatctcttcagagattaaatagcatacttgttagcagtaaatttttagatttttatgacaaacgttgaaacataccatgaccattaacatttggaaccaaaaggcatatttgaatacagaggaagtgatgtttagttcaatccttttataggatgtgcagtcaatctaaccttacttttgttaccattgacatggcatacaatgcctgtcaattattatcattgtaaagtttcatatatgtgtatggctgcagtgcttgacagtaaagaacaaacacatcacgtcagtgtggagcttctctgtgttctggcagttatcaaccttaccatttcaccatccaaatctgtgaaagcagtggcatatcatgttctgtcaaggttcagcttgtttgttttagacttgccagcttctcattcatcagaggaacaagatatttcaacgagttaccacataagcaaacctgcacttcttcttcctaaacttttgcatcatctatggtccaagccatcttcatcatgcttcagttttatgaagtacatagctaccaaggcctcacctgattctggccagagtgacttggaagcaaattattggactcatcaaataaatgcctatctgacagcccttcacagagaaaagcatacattagatgtcaggtcttcaaaaacgacttcagtagccatatcatctctgataagctctgtagcatctgttttggtaatgcatccaaaacttggtacttctgcagcagaatctttggccatgcttggcacatcggacccaagattgggtatgccactttttgtagttatcctcttctacagcaagattctatgcagcagcggtaaattttcagcggaaatctcgctcagtttgctagagtcattgccatcacttgctatacatggttttgttcttccactagctctgcaatggatatcgccaatgcttaaaagggactcaaattcggttttgtatgctatggctgttcgattactctgcaagatatgggctgtaaccgactgggcatttccaaacttacaagtggttctggatcctgagaatttttccaatttcatctctgacagagagatctctgcaagtattgccacatcaatacgcgatgtttgcaagcaaaatccagatagaggcgttgatataatattatctgtctctttttgtattgagagtcgtgattctgtggttcaagctcttggcctcgagagcctctcgtacctttgtgaagcagatgtggtcgatttctacacggcgtggaaagttatatcaaagcaggtgcttgattattacgttgagcctgctgttgctcacagtttgtgtattctgttgaggtgcggagcgatggatgctgaggcatattctgtaatatctggtaaccttgtaagaacattgtggagaattggaacatccaagaaaaataatcccgatccactctgggataaagcaagaggaactgcttttcactccttgtccaactacaaggtatcacttattcaagatgctattcctgatttctggaaactaaactatgagttctttacgaacgaacataatctggcagttctcaaggccatggagcaccttcaagatgagatcatcagatatgagcacataaatcgtcgtcgagtgactactgacaaaagaactgcagtgcataaatttgagaagctactggaggtttttcctcgggcggtatttaaagggatgttatctcatcatcagttgcctggtgctgctcttttaactctcaattttactccaaaggacatacttaatgaagggaaacctaaggatttgcctagagttcattccgcttttgagcaagcttttgtggaaattgctgaatctatgtatgtgtcaagaaacatagtggtagctcttcttgccttgcagtcatggaagtcatttgtttccaactggatgcaagcagttgtggcattgcttgacactaaagactcgtcaaagttgaacaaagcaatgaaagctgctaatgatatatttaaggagctctgcatttcaattaagaatggaattgacccagttttaaggaaaaccgggcctgaatcctacacagagcgcacaaacaacccagacaacgatagccccacacaaagcccatctagatttatcgttgccgagctcaacacaagggacgagcagctccgactccgtgagacgagccgcacatggccaaaggaactcgacgacacctacatcgaaacaccgattctgtgcgaccaagttccggtgtctactcctcaagttgttgttaacatagctcttgttattggggcactggccttgattgttccgccaactgctcatttggtagtatcttcggtatcagattttcttttaaaatggttgcttcaatacgagcatgagcacaagcaatggtcagcagctctctctcttggattaatattcaattgttttcatcctacggacaaaaagagcagacttcaggttattaatgggtttcttgaggttatctcaaaaactgaaagctgtcttgtaaaaggagcttgtggactggcattaggctatgtttgccacggtcttttgacaagagcacataatgctgttgattcagaagtagaggctattacacaactcaatgagcgtgcatcagttgaggatattcttcatgctttggttaccttgttaattcaactatgtccatcctcatgctattctctgaagaagcttagtatatacggaatatcctccatgggagggatggaagaaaatattcatagcttcagtgatgatccttgggctgtcgctggacttgtcattggtctgggaaactctgttgttgctctgtatagacttggagcttatgaagcagttactgaagtcaaggatgtattgatatcatggataccaaatgttgattcgaactctgcattatttgatgaaatagattcagtatcactatgtatgggttcatgtcttgctcttccatctgttgtggctttttgccaaagagtggagctgttgaatgacgacttggatgcattgttcaatcgctacacttctttagcttctgagctcctgaacctcaataaatctgggattatctttcagaatttgttaatggcaatctgtattggtgctggatcttttctctcttctatattgaatgatggcgtgcatgctatggaatttaatggtgttaaaggctttctggacactctcagacatatatatacccacccttttcctccccttgttcatttgggaggcatgtttggtgtggtcaacgcttttggtgcaggtgcaggagatcttactggggtgttttcaaagcctatgacttctcaaatcaaacatgaggtttccttcatacatcttaacacttaatgttctgtaaaattgttagaataatctatttagttgtgtgcacaggagtcatcttttgtgagtggttcattactgacaagtcctgttggtgagactctgtcaacatcaatgattcaggaaatatttcttcttgctaaggatgctaaggataagcacatacaagattatgctgcatgggctatttcatttctcagaagcaggtggtcgaagaatcagaatcagattctttatgaggacaatggttctaatagaagtcctgatgatcatgatcaagcttcaagtttttctgaacaaagcttagtttggaacttaagtctctggttgagtgatctaaaatttgaaaagtctggtgatgtggtgccaataagtacagttggaacagttttaaaatgcctttccaaagctccccgattgccaactacagactggggagctattgtacggaggtgcattaaagctgaggcgcagatttctcataagttaaccaatcaggaagatcctaagatactaaaggaggcatgcttatatttgactctagctcatgctgctcacataagtccccttctgcagtttttggatgatctgactgacatactcagattccagagattagatataaatgttcagtctattttgctcaaacatttgttacacctaatgaagctattctctgattcaagattggataaattgcatgaggattttaccgaatacttgtattcccccacttcttcatacttgaattactcatctgaacagaaaagcatgctaagaatgtcgttctgggaaggcatttatacgtgcctggtggatgtttctgaagaatctggtgttttttcattcattgaaaaatgcattcagtgcttgttgcctcttttgacgctccatagtgatggtcaacctgaattcatgaaagagtggtctgttgctatcttatgtcttacaaacgcccagaaaaaatggctggatgatattttgcagattcgcagtactgccttagtcaatgaaggacatgttgatgttgcaaaaaagattatcctcagagcaagattgtgtgcaactggttgtggttcaacacatgagctgggaaatataaagacagcaatattgtgtacaaaagctgatggtgtttggtggagtgtccttgttgagatcacttcagccttaaactcagccgaaaacatcatcaaaagacagtggcttctggatgcattagacattggctgtgttacagctcacccctcaacggtgctgtgttttgttggcttgctttgtggtagctgctgcatctatatgccgcttcttcttgttaattcgataaatgtactgagcgacttgccggtcaccctgcctgcctttctctccaccatcgtttctgatgatttcaggaactctgtggcagacaggctatggctgttgactactgacatctatacttgggctgaacaattagctcacggacacgatcaacctggacatgatcgtattcatagaagtgaaactgagattgcgacttttttggccaatattctgctctctacatgcattacagtcgaggactacctgtctgttgataagcggctaaagcttgcaaatcttgaagcactctaatcaaagggagatgtgtttcttttctattttatgtatgtatttatgtacggtatcagtcatgttttaatagttgatgtccctgctgatgatccagcaatgtttttttcatgtacataattaatttaactaactcatcttatgcactgaaaacaatctattgttcaaagatagatagacctatgaaataatattgttgtgtacactcactttgtcataccgccactgaacaatttaagagcagtcaccttacaatttgatgggagtaaacttctgaggtattaacagagattatctgagaccatagctgagatgtaaaagctcccatgcaagtttacttggattatgccataactgtaaatgagtctaatcgcaattacatttgccttgagctcag

SEQ ID NO: 29327 - DNA, 1788 bp, Zea Mays
cccaacgctaaaaaaaccacccccagctccgttctcttccaagtggccagtgccgtctccggccaccgcccatggctatgccttcctccaccacggcggcgctctcccgcctcgtcgaccgcacccgggttccggaccccacactgcaacgccatgcggttggggccgtcttccgccacctcctctccctccccgcgcccctcccagcggccgcccacgacgccacctcagccctcctcgcttcgccccaccctgcagtcgccgcgcacgctgcggcctccatcgcccgtctcaccgccacccgccccgatctcctcccctcggatgtcgccctcccgctcctcatcgcgcccctcgcggcctcaccgtcccccctgctcgcctcctgcctcgtcaaggcagtctccgcgctcgcaacctgcgccctccgctccggctctcgcttcccggcccacgaccaccccttcatccaggcgctcgcgtcgggggctgacggcgctcgagcggagctgatgcggcaggcagccgggatggttgccgaccgggtggattgggtggtcaagtttctgaggccgttcgtgatgttctccgtggtgaggaagggggacgccgcatttgccagggatttgatcggtgcattggccgcagcagccgtggcagcagggaaggctagtgtcgcgatcccggttctgaagatgctccaagacagcatgctgcatttcggccgcggggacgatcaggaagtgcggctatggcttagttccgcagagtgtttggttgatgcttatgtcgtgctactgaggaagttagctcatggtcaaatgcctacatatgatgctcaagcaagtagtgcgacattgatggaaacactcctatcacaatattcatttcatcaaaaatttctgggaattgattcaacaatttttgggttatcaaaacatttattcttggtgcaaaaggatcttggattatgctatatacctgagatttctgttgtccttagctctctttcttactctctcactgggctagagtttgaacatgaacagctagctgccttgaaacttctgagctttttgattgattggaaatatgaaaatgtgcttgacagtaaagaacaaacacatcacgtcagtgtggagcttctctgtgttctggcagttatcaaccttaccatttcaccatccaaatctgtgaaagcagtggcatatcatgttctgtcaaggttcagcttgtttgttttagacttgccagcttctcattcatcagaggaacaagatatttcaacgagttaccacataagcaaacctgcacttcttcttcctaaacttttgcatcatctatggtccaagccatcttcatcatgcttcagttttatgaagtacatagctaccaaggcctcacctgattctggccagagtgacttggaagcaaattattggactcatcaaataaatgcctatctgacagcccttcacagagaaaagcatacattagatgtcaggtcttcaaaaacgacttcagtagccatatcatctctgataagctctgtagcatctgttttggtaatgcatccaaaacttggtacttctgcagcagaatctttggccatgcttggcacatcggacccaagattgggtatgccactttttgtagttatcctcttctacagcaagattctatgcagcagcggtaaattttcagcggaaatctcggaacaggcccccatacatcagagaatacaagttcaagaggcttagatgaaacactagttgatataggatatgg

SEQ ID NO: 29328 - DNA, 5650 bp, Zea Mays
caacgctaaaaaaaccacccccagctccgttctcttccaagtggccagtgccgtctccggccaccgcccatggctatgccttcctccaccacggcggcgctctcccgcctcgtcgaccgcacccgggttccggaccccacactgcaacgccatgcggttggggccgtcttccgccacctcctctccctccccgcgcccctcccagcggccgcccacgacgccacctcagccctcctcgcttcgccccaccctgcagtcgccgcgcacgctgcggcctccatcgcccgtctcaccgccacccgccccgatctcctcccctcggatgtcgccctcccgctcctcatcgcgcccctcgcggcctcaccgtcccccctgctcgcctcctgcctcgtcaaggcagtctccgcgctcgcaacctgcgccctccgctccggctctcgcttcccggcccacgaccaccccttcatccaggcgctcgcgtcgggggctgacggcgctcgagcggagctgatgcggcaggcagccgggatggttgccgaccgggtggattgggtggtcaagtttctgaggccgttcgtgatgttctccgtggtgaggaagggggacgccgcatttgccagggatttgatcggtgcattggccgcagcagccgtggcagcagggaaggctagtgtcgcgatcccggttctgaagatgctccaagacagcatgctgcatttcggccgcggggacgatcaggaagtgcggctatggcttagttccgcagagtgtttggttgatgcttatgtcgtgctactgaggaagttagctcatggtcaaatgcctacatatgatgctcaagcaagtagtgcgacattgatggaaacactcctatcacaatattcatttcatcaaaaatttctgggaattgattcaacaatttttgggttatcaaaacatttattcttggtgcaaaaggatcttggattatgctatatacctgagatttctgttgtccttagctctctttcttactctctcactgggctagagtttgaacatgaacagctagctgccttgaaacttctgagctttttgattgattggaaatatgaaaatgtgcttgacagtaaagaacaaacacatcacgtcagtgtggagcttctctgtgttctggcagttatcaaccttaccatttcaccatccaaatctgtgaaagcagtggcatatcatgttctgtcaaggttcagcttgtttgttttagacttgccagcttctcattcatcagaggaacaagatatttcaacgagttaccacataagcaaacctgcacttcttcttcctaaacttttgcatcatctatggtccaagctcagtttgctagagtcattgccatcacttgctatacatggttttgttcttccactagctctgcaatggatatcgccaatgcttaaaagggactcaaattcggttttgtatgctatggctgttcgattactctgcaagatatgggctgtaaccgactgggcatttccaaacttacaagtggttctggatcctgagaatttttccaatttcatctctgacagagagatctctgcaagtattgccacatcaatacgcgatgtttgcaagcaaaatccagatagaggcgttgatataatattatctgtctctttttgtattgagagtcgtgattctgtggttcaagctcttggcctcgagagcctctcgtacctttgtgaagcagatgtggtcgatttctacacggcgtggaaagttatatcaaagcaggtgcttgattattacgttgagcctgctgttgctcacagtttgtgtattctgttgaggtgcggagcgatggatgctgaggcatattctgtaatatctggtaaccttgtaagaacattgtggagaattggaacatccaagaaaaataatcccgatccactctgggataaagcaagaggaactgcttttcactccttgtccaactacaaggtatcacttattcaagatgctattcctgatttctggaaactaaactatgagttctttacgaacgaacataatctggcagttctcaaggccatggagcaccttcaagatgagatcatcagatatgagcacataaatcgtcgtcgagtgactactgacaaaagaactgcagtgcataaatttgagaagctactggaggtttttcctcgggcggtatttaaagggatgttatctcatcatcagttgcctggtgctgctcttttaactctcaattttactccaaaggacatacttaatgaagggaaacctaaggatttgcctagagttcattccgcttttgagcaagcttttgtggaaattgctgaatctatgtatgtgtcaagaaacatagtggtagctcttcttgccttgcagtcatggaagtcatttgtttccaactggatgcaagcagttgtggcattgcttgacactaaagactcgtcaaagttgaacaaagcaatgaaagctgctaatgatatatttaagattctgtgcgaccaagttccggtgtctactcctcaagttgttgttaacatagctcttgttattggggcactggccttgattgttccgccaactgctcatttggtagtatcttcggtatcagattttcttttaaaatggttgcttcaatacgagcatgagcacaagcaatggtcagcagctctctctcttggattaatattcaattgttttcatcctacggacaaaaagagcagacttcaggttattaatgggtttcttgaggttatctcaaaaactgaaagctgtcttgtaaaaggagcttgtggactggcattaggctatgtttgccacggtcttttgacaagagcacataatgctgttgattcagaagtagaggctattacacaactcaatgagcgtgcatcagttgaggatattcttcatgctttggttaccttgttaattcaactatgtccatcctcatgctattctctgaagaagcttagtatatacggaatatcctccatgggagggatggaagaaaatattcatagcttcagtgatgatccttgggctgtcgctggacttgtcattggtctgggaaactctgttgttgctctgtatagacttggagcttatgaagcagttactgaagtcaaggatgtattgatatcatggataccaaatgttgattcgaactctgcattatttgatgaaatagattcagtatcactatgtatgggttcatgtcttgctcttccatctgttgtggctttttgccaaagagtggagctgttgaatgacgacttggatgcattgttcaatcgctacacttctttagcttctgagctcctgaacctcaataaatctgggattatctttcagaatttgttaatggcaatctgtattggtgctggatcttttctctcttctatattgaatgatggcgtgcatgctatggaatttaatggtgttaaaggctttctggacactctcagacatatatatacccacccttttcctccccttgttcatttgggaggcatgtttggtgtggtcaacgcttttggtgcaggtgcaggagatcttactggggtgttttcaaagcctatgacttctcaaatcaaacatgaggtttccttcatacatcttaacacttaatgttctgtaaaattgttagaataatctatttagttgtgtgcacaggagtcatcttttgtgagtggttcattactgacaagtcctgttggtgagactctgtcaacatcaatgattcaggaaatatttcttcttgctaaggatgctaaggataagcacatacaagattatgctgcatgggctatttcatttctcagaagcaggtggtcgaagaatcagaatcagattctttatgaggacaatggttctaatagaagtcctgatgatcatgatcaagcttcaagtttttctgaacaaagcttagtttggaacttaagtctctggttgagtgatctaaaatttgaaaagtctggtgatgtggtgccaataagtacagttggaacagttttaaaatgcctttccaaagctccccgattgccaactacagactggggagctattgtacggaggtgcattaaagctgaggcgcagatttctcataagttaaccaatcaggaagatcctaagatactaaaggaggcatgcttatatttgactctagctcatgctgctcacataagtccccttctgcagtttttggatgatctgactgacatactcagattccagagattagatataaatgttcagtctattttgctcaaacatttgttacacctaatgaagctattctctgattcaagattggataaattgcatgaggattttaccgaatacttgtattcccccacttcttcatacttgaattactcatctgaacagaaaagcatgctaagaatgtcgttctgggaaggcatttatacgtgcctggtggatgtttctgaagaatctggtgttttttcattcattgaaaaatgcattcagtgcttgttgcctcttttgacgctccatagtgatggtcaacctgaattcatgaaagagtggtctgttgctatcttatgtcttacaaacgcccagaaaaaatggctggatgatattttgcagattcgcagtactgccttagtcaatgaaggacatgttgatgttgcaaaaaagattatcctcagagcaagattgtgtgcaactggttgtggttcaacacatgagctgggaaatataaagacagcaatattgtgtacaaaagctgatggtgtttggtggagtgtccttgttgagatcacttcagccttaaactcagccgaaaacatcatcaaaagacagtggcttctggatgcattagacattggctgtgttacagctcacccctcaacggtgctgtgttttgttggcttgctttgtggtagctgctgcatctatatgccgcttcttcttgttaattcgataaatgtactgagcgacttgccggtcaccctgcctgcctttctctccaccatcgtttctgatgatttcaggaactctgtggcagacaggctatggctgttgactactgacatctatacttgggctgaacaattagctcacggacacgatcaacctggacatgatcgtattcatagaagtgaaactgagattgcgacttttttggccaatattctgctctctacatgcattacagtcgaggactacctgtctgttgataagcggctaaagcttgcaaatcttgaagcactctaatcaaagggagatgtgtttcttttctattttatgtatgtatttatgtacggtatcagtcatgttttaatagttgatgtccctgctgatgatccagcaatgtttttttcatgtacataattaatttaactaactcatcttatgcactgaaaacaatctattgttcaaagatagatagacctatgaaataatattgttgtgtacactcactttgtcataccgccactgaacaatttaagagcagtcaccttacaatttgatgggagtaaacttctgaggtattaacagagattatctgagaccatagctgagatgtaaaagctcccatgcaagtttacttggattatgccataactgtaaatgagtctaatcgcaattacatttgccttgagctcag

SEQ ID NO: 29329 - DNA, 5947 bp, Zea Mays
caacgctaaaaaaaccacccccagctccgttctcttccaagtggccagtgccgtctccggccaccgcccatggctatgccttcctccaccacggcggcgctctcccgcctcgtcgaccgcacccgggttccggaccccacactgcaacgccatgcggttggggccgtcttccgccacctcctctccctccccgcgcccctcccagcggccgcccacgacgccacctcagccctcctcgcttcgccccaccctgcagtcgccgcgcacgctgcggcctccatcgcccgtctcaccgccacccgccccgatctcctcccctcggatgtcgccctcccgctcctcatcgcgcccctcgcggcctcaccgtcccccctgctcgcctcctgcctcgtcaaggcagtctccgcgctcgcaacctgcgccctccgctccggctctcgcttcccggcccacgaccaccccttcatccaggcgctcgcgtcgggggctgacggcgctcgagcggagctgatgcggcaggcagccgggatggttgccgaccgggtggattgggtggtcaagtttctgaggccgttcgtgatgttctccgtggtgaggaagggggacgccgcatttgccagggatttgatcggtgcattggccgcagcagccgtggcagcagggaaggctagtgtcgcgatcccggttctgaagatgctccaagacagcatgctgcatttcggccgcggggacgatcaggaagtgcggctatggcttagttccgcagagtgtttggttgatgcttatgtcgtgctactgaggaagttagctcatggtcaaatgcctacatatgatgctcaagcaagtagtgcgacattgatggaaacactcctatcacaatattcatttcatcaaaaatttctgggaattgattcaacaatttttgggttatcaaaacatttattcttggtgcaaaaggatcttggattatgctatatacctgagatttctgttgtccttagctctctttcttactctctcactgggctagagtttgaacatgaacagctagctgccttgaaacttctgagctttttgattgattggaaatatgaaaatgtgcttgacagtaaagaacaaacacatcacgtcagtgtggagcttctctgtgttctggcagttatcaaccttaccatttcaccatccaaatctgtgaaagcagtggcatatcatgttctgtcaaggttcagcttgtttgttttagacttgccagcttctcattcatcagaggaacaagatatttcaacgagttaccacataagcaaacctgcacttcttcttcctaaacttttgcatcatctatggtccaagccatcttcatcatgcttcagttttatgaagtacatagctaccaaggcctcacctgattctggccagagtgacttggaagcaaattattggactcatcaaataaatgcctatctgacagcccttcacagagaaaagcatacattagatgtcaggtcttcaaaaacgacttcaggtcgagtagccatatcatctctgataagctctgtagcatctgttttggtaatgcatccaaaacttggtacttctgcagcagaatctttggccatgcttggcacatcggacccaagattgggtatgccactttttgtagttatcctcttctacagcaagattctatgcagcagcggtaaattttcagcggaaatctcgctcagtttgctagagtcattgccatcacttgctatacatggttttgttcttccactagctctgcaatggatatcgccaatgcttaaaagggactcaaattcggttttgtatgctatggctgttcgattactctgcaagatatgggctgtaaccgactgggcatttccaaacttacaagtggttctggatcctgagaatttttccaatttcatctctgacagagagatctctgcaagtattgccacatcaatacgcgatgtttgcaagcaaaatccagatagaggcgttgatataatattatctgtctctttttgtattgagagtcgtgattctgtggttcaagctcttggcctcgagagcctctcgtacctttgtgaagcagatgtggtcgatttctacacggcgtggaaagttatatcaaagcaggtgcttgattattacgttgagcctgctgttgctcacagtttgtgtattctgttgaggtgcggagcgatggatgctgaggcatattctgtaatatctggtaaccttgtaagaacattgtggagaattggaacatccaagaaaaataatcccgatccactctgggataaagcaagaggaactgcttttcactccttgtccaactacaaggtatcacttattcaagatgctattcctgatttctggaaactaaactatgagttctttacgaacgaacataatctggcagttctcaaggccatggagcaccttcaagatgagatcatcagatatgagcacataaatcgtcgtcgagtgactactgacaaaagaactgcagtgcataaatttgagaagctactggaggtttttcctcgggcggtatttaaagggatgttatctcatcatcagttgcctggtgctgctcttttaactctcaattttactccaaaggacatacttaatgaagggaaacctaaggatttgcctagagttcattccgcttttgagcaagcttttgtggaaattgctgaatctatgtatgtgtcaagaaacatagtggtagctcttcttgccttgcagtcatggaagtcatttgtttccaactggatgcaagcagttgtggcattgcttgacactaaagactcgtcaaagttgaacaaagcaatgaaagctgctaatgatatatttaagattctgtgcgaccaagttccggtgtctactcctcaagttgttgttaacatagctcttgttattggggcactggccttgattgttccgccaactgctcatttggtagtatcttcggtatcagattttcttttaaaatggttgcttcaatacgagcatgagcacaagcaatggtcagcagctctctctcttggattaatattcaattgttttcatcctacggacaaaaagagcagacttcaggttattaatgggtttcttgaggttatctcaaaaactgaaagctgtcttgtaaaaggagcttgtggactggcattaggctatgtttgccacggtcttttgacaagagcacataatgctgttgattcagaagtagaggctattacacaactcaatgagcgtgcatcagttgaggatattcttcatgctttggttaccttgttaattcaactatgtccatcctcatgctattctctgaagaagcttagtatatacggaatatcctccatgggagggatggaagaaaatattcatagcttcagtgatgatccttgggctgtcgctggacttgtcattggtctgggaaactctgttgttgctctgtatagacttggagcttatgaagcagttactgaagtcaaggatgtattgatatcatggataccaaatgttgattcgaactctgcattatttgatgaaatagattcagtatcactatgtatgggttcatgtcttgctcttccatctgttgtggctttttgccaaagagtggagctgttgaatgacgacttggatgcattgttcaatcgctacacttctttagcttctgagctcctgaacctcaataaatctgggattatctttcagaatttgttaatggcaatctgtattggtgctggatcttttctctcttctatattgaatgatggcgtgcatgctatggaatttaatggtgttaaaggctttctggacactctcagacatatatatacccacccttttcctccccttgttcatttgggaggcatgtttggtgtggtcaacgcttttggtgcaggtgcaggagatcttactggggtgttttcaaagcctatgacttctcaaatcaaacatgaggagtcatcttttgtgagtggttcattactgacaagtcctgttggtgagactctgtcaacatcaatgattcaggaaatatttcttcttgctaaggatgctaaggataagcacatacaagattatgctgcatgggctatttcatttctcagaagcaggtggtcgaagaatcagaatcagattctttatgaggacaatggttctaatagaagtcctgatgatcatgatcaagcttcaagtttttctgaacaaagcttagtttggaacttaagtctctggttgagtgatctaaaatttgaaaagtctggtgatgtggtgccaataagtacagttggaacagttttaaaatgcctttccaaagctccccgattgccaactacagactggggagctattgtacggaggtgcattaaagctgaggcgcagatttctcataagttaaccaatcaggaagatcctaagatactaaaggaggcatgcttatatttgactctagctcatgctgctcacataagtccccttctgcagtttttggatgatctgactgacatactcagattccagagattagatataaatgttcagtctattttgctcaaacatttgttacacctaatgaagctattctctgattcaagattggataaattgcatgaggattttaccgaatacttgtattcccccacttcttcatacttgaattactcatctgaacagaaaagcatgctaagaatgtcgttctgggaaggcatttatacgtgcctggtggatgtttctgaagaatctggtgttttttcattcattgaaaaatgcattcagtgcttgttgcctcttttgacgctccatagtgatggtcaacctgaattcatgaaagagtggtctgttgctatcttatgtcttacaaacgcccagaaaaaatggctggatgatattttgcagattcgcagtactgccttagtcaatgaaggacatgttgatgttgcaaaaaagattatcctcagagcaagattgtgtgcaactggttgtggttcaacacatgagctgggaaatataaagacagcaatattgtgtacaaaagctgatggtgtttggtggagtgtccttgttgagatcacttcagccttaaactcagccgaaaacatcatcaaaagacagtggcttctggatgcattagacattggctgtgttacagctcacccctcaacggtgctgtgttttgttggcttgctttgtggtagctgctgcatctatatgccgcttcttcttgttaattcgataaatgtactgagcgacttgccggtcaccctgcctgcctttctctccaccatcgtttctgatgatttcaggaactctgtggcagacaggctatggctgttgactactgacatctatacttgggctgaacaattagctcacggacacgatcaacctggacatgatcgtattcatagaagtgaaactgagattgcgacttttttggccaatattctgctctctacatgcattacagtcgaggactacctgtctgttgataagcggctaaagcttgcaaatcttgaagcactctaatcaaagggagatgtgtttcttttctattttatgtatgtatttatgtacggtatcagtcatgttttaatagttgatgtccctgctgatgatccagcaatgtttttttcatgtacataattaatttaactaactcatcttatgcactgaaaacaatctattgttcaaagatagatagacctatgaaataatattgttgtgtacactcactttgtcataccgccactgaacaatttaagagcagtcaccttacaatttgatgggagtaaacttctgaggtattaacagagattatctgagaccatagctgagatgtaaaagctcccatgcaagtttacttggattatgccataactgtaaatgagtctaatcgcaattacatttgccttgagctcag

SEQ ID NO: 29330 - DNA, 5942 bp, Zea Mays
cgctaaaaaaaccacccccagctccgttctcttccaagtggccagtgccgtctccggccaccgcccatggctatgccttcctccaccacggcggcgctctcccgcctcgtcgaccgcacccgggttccggaccccacactgcaacgccatgcggttggggccgtcttccgccacctcctctccctccccgcgcccctcccagcggccgcccacgacgccacctcagccctcctcgcttcgccccaccctgcagtcgccgcgcacgctgcggcctccatcgcccgtctcaccgccacccgccccgatctcctcccctcggatgtcgccctcccgctcctcatcgcgcccctcgcggcctcaccgtcccccctgctcgcctcctgcctcgtcaaggcagtctccgcgctcgcaacctgcgccctccgctccggctctcgcttcccggcccacgaccaccccttcatccaggcgctcgcgtcgggggctgacggcgctcgagcggagctgatgcggcaggcagccgggatggttgccgaccgggtggattgggtggtcaagtttctgaggccgttcgtgatgttctccgtggtgaggaagggggacgccgcatttgccagggatttgatcggtgcattggccgcagcagccgtggcagcagggaaggctagtgtcgcgatcccggttctgaagatgctccaagacagcatgctgcatttcggccgcggggacgatcaggaagtgcggctatggcttagttccgcagagtgtttggttgatgcttatgtcgtgctactgaggaagttagctcatggtcaaatgcctacatatgatgctcaagcaagtagtgcgacattgatggaaacactcctatcacaatattcatttcatcaaaaatttctgggaattgattcaacaatttttgggttatcaaaacatttattcttggtgcaaaaggatcttggattatgctatatacctgagatttctgttgtccttagctctctttcttactctctcactgggctagagtttgaacatgaacagctagctgccttgaaacttctgagctttttgattgattggaaatatgaaaatgtgcttgacagtaaagaacaaacacatcacgtcagtgtggagcttctctgtgttctggcagttatcaaccttaccatttcaccatccaaatctgtgaaagcagtggcatatcatgttctgtcaaggttcagcttgtttgttttagacttgccagcttctcattcatcagaggaacaagatatttcaacgagttaccacataagcaaacctgcacttcttcttcctaaacttttgcatcatctatggtccaagccatcttcatcatgcttcagttttatgaagtacatagctaccaaggcctcacctgattctggccagagtgacttggaagcaaattattggactcatcaaataaatgcctatctgacagcccttcacagagaaaagcatacattagatgtcaggtcttcaaaaacgacttcagccatatcatctctgataagctctgtagcatctgttttggtaatgcatccaaaacttggtacttctgcagcagaatctttggccatgcttggcacatcggacccaagattgggtatgccactttttgtagttatcctcttctacagcaagattctatgcagcagcggtaaattttcagcggaaatctcgctcagtttgctagagtcattgccatcacttgctatacatggttttgttcttccactagctctgcaatggatatcgccaatgcttaaaagggactcaaattcggttttgtatgctatggctgttcgattactctgcaagatatgggctgtaaccgactgggcatttccaaacttacaagtaagaagtggttctggatcctgagaatttttccaatttcatctctgacagagagatctctgcaagtattgccacatcaatacgcgatgtttgcaagcaaaatccagatagaggcgttgatataatattatctgtctctttttgtattgagagtcgtgattctgtggttcaagctcttggcctcgagagcctctcgtacctttgtgaagcagatgtggtcgatttctacacggcgtggaaagttatatcaaagcaggtgcttgattattacgttgagcctgctgttgctcacagtttgtgtattctgttgaggtgcggagcgatggatgctgaggcatattctgtaatatctggtaaccttgtaagaacattgtggagaattggaacatccaagaaaaataatcccgatccactctgggataaagcaagaggaactgcttttcactccttgtccaactacaaggtatcacttattcaagatgctattcctgatttctggaaactaaactatgagttctttacgaacgaacataatctggcagttctcaaggccatggagcaccttcaagatgagatcatcagatatgagcacataaatcgtcgtcgagtgactactgacaaaagaactgcagtgcataaatttgagaagctactggaggtttttcctcgggcggtatttaaagggatgttatctcatcatcagttgcctggtgctgctcttttaactctcaattttactccaaaggacatacttaatgaagggaaacctaaggatttgcctagagttcattccgcttttgagcaagcttttgtggaaattgctgaatctatgtatgtgtcaagaaacatagtggtagctcttcttgccttgcagtcatggaagtcatttgtttccaactggatgcaagcagttgtggcattgcttgacactaaagactcgtcaaagttgaacaaagcaatgaaagctgctaatgatatatttaagattctgtgcgaccaagttccggtgtctactcctcaagttgttgttaacatagctcttgttattggggcactggccttgattgttccgccaactgctcatttggtagtatcttcggtatcagattttcttttaaaatggttgcttcaatacgagcatgagcacaagcaatggtcagcagctctctctcttggattaatattcaattgttttcatcctacggacaaaaagagcagacttcaggttattaatgggtttcttgaggttatctcaaaaactgaaagctgtcttgtaaaaggagcttgtggactggcattaggctatgtttgccacggtcttttgacaagagcacataatgctgttgattcagaagtagaggctattacacaactcaatgagcgtgcatcagttgaggatattcttcatgctttggttaccttgttaattcaactatgtccatcctcatgctattctctgaagaagcttagtatatacggaatatcctccatgggagggatggaagaaaatattcatagcttcagtgatgatccttgggctgtcgctggacttgtcattggtctgggaaactctgttgttgctctgtatagacttggagcttatgaagcagttactgaagtcaaggatgtattgatatcatggataccaaatgttgattcgaactctgcattatttgatgaaatagattcagtatcactatgtatgggttcatgtcttgctcttccatctgttgtggctttttgccaaagagtggagctgttgaatgacgacttggatgcattgttcaatcgctacacttctttagcttctgagctcctgaacctcaataaatctgggattatctttcagaatttgttaatggcaatctgtattggtgctggatcttttctctcttctatattgaatgatggcgtgcatgctatggaatttaatggtgttaaaggctttctggacactctcagacatatatatacccacccttttcctccccttgttcatttgggaggcatgtttggtgtggtcaacgcttttggtgcaggtgcaggagatcttactggggtgttttcaaagcctatgacttctcaaatcaaacatgaggagtcatcttttgtgagtggttcattactgacaagtcctgttggtgagactctgtcaacatcaatgattcaggaaatatttcttcttgctaaggatgctaaggataagcacatacaagattatgctgcatgggctatttcatttctcagaagcaggtggtcgaagaatcagaatcagattctttatgaggacaatggttctaatagaagtcctgatgatcatgatcaagcttcaagtttttctgaacaaagcttagtttggaacttaagtctctggttgagtgatctaaaatttgaaaagtctggtgatgtggtgccaataagtacagttggaacagttttaaaatgcctttccaaagctccccgattgccaactacagactggggagctattgtacggaggtgcattaaagctgaggcgcagatttctcataagttaaccaatcaggaagatcctaagatactaaaggaggcatgcttatatttgactctagctcatgctgctcacataagtccccttctgcagtttttggatgatctgactgacatactcagattccagagattagatataaatgttcagtctattttgctcaaacatttgttacacctaatgaagctattctctgattcaagattggataaattgcatgaggattttaccgaatacttgtattcccccacttcttcatacttgaattactcatctgaacagaaaagcatgctaagaatgtcgttctgggaaggcatttatacgtgcctggtggatgtttctgaagaatctggtgttttttcattcattgaaaaatgcattcagtgcttgttgcctcttttgacgctccatagtgatggtcaacctgaattcatgaaagagtggtctgttgctatcttatgtcttacaaacgcccagaaaaaatggctggatgatattttgcagattcgcagtactgccttagtcaatgaaggacatgttgatgttgcaaaaaagattatcctcagagcaagattgtgtgcaactggttgtggttcaacacatgagctgggaaatataaagacagcaatattgtgtacaaaagctgatggtgtttggtggagtgtccttgttgagatcacttcagccttaaactcagccgaaaacatcatcaaaagacagtggcttctggatgcattagacattggctgtgttacagctcacccctcaacggtgctgtgttttgttggcttgctttgtggtagctgctgcatctatatgccgcttcttcttgttaattcgataaatgtactgagcgacttgccggtcaccctgcctgcctttctctccaccatcgtttctgatgatttcaggaactctgtggcagacaggctatggctgttgactactgacatctatacttgggctgaacaattagctcacggacacgatcaacctggacatgatcgtattcatagaagtgaaactgagattgcgacttttttggccaatattctgctctctacatgcattacagtcgaggactacctgtctgttgataagcggctaaagcttgcaaatcttgaagcactctaatcaaagggagatgtgtttcttttctattttatgtatgtatttatgtacggtatcagtcatgttttaatagttgatgtccctgctgatgatccagcaatgtttttttcatgtacataattaatttaactaactcatcttatgcactgaaaacaatctattgttcaaagatagatagacctatgaaataatattgttgtgtacactcactttgtcataccgccactgaacaatttaagagcagtcaccttacaatttgatgggagtaaacttctgaggtattaacagagattatctgagaccatagctgagatgtaaaagctcccatgcaagtttacttggattatgccataactgtaaatgagtctaatcgcaattacatttgccttgagctcag

SEQ ID NO: 29331 - DNA, 4855 bp, Zea Mays
cgctaaaaaaaccacccccagctccgttctcttccaagtggccagtgccgtctccggccaccgcccatggctatgccttcctccaccacggcggcgctctcccgcctcgtcgaccgcacccgggttccggaccccacactgcaacgccatgcggttggggccgtcttccgccacctcctctccctccccgcgcccctcccagcggccgcccacgacgccacctcagccctcctcgcttcgccccaccctgcagtcgccgcgcacgctgcggcctccatcgcccgtctcaccgccacccgccccgatctcctcccctcggatgtcgccctcccgctcctcatcgcgcccctcgcggcctcaccgtcccccctgctcgcctcctgcctcgtcaaggcagtctccgcgctcgcaacctgcgccctccgctccggctctcgcttcccggcccacgaccaccccttcatccaggcgctcgcgtcgggggctgacggcgctcgagcggagctgatgcggcaggcagccgggatggttgccgaccgggtggattgggtggtcaagtttctgaggccgttcgtgatgttctccgtggtgaggaagggggacgccgcatttgccagggatttgatcggtgcattggccgcagcagccgtggcagcagggaaggctagtgtcgcgatcccggttctgaagatgctccaagacagcatgctgcatttcggccgcggggacgatcaggaagtgcggctatggcttagttccgcagagtgtttggttgatgcttatgtcgtgctactgaggaagttagctcatggtcaaatgcctacatatgatgctcaagcaagtagtgcgacattgatggaaacactcctatcacaatattcatttcatcaaaaatttctgggaattgattcaacaatttttgggttatcaaaacatttattcttggtgcaaaaggatcttggattatgctatatacctgagatttctgttgtccttagctctctttcttactctctcactgggctagagtttgaacatgaacagctagctgccttgaaacttctgagctttttgattgattggaaatatgaaaatgtgcttgacagtaaagaacaaacacatcacgtcagtgtggagcttctctgtgttctggcagttatcaaccttaccatttcaccatccaaatctgtgaaagcagtggcatatcatgttctgtcaaggttcagcttgtttgttttagacttgccagcttctcattcatcagaggaacaagatatttcaacgagttaccacataagcaaacctgcacttcttcttcctaaacttttgcatcatctatggtccaagccatcttcatcatgcttcagttttatgaagtacatagctaccaaggcctcacctgattctggccagagtgacttggaagcaaattattggactcatcaaataaatgcctatctgacagcccttcacagagaaaagcatacattagatgtcaggtcttcaaaaacgacttcagtagccatatcatctctgataagctctgtagcatctgttttggtaatgcatccaaaacttggtacttctgcagcagaatctttggccatgcttggcacatcggacccaagattgggtatgccactttttgtagttatcctcttctacagcaagattctatgcagcagcggtaaattttcagcggaaatctcgattctgtgcgaccaagttccggtgtctactcctcaagttgttgttaacatagctcttgttattggggcactggccttgattgttccgccaactgctcatttggtagtatcttcggtatcagattttcttttaaaatggttgcttcaatacgagcatgagcacaagcaatggtcagcagctctctctcttggattaatattcaattgttttcatcctacggacaaaaagagcagacttcaggttattaatgggtttcttgaggttatctcaaaaactgaaagctgtcttgtaaaaggagcttgtggactggcattaggctatgtttgccacggtcttttgacaagagcacataatgctgttgattcagaagtagaggctattacacaactcaatgagcgtgcatcagttgaggatattcttcatgctttggttaccttgttaattcaactatgtccatcctcatgctattctctgaagaagcttagtatatacggaatatcctccatgggagggatggaagaaaatattcatagcttcagtgatgatccttgggctgtcgctggacttgtcattggtctgggaaactctgttgttgctctgtatagacttggagcttatgaagcagttactgaagtcaaggatgtattgatatcatggataccaaatgttgattcgaactctgcattatttgatgaaatagattcagtatcactatgtatgggttcatgtcttgctcttccatctgttgtggctttttgccaaagagtggagctgttgaatgacgacttggatgcattgttcaatcgctacacttctttagcttctgagctcctgaacctcaataaatctgggattatctttcagaatttgttaatggcaatctgtattggtgctggatcttttctctcttctatattgaatgatggcgtgcatgctatggaatttaatggtgttaaaggctttctggacactctcagacatatatatacccacccttttcctccccttgttcatttgggaggcatgtttggtgtggtcaacgcttttggtgcaggtgcaggagatcttactggggtgttttcaaagcctatgacttctcaaatcaaacatgaggtttccttcatacatcttaacacttaatgttctgtaaaattgttagaataatctatttagttgtgtgcacaggagtcatcttttgtgagtggttcattactgacaagtcctgttggtgagactctgtcaacatcaatgattcaggaaatatttcttcttgctaaggatgctaaggataagcacatacaagattatgctgcatgggctatttcatttctcagaagcaggtggtcgaagaatcagaatcagattctttatgaggacaatggttctaatagaagtcctgatgatcatgatcaagcttcaagtttttctgaacaaagcttagtttggaacttaagtctctggttgagtgatctaaaatttgaaaagtctggtgatgtggtgccaataagtacagttggaacagttttaaaatgcctttccaaagctccccgattgccaactacagactggggagctattgtacggaggtgcattaaagctgaggcgcagatttctcataagttaaccaatcaggaagatcctaagatactaaaggaggcatgcttatatttgactctagctcatgctgctcacataagtccccttctgcagtttttggatgatctgactgacatactcagattccagagattagatataaatgttcagtctattttgctcaaacatttgttacacctaatgaagctattctctgattcaagattggataaattgcatgaggattttaccgaatacttgtattcccccacttcttcatacttgaattactcatctgaacagaaaagcatgctaagaatgtcgttctgggaaggcatttatacgtgcctggtggatgtttctgaagaatctggtgttttttcattcattgaaaaatgcattcagtgcttgttgcctcttttgacgctccatagtgatggtcaacctgaattcatgaaagagtggtctgttgctatcttatgtcttacaaacgcccagaaaaaatggctggatgatattttgcagattcgcagtactgccttagtcaatgaaggacatgttgatgttgcaaaaaagattatcctcagagcaagattgtgtgcaactggttgtggttcaacacatgagctgggaaatataaagacagcaatattgtgtacaaaagctgatggtgtttggtggagtgtccttgttgagatcacttcagccttaaactcagccgaaaacatcatcaaaagacagtggcttctggatgcattagacattggctgtgttacagctcacccctcaacggtgctgtgttttgttggcttgctttgtggtagctgctgcatctatatgccgcttcttcttgttaattcgataaatgtactgagcgacttgccggtcaccctgcctgcctttctctccaccatcgtttctgatgatttcaggaactctgtggcagacaggctatggctgttgactactgacatctatacttgggctgaacaattagctcacggacacgatcaacctggacatgatcgtattcatagaagtgaaactgagattgcgacttttttggccaatattctgctctctacatgcattacagtcgaggactacctgtctgttgataagcggctaaagcttgcaaatcttgaagcactctaatcaaagggagatgtgtttcttttctattttatgtatgtatttatgtacggtatcagtcatgttttaatagttgatgtccctgctgatgatccagcaatgtttttttcatgtacataattaatttaactaactcatcttatgcactgaaaacaatctattgttcaaagatagatagacctatgaaataatattgttgtgtacactcactttgtcataccgccactgaacaatttaagagcagtcaccttacaatttgatgggagtaaacttctgaggtattaacagagattatctgagaccatagctgagatgtaaaagctcccatgcaagtttacttggattatgccataactgtaaatgagtctaatcgcaattacatttgccttgagctcag

SEQ ID NO: 29332 - DNA, 5915 bp, Zea Mays
cgctaaaaaaaccacccccagctccgttctcttccaagtggccagtgccgtctccggccaccgcccatggctatgccttcctccaccacggcggcgctctcccgcctcgtcgaccgcacccgggttccggaccccacactgcaacgccatgcggttggggccgtcttccgccacctcctctccctccccgcgcccctcccagcggccgcccacgacgccacctcagccctcctcgcttcgccccaccctgcagtcgccgcgcacgctgcggcctccatcgcccgtctcaccgccacccgccccgatctcctcccctcggatgtcgccctcccgctcctcatcgcgcccctcgcggcctcaccgtcccccctgctcgcctcctgcctcgtcaaggcagtctccgcgctcgcaacctgcgccctccgctccggctctcgcttcccggcccacgaccaccccttcatccaggcgctcgcgtcgggggctgacggcgctcgagcggagctgatgcggcaggcagccgggatggttgccgaccgggtggattgggtggtcaagtttctgaggccgttcgtgatgttctccgtggtgaggaagggggacgccgcatttgccagggatttgatcggtgcattggccgcagcagccgtggcagcagggaaggctagtgtcgcgatcccggttctgaagatgctccaagacagcatgctgcatttcggccgcggggacgatcaggaagtgcggctatggcttagttccgcagagtgtttggttgatgcttatgtcgtgctactgaggaagttagctcatggtcaaatgcctacatatgatgctcaagcaagtagtgcgacattgatggaaacactcctatcacaatattcatttcatcaaaaatttctgggaattgattcaacaatttttgggttatcaaaacatttattcttggtgcaaaaggatcttggattatgctatatacctgagatttctgttgtccttagctctctttcttactctctcactgggctagagtttgaacatgaacagctagctgccttgaaacttctgagctttttgattgattggaaatatgaaaatgtgcttgacagtaaagaacaaacacatcacgtcagtgtggagcttctctgtgttctggcagttatcaaccttaccatttcaccatccaaatctgtgaaagcagtggcatatcatgttctgtcaaggttcagcttgtttgttttagacttgccagcttctcattcatcagaggaacaagatatttcaacgagttaccacataagcaaacctgcacttcttcttcctaaacttttgcatcatctatggtccaagccatcttcatcatgcttcagttttatgaagtacatagctaccaaggcctcacctgattctggccagagtgacttggaagcaaattattggactcatcaaataaatgcctatctgacagcccttcacagagaaaagcatacattagatgtcaggtcttcaaaaacgacttcagtagccatatcatctctgataagctctgtagcatctgttttggtaatgcatccaaaacttggtacttctgcagcagaatctttggccatgcttggcacatcggacccaagattgggtatgccactttttgtagttatcctcttctacagcaagattctatgcagcagcgctcagtttgctagagtcattgccatcacttgctatacatggttttgttcttccactagctctgcaatggatatcgccaatgcttaaaagggactcaaattcggttttgtatgctatggctgttcgattactctgcaagatatgggctgtaaccgactgggcatttccaaacttacaagtggttctggatcctgagaatttttccaatttcatctctgacagagagatctctgcaagtattgccacatcaatacgcgatgtttgcaagcaaaatccagatagaggcgttgatataatattatctgtctctttttgtattgagagtcgtgattctgtggttcaagctcttggcctcgagagcctctcgtacctttgtgaagcagatgtggtcgatttctacacggcgtggaaagttatatcaaagcaggtgcttgattattacgttgagcctgctgttgctcacagtttgtgtattctgttgaggtgcggagcgatggatgctgaggcatattctgtaatatctggtaaccttgtaagaacattgtggagaattggaacatccaagaaaaataatcccgatccactctgggataaagcaagaggaactgcttttcactccttgtccaactacaaggtatcacttattcaagatgctattcctgatttctggaaactaaactatgagttctttacgaacgaacataatctggcagttctcaaggccatggagcaccttcaagatgagatcatcagatatgagcacataaatcgtcgtcgagtgactactgacaaaagaactgcagtgcataaatttgagaagctactggaggtttttcctcgggcggtatttaaagggatgttatctcatcatcagttgcctggtgctgctcttttaactctcaattttactccaaaggacatacttaatgaagggaaacctaaggatttgcctagagttcattccgcttttgagcaagcttttgtggaaattgctgaatctatgtatgtgtcaagaaacatagtggtagctcttcttgccttgcagtcatggaagtcatttgtttccaactggatgcaagcagttgtggcattgcttgacactaaagactcgtcaaagttgaacaaagcaatgaaagctgctaatgatatatttaagattctgtgcgaccaagttccggtgtctactcctcaagttgttgttaacatagctcttgttattggggcactggccttgattgttccgccaactgctcatttggtagtatcttcggtatcagattttcttttaaaatggttgcttcaatacgagcatgagcacaagcaatggtcagcagctctctctcttggattaatattcaattgttttcatcctacggacaaaaagagcagacttcaggttattaatgggtttcttgaggttatctcaaaaactgaaagctgtcttgtaaaaggagcttgtggactggcattaggctatgtttgccacggtcttttgacaagagcacataatgctgttgattcagaagtagaggctattacacaactcaatgagcgtgcatcagttgaggatattcttcatgctttggttaccttgttaattcaactatgtccatcctcatgctattctctgaagaagcttagtatatacggaatatcctccatgggagggatggaagaaaatattcatagcttcagtgatgatccttgggctgtcgctggacttgtcattggtctgggaaactctgttgttgctctgtatagacttggagcttatgaagcagttactgaagtcaaggatgtattgatatcatggataccaaatgttgattcgaactctgcattatttgatgaaatagattcagtatcactatgtatgggttcatgtcttgctcttccatctgttgtggctttttgccaaagagtggagctgttgaatgacgacttggatgcattgttcaatcgctacacttctttagcttctgagctcctgaacctcaataaatctgggattatctttcagaatttgttaatggcaatctgtattggtgctggatcttttctctcttctatattgaatgatggcgtgcatgctatggaatttaatggtgttaaaggctttctggacactctcagacatatatatacccacccttttcctccccttgttcatttgggaggcatgtttggtgtggtcaacgcttttggtgcaggtgcaggagatcttactggggtgttttcaaagcctatgacttctcaaatcaaacatgaggagtcatcttttgtgagtggttcattactgacaagtcctgttggtgagactctgtcaacatcaatgattcaggaaatatttcttcttgctaaggatgctaaggataagcacatacaagattatgctgcatgggctatttcatttctcagaagcaggtggtcgaagaatcagaatcagattctttatgaggacaatggttctaatagaagtcctgatgatcatgatcaagcttcaagtttttctgaacaaagcttagtttggaacttaagtctctggttgagtgatctaaaatttgaaaagtctggtgatgtggtgccaataagtacagttggaacagttttaaaatgcctttccaaagctccccgattgccaactacagactggggagctattgtacggaggtgcattaaagctgaggcgcagatttctcataagttaaccaatcaggaagatcctaagatactaaaggaggcatgcttatatttgactctagctcatgctgctcacataagtccccttctgcagtttttggatgatctgactgacatactcagattccagagattagatataaatgttcagtctattttgctcaaacatttgttacacctaatgaagctattctctgattcaagattggataaattgcatgaggattttaccgaatacttgtattcccccacttcttcatacttgaattactcatctgaacagaaaagcatgctaagaatgtcgttctgggaaggcatttatacgtgcctggtggatgtttctgaagaatctggtgttttttcattcattgaaaaatgcattcagtgcttgttgcctcttttgacgctccatagtgatggtcaacctgaattcatgaaagagtggtctgttgctatcttatgtcttacaaacgcccagaaaaaatggctggatgatattttgcagattcgcagtactgccttagtcaatgaaggacatgttgatgttgcaaaaaagattatcctcagagcaagattgtgtgcaactggttgtggttcaacacatgagctgggaaatataaagacagcaatattgtgtacaaaagctgatggtgtttggtggagtgtccttgttgagatcacttcagccttaaactcagccgaaaacatcatcaaaagacagtggcttctggatgcattagacattggctgtgttacagctcacccctcaacggtgctgtgttttgttggcttgctttgtggtagctgctgcatctatatgccgcttcttcttgttaattcgataaatgtactgagcgacttgccggtcaccctgcctgcctttctctccaccatcgtttctgatgatttcaggaactctgtggcagacaggctatggctgttgactactgacatctatacttgggctgaacaattagctcacggacacgatcaacctggacatgatcgtattcatagaagtgaaactgagattgcgacttttttggccaatattctgctctctacatgcattacagtcgaggactacctgtctgttgataagcggctaaagcttgcaaatcttgaagcactctaatcaaagggagatgtgtttcttttctattttatgtatgtatttatgtacggtatcagtcatgttttaatagttgatgtccctgctgatgatccagcaatgtttttttcatgtacataattaatttaactaactcatcttatgcactgaaaacaatctattgttcaaagatagatagacctatgaaataatattgttgtgtacactcactttgtcataccgccactgaacaatttaagagcagtcaccttacaatttgatgggagtaaacttctgaggtattaacagagattatctgagaccatagctgagatgtaaaagctcccatgcaagtttacttggattatgccataactgtaaatgagtctaatcgcaattacatttgccttgagctcag

SEQ ID NO: 29333 - DNA, 5938 bp, Zea Mays
cgctaaaaaaaccacccccagctccgttctcttccaagtggccagtgccgtctccggccaccgcccatggctatgccttcctccaccacggcggcgctctcccgcctcgtcgaccgcacccgggttccggaccccacactgcaacgccatgcggttggggccgtcttccgccacctcctctccctccccgcgcccctcccagcggccgcccacgacgccacctcagccctcctcgcttcgccccaccctgcagtcgccgcgcacgctgcggcctccatcgcccgtctcaccgccacccgccccgatctcctcccctcggatgtcgccctcccgctcctcatcgcgcccctcgcggcctcaccgtcccccctgctcgcctcctgcctcgtcaaggcagtctccgcgctcgcaacctgcgccctccgctccggctctcgcttcccggcccacgaccaccccttcatccaggcgctcgcgtcgggggctgacggcgctcgagcggagctgatgcggcaggcagccgggatggttgccgaccgggtggattgggtggtcaagtttctgaggccgttcgtgatgttctccgtggtgaggaagggggacgccgcatttgccagggatttgatcggtgcattggccgcagcagccgtggcagcagggaaggctagtgtcgcgatcccggttctgaagatgctccaagacagcatgctgcatttcggccgcggggacgatcaggaagtgcggctatggcttagttccgcagagtgtttggttgatgcttatgtcgtgctactgaggaagttagctcatggtcaaatgcctacatatgatgctcaagcaagtagtgcgacattgatggaaacactcctatcacaatattcatttcatcaaaaatttctgggaattgattcaacaatttttgggttatcaaaacatttattcttggtgcaaaaggatcttggattatgctatatacctgagatttctgttgtccttagctctctttcttactctctcactgggctagagtttgaacatgaacagctagctgccttgaaacttctgagctttttgattgattggaaatatgaaaatgtgcttgacagtaaagaacaaacacatcacgtcagtgtggagcttctctgtgttctggcagttatcaaccttaccatttcaccatccaaatctgtgaaagcagtggcatatcatgttctgtcaaggttcagcttgtttgttttagacttgccagcttctcattcatcagaggaacaagatatttcaacgagttaccacataagcaaacctgcacttcttcttcctaaacttttgcatcatctatggtccaagccatcttcatcatgcttcagttttatgaagtacatagctaccaaggcctcacctgattctggccagagtgacttggaagcaaattattggactcatcaaataaatgcctatctgacagcccttcacagagaaaagcatacattagatgtcaggtcttcaaaaacgacttcagtagccatatcatctctgataagctctgtagcatctgttttggtaatgcatccaaaacttggtacttctgcagcagaatctttggccatgcttggcacatcggacccaagattgggtatgccactttttgtagttatcctcttctacagcaagattctatgcagcagcggtaaattttcagcggaaatctcgctcagtttgctagagtcattgccatcacttgctatacatggttttgttcttccactagctctgcaatggatatcgccaatgcttaaaagggactcaaattcggttttgtatgctatggctgttcgattactctgcaagatatgggctgtaaccgactgggcatttccaaacttacaagtggttctggatcctgagaatttttccaatttcatctctgacagagagatctctgcaagtattgccacatcaatacgcgatgtttgcaagcaaaatccagatagaggcgttgatataatattatctgtctctttttgtattgagagtcgtgattctgtggttcaagctcttggcctcgagagcctctcgtacctttgtgaagcagatgtggtcgatttctacacggcgtggaaagttatatcaaagcaggtgcttgattattacgttgagcctgctgttgctcacagtttgtgtattctgttgaggtgcggagcgatggatgctgaggcatattctgtaatatctggtaaccttgtaagaacattgtggagaattggaacatccaagaaaaataatcccgatccactctgggataaagcaagaggaactgcttttcactccttgtccaactacaaggtatcacttattcaagatgctattcctgatttctggaaactaaactatgagttctttacgaacgaacataatctggcagttctcaaggccatggagcaccttcaagatgagatcatcagatatgagcacataaatcgtcgtcgagtgactactgacaaaagaactgcagtgcataaatttgagaagctactggaggtttttcctcgggcggtatttaaagggatgttatctcatcatcagttgcctggtgctgctcttttaactctcaattttactccaaaggacatacttaatgaagggaaacctaaggatttgcctagagttcattccgcttttgagcaagcttttgtggaaattgctgaatctatgtatgtgtcaagaaacatagtggtagctcttcttgccttgcagtcatggaagtcatttgtttccaactggatgcaagcagttgtggcattgcttgacactaaagactcgtcaaagttgaacaaagcaatgaaagctgctaatgatatatttaagattctgtgcgaccaagttccggtgtctactcctcaagttgttgttaacatagctcttgttattggggcactggccttgattgttccgccaactgctcatttggtagtatcttcggtatcagattttcttttaaaatggttgcttcaatacgagcatgagcacaagcaatggtcagcagctctctctcttggattaatattcaattgttttcatcctacggacaaaaagagcagacttcaggttattaatgggtttcttgaggttatctcaaaaactgaaagctgtcttgtaaaaggagcttgtggactggcattaggctatgtttgccacggtcttttgacaagagcacataatgctgttgattcagaagtagaggctattacacaactcaatgagcgtgcatcagttgaggatattcttcatgctttggttaccttgttaattcaactatgtccatcctcatgctattctctgaagaagcttagtatatacggaatatcctccatgggagggatggaagaaaatattcatagcttcagtgatgatccttgggctgtcgctggacttgtcattggtctgggaaactctgttgttgctctgtatagacttggagcttatgaagcagttactgaagtcaaggatgtattgatatcatggataccaaatgttgattcgaactctgcattatttgatgaaatagattcagtatcactatgtatgggttcatgtcttgctcttccatctgttgtggctttttgccaaagagtggagctgttgaatgacgacttggatgcattgttcaatcgctacacttctttagcttctgagctcctgaacctcaataaatctgggattatctttcagaatttgttaatggcaatctgtattggtgctggatcttttctctcttctatattgaatgatggcgtgcatgctatggaatttaatggtgttaaaggctttctggacactctcagacatatatatacccacccttttcctccccttgttcatttgggaggcatgtttggtgtggtcaacgcttttggtgcaggtgcaggagatcttactggggtgttttcaaagcctatgacttctcaaatcaaacatgaggagtcatcttttgtgagtggttcattactgacaagtcctgttggtgagactctgtcaacatcaatgattcaggaaatatttcttcttgctaaggatgctaaggataagcacatacaagattatgctgcatgggctatttcatttctcagaagcaggtggtcgaagaatcagaatcagattctttatgaggacaatggttctaatagaagtcctgatgatcatgatcaagcttcaagtttttctgaacaaagcttagtttggaacttaagtctctggttgagtgatctaaaatttgaaaagtctggtgatgtggtgccaataagtacagttggaacagttttaaaatgcctttccaaagctccccgattgccaactacagactggggagctattgtacggaggtgcattaaagctgaggcgcagatttctcataagttaaccaatcaggaagatcctaagatactaaaggaggcatgcttatatttgactctagctcatgctgctcacataagtccccttctgcagtttttggatgatctgactgacatactcagattccagagattagatataaatgttcagtctattttgctcaaacatttgttacacctaatgaagctattctctgattcaagattggataaattgcatgaggattttaccgaatacttgtattcccccacttcttcatacttgaattactcatctgaacagaaaagcatgctaagaatgtcgttctgggaaggcatttatacgtgcctggtggatgtttctgaagaatctggtgttttttcattcattgaaaaatgcattcagtgcttgttgcctcttttgacgctccatagtgatggtcaacctgaattcatgaaagagtggtctgttgctatcttatgtcttacaaacgcccagaaaaaatggctggatgatattttgcagattcgcagtactgccttagtcaatgaaggacatgttgatgttgcaaaaaagattatcctcagagcaagattgtgtgcaactggttgtggttcaacacatgagctgggaaatataaagacagcaatattgtgtacaaaagctgatggtgtttggtggagtgtccttgttgagatcacttcagccttaaactcagccgaaaacatcatcaaaagacagtggcttctggatgcattagacattggctgtgttacagctcacccctcaacggtgctgtgttttgttggcttgctttgtggtagctgctgcatctatatgccgcttcttcttgttaattcgataaatgtactgagcgacttgccggtcaccctgcctgcctttctctccaccatcgtttctgatgatttcaggaactctgtggcagacaggctatggctgttgactactgacatctatacttgggctgaacaattagctcacggacacgatcaacctggacatgatcgtattcatagaagtgaaactgagattgcgacttttttggccaatattctgctctctacatgcattacagtcgaggactacctgtctgttgataagcggctaaagcttgcaaatcttgaagcactctaatcaaagggagatgtgtttcttttctattttatgtatgtatttatgtacggtatcagtcatgttttaatagttgatgtccctgctgatgatccagcaatgtttttttcatgtacataattaatttaactaactcatcttatgcactgaaaacaatctattgttcaaagatagatagacctatgaaataatattgttgtgtacactcactttgtcataccgccactgaacaatttaagagcagtcaccttacaatttgatgggagtaaacttctgaggtattaacagagattatctgagaccatagctgagatgtaaaagctcccatgcaagtttacttggattatgccataactgtaaatgagtctaatcgcaattacatttgccttgagctcag

SEQ ID NO: 29334 - DNA, 2547 bp, Zea Mays
ccagctccgttctcttccaagtggccagtgccgtctccggccaccgcccatggctatgccttcctccaccacggcggcgctctcccgcctcgtcgaccgcacccgggttccggaccccacactgcaacgccatgcggttggggccgtcttccgccacctcctctccctccccgcgcccctcccagcggccgcccacgacgccacctcagccctcctcgcttcgccccaccctgcagtcgccgcgcacgctgcggcctccatcgcccgtctcaccgccacccgccccgatctcctcccctcggatgtcgccctcccgctcctcatcgcgcccctcgcggcctcaccgtcccccctgctcgcctcctgcctcgtcaaggcagtctccgcgctcgcaacctgcgccctccgctccggctctcgcttcccggcccacgaccaccccttcatccaggcgctcgcgtcgggggctgacggcgctcgagcggagctgatgcggcaggcagccgggatggttgccgaccgggtggattgggtggtcaagtttctgaggccgttcgtgatgttctccgtggtgaggaagggggacgccgcatttgccagggatttgatcggtgcattggccgcagcagccgtggcagcagggaaggctagtgtcgcgatcccggttctgaagatgctccaagacagcatgctgcatttcggccgcggggacgatcaggaagtgcggctatggcttagttccgcagagtgtttggttgatgcttatgtcgtgctactgaggaagttagctcatggtcaaatgcctacatatgatgctcaagcaagtagtgcgacattgatggaaacactcctatcacaatattcatttcatcaaaaatttctgggaattgattcaacaatttttgggttatcaaaacatttattcttggtgcaaaaggatcttggattatgctatatacctgagatttctgttgtccttagctctctttcttactctctcactgggctagagtttgaacatgaacagctagctgccttgaaacttctgagctttttgattgattggaaatatgaaaatggtacattcccaaatattcataatcacaagcgctctgtaaatttccaaatccaactgctggaggggctaggaacttggttctcttatttttctaatcttaagctactgtgttttgtttcataccaataatcttaagcatggaatgggtatcatctttctcttcactaaatttgatgagagttttggtttgctttgcatgtaatagtccacctggagaaggtttgcagcatacaaatcatttgggctgaataaaatcataatttttagagggatatctatctatattttcaatgcaaaccctgaccatatcattcatatatttgtcacttcatgtcttcatgtatgtgtttcttgtgggctggacaaaaatcaatgaaactcaaattaaactgggtgcacactgatatgatagatatgctagacaaaaatctcttcagagattaaatagcatacttgttagcagtaaatttttagatttttatgacaaacgttgaaacataccatgaccattaacatttggaaccaaaaggcatatttgaatacagaggaagtgatgtttagttcaatccttttataggatgtgcagtcaatctaaccttacttttgttaccattgacatggcatacaatgcctgtcaattattatcattgtaaagtttcatatatgtgtatggctgcagtgcttgacagtaaagaacaaacacatcacgtcagtgtggagcttctctgtgttctggcagttatcaaccttaccatttcaccatccaaatctgtgaaagcagtggcatatcatgttctgtcaaggttcagcttgtttgttttagacttgccagcttctcattcatcagaggaacaagatatttcaacgagttaccacataagcaaacctgcacttcttcttcctaaacttttgcatcatctatggtccaagccatcttcatcatgcttcagttttatgaagtacatagctaccaaggcctcacctgattctggccagagtgacttggaagcaaattattggactcatcaaataaatgcctatctgacagcccttcacagagaaaagcatacattagatgtcaggtcttcaaaaacgacttcagtagccatatcatctctgataagctctgtagcatctgttttggtaatgcatccaaaacttggtacttctgcagcagaatctttggccatgcttggcacatcggacccaagattgggtatgccactttttgtagttatcctcttctacagcaagattctatgcagcagcggtaaattttcagcggaaatctcgcaacacaaacatcgtcatatattgcaaaaagattagagtatatgtcatgtcttttggaagaaaacacggcaccaggtttaagctgttcttctttgttagcgtattttgtattctatcactgtaatgggccttggcccatgtacttggatatatattaatatatctcctacccaatt

SEQ ID NO: 29335 - DNA, 3162 bp, Zea Mays
atggctatgccttcctccaccacggcggcgctctcccgcctcgtcgaccgcacccgggttccggaccccacactgcaacgccatgcggttggggccgtcttccgccacctcctctccctccccgcgcccctcccagcggccgcccacgacgccacctcagccctcctcgcttcgccccaccctgcagtcgccgcgcacgctgcggcctccatcgcccgtctcaccgccacccgccccgatctcctcccctcggatgtcgccctcccgctcctcatcgcgcccctcgcggcctcaccgtcccccctgctcgcctcctgcctcgtcaaggcagtctccgcgctcgcaacctgcgccctccgctccggctctcgcttcccggcccacgaccaccccttcatccaggcgctcgcgtcgggggctgacggcgctcgagcggagctgatgcggcaggcagccgggatggttgccgaccgggtggattgggtggtcaagtttctgaggccgttcgtgatgttctccgtggtgaggaagggggacgccgcatttgccagggatttgatcggtgcattggccgcagcagccgtggcagcagggaaggctagtgtcgcgatcccggttctgaagatgctccaagacagcatgctgcatttcggccgcggggacgatcaggaagtgcggctatggcttagttccgcagagtgtttggttgatgcttatgtcgtgctactgaggaagttagctcatggtcaaatgatttgcagtggtatactcctgcatggtgtgatattatggtgttattacatcatttctttgcctacatatgatgctcaagcaagtagtgcgacattgatggaaacactcctatcacaatattcatttcatcaaaaatttctgggaattgattcaacaatttttgggttatcaaaacatttattcttggtgcaaaaggatcttggattatgctatatacctgagatttctgttgtccttagctctctttcttactctctcactgggctagagtttgaacatgaacagctagctgccttgaaacttctgagctttttgattgattggaaatatgaaaatgtgcttgacagtaaagaacaaacacatcacgtcagtgtggagcttctctgtgttctggcagttatcaaccttaccatttcaccatccaaatctgtgaaagcagtggcatatcatgttctgtcaaggttcagcttgtttgttttagacttgccagcttctcattcatcagaggaacaagatatttcaacgagttaccacataagcaaacctgcacttcttcttcctaaacttttgcatcatctatggtccaagccatcttcatcatgcttcagttttatgaagtacatagctaccaaggcctcacctgattctggccagagtgacttggaagcaaattattggactcatcaaataaatgcctatctgacagcccttcacagagaaaagcatacattagatgtcaggtcttcaaaaacgacttcagtagccatatcatctctgataagctctgtagcatctgttttggtaatgcatccaaaacttggtacttctgcagcagaatctttggccatgcttggcacatcggacccaagattgggtatgccactttttgtagttatcctcttctacagcaagattctatgcagcagcggtaaattttcagcggaaatctcgctcagtttgctagagtcattgccatcacttgctatacatggttttgttcttccactagctctgcaatggatatcgccaatgcttaaaagggactcaaattcggttttgtatgctatggctgttcgattactctgcaagatatgggctgtaaccgactgggcatttccaaacttacaagtggttctggatcctgagaatttttccaatttcatctctgacagagagatctctgcaagtattgccacatcaatacgcgatgtttgcaagcaaaatccagatagaggcgttgatataatattatctgtctctttttgtattgagagtcgtgattctgtggttcaagctcttggcctcgagagcctctcgtacctttgtgaagcagatgtggtcgatttctacacggcgtggaaagttatatcaaagcaggtgcttgattattacgttgagcctgctgttgctcacagtttgtgtattctgttgaggtgcggagcgatggatgctgaggcatattctgtaatatctggtaaccttgtaagaacattgtggagaattggaacatccaagaaaaataatcccgatccactctgggataaagcaagaggaactgcttttcactccttgtccaactacaaggtatcacttattcaagatgctattcctgatttctggaaactaaactatgagttctttacgaacgaacataatctggcagttctcaaggccatggagcaccttcaagatgagatcatcagatatgagcacataaatcgtcgtcgagtgactactgacaaaagaactgcagtgcataaatttgagaagctactggaggtttttcctcgggcggtatttaaagggatgttatctcatcatcagttgcctggtgctgctcttttaactctcaattttactccaaaggacatacttaatgaagggaaacctaaggatttgcctagagttcattccgcttttgagcaagcttttgtggaaattgctgaatctatgtatgtgtcaagaaacatagtggtagctcttcttgccttgcagtcatggaagtcatttgtttccaactggatgcaagcagttgtggcattgcttgacactaaagactcgtcaaagttgaacaaagcaatgaaagctgctaatgatatatttaagattctgtgcgaccaagttccggtgtctactcctcaagttgttgttaacatagctcttgttattggggcactggccttgattgttccgccaactgctcatttggtagtatcttcggtatcagattttcttttaaaatggttgcttcaatacgagcatgagcacaagcaatggtcagcagctctctctcttggattaatattcaattgttttcatcctacggacaaaaagagcagacttcaggttattaatgggtttcttgagtgaaacaatgttcatgatgctggaaggtggagcaggaccagt

SEQ ID NO: 29336 - DNA, 4515 bp, Zea Mays
atccttgtgtccatagtccttgccctagactgcaacacacaggtcttctcgagctcagactacacctctctaggggtcttgtaggttgaaactactgttgactcgtgacttcttgagtcatgggggtcatgaggaaaccgatgacttgctgcacaagcgccgcccactgggtgtactccagattgggttcccctgatgaattgtcacatttcctgctcagtttgctagagtcattgccatcacttgctatacatggttttgttcttccactagctctgcaatggatatcgccaatgcttaaaagggactcaaattcggttttgtatgctatggctgttcgattactctgcaagatatgggctgtaaccgactgggcatttccaaacttacaagtggttctggatcctgagaatttttccaatttcatctctgacagagagatctctgcaagtattgccacatcaatacgcgatgtttgcaagcaaaatccagatagaggcgttgatataatattatctgtctctttttgtattgagagtcgtgattctgtggttcaagctcttggcctcgagagcctctcgtacctttgtgaagcagatgtggtcgatttctacacggcgtggaaagttatatcaaagcaggtgcttgattattacgttgagcctgctgttgctcacagtttgtgtattctgttgaggtgcggagcgatggatgctgaggcatattctgtaatatctggtaaccttgtaagaacattgtggagaattggaacatccaagaaaaataatcccgatccactctgggataaagcaagaggaactgcttttcactccttgtccaactacaaggtatcacttattcaagatgctattcctgatttctggaaactaaactatgagttctttacgaacgaacataatctggcagttctcaaggccatggagcaccttcaagatgagatcatcagatatgagcacataaatcgtcgtcgagtgactactgacaaaagaactgcagtgcataaatttgagaagctactggaggtttttcctcgggcggtatttaaagggatgttatctcatcatcagttgcctggtgctgctcttttaactctcaattttactccaaaggacatacttaatgaagggaaacctaaggatttgcctagagttcattccgcttttgagcaagcttttgtggaaattgctgaatctatgtatgtgtcaagaaacatagtggtagctcttcttgccttgcagtcatggaagtcatttgtttccaactggatgcaagcagttgtggcattgcttgacactaaagactcgtcaaagttgaacaaagcaatgaaagctgctaatgatatatttaagattctgtgcgaccaagttccggtgtctactcctcaagttgttgttaacatagctcttgttattggggcactggccttgattgttccgccaactgctcatttggtagtatcttcggtatcagattttcttttaaaatggttgcttcaatacgagcatgagcacaagcaatggtcagcagctctctctcttggattaatattcaattgttttcatcctacggacaaaaagagcagacttcaggttattaatgggtttcttgaggttatctcaaaaactgaaagctgtcttgtaaaaggagcttgtggactggcattaggctatgtttgccacggtcttttgacaagagcacataatgctgttgattcagaagtagaggctattacacaactcaatgagcgtgcatcagttgaggatattcttcatgctttggttaccttgttaattcaactatgtccatcctcatgctattctctgaagaagcttagtatatacggaatatcctccatgggagggatggaagaaaatattcatagcttcagtgatgatccttgggctgtcgctggacttgtcattggtctgggaaactctgttgttgctctgtatagacttggagcttatgaagcagttactgaagtcaaggatgtattgatatcatggataccaaatgttgattcgaactctgcattatttgatgaaatagattcagtatcactatgtatgggttcatgtcttgctcttccatctgttgtggctttttgccaaagagtggagctgttgaatgacgacttggatgcattgttcaatcgctacacttctttagcttctgagctcctgaacctcaataaatctgggattatctttcagaatttgttaatggcaatctgtattggtgctggatcttttctctcttctatattgaatgatggcgtgcatgctatggaatttaatggtgttaaaggctttctggacactctcagacatatatatacccacccttttcctccccttgttcatttgggaggcatgtttggtgtggtcaacgcttttggtgcaggtgcaggagatcttactggggtgttttcaaagcctatgacttctcaaatcaaacatgaggtttccttcatacatcttaacacttaatgttctgtaaaattgttagaataatctatttagttgtgtgcacaggagtcatcttttgtgagtggttcattactgacaagtcctgttggtgagactctgtcaacatcaatgattcaggaaatatttcttcttgctaaggatgctaaggataagcacatacaagattatgctgcatgggctatttcatttctcagaagcaggtggtcgaagaatcagaatcagattctttatgaggacaatggttctaatagaagtcctgatgatcatgatcaagcttcaagtttttctgaacaaagcttagtttggaacttaagtctctggttgagtgatctaaaatttgaaaagtctggtgatgtggtgccaataagtacagttggaacagttttaaaatgcctttccaaagctccccgattgccaactacagactggggagctattgtacggaggtgcattaaagctgaggcgcagatttctcataagttaaccaatcaggaagatcctaagatactaaaggaggcatgcttatatttgactctagctcatgctgctcacataagtccccttctgcagtttttggatgatctgactgacatactcagattccagagattagatataaatgttcagtctattttgctcaaacatttgttacacctaatgaagctattctctgattcaagattggataaattgcatgaggattttaccgaatacttgtattcccccacttcttcatacttgaattactcatctgaacagaaaagcatgctaagaatgtcgttctgggaaggcatttatacgtgcctggtggatgtttctgaagaatctggtgttttttcattcattgaaaaatgcattcagtgcttgttgcctcttttgacgctccatagtgatggtcaacctgaattcatgaaagagtggtctgttgctatcttatgtcttacaaacgcccagaaaaaatggctggatgatattttgcagattcgcagtactgccttagtcaatgaaggacatgttgatgttgcaaaaaagattatcctcagagcaagattgtgtgcaactggttgtggttcaacacatgagctgggaaatataaagacagcaatattgtgtacaaaagctgatggtgtttggtggagtgtccttgttgagatcacttcagccttaaactcagccgaaaacatcatcaaaagacagtggcttctggatgcattagacattggctgtgttacagctcacccctcaacggtgctgtgttttgttggcttgctttgtggtagctgctgcatctatatgccgcttcttcttgttaattcgataaatgtactgagcgacttgccggtcaccctgcctgcctttctctccaccatcgtttctgatgatttcaggaactctgtggcagacaggctatggctgttgactactgacatctatacttgggctgaacaattagctcacggacacgatcaacctggacatgatcgtattcatagaagtgaaactgagattgcgacttttttggccaatattctgctctctacatgcattacagtcgaggactacctgtctgttgataagcggctaaagcttgcaaatcttgaagcactctaatcaaagggagatgtgtttcttttctattttatgtatgtatttatgtacggtatcagtcatgttttaatagttgatgtccctgctgatgatccagcaatgtttttttcatgtacataattaatttaactaactcatcttatgcactgaaaacaatctattgttcaaagatagatagacctatgaaataatattgttgtgtacactcactttgtcataccgccactgaacaatttaagagcagtcaccttacaatttgatgggagtaaacttctgaggtattaacagagattatctgagaccatagctgagatgtaaaagctcccatgcaagtttacttggattatgccataactgtaaatgagtctaatcgcaattacatttgccttgagctcag

SEQ ID NO: 29337 - DNA, 4135 bp, Zea Mays
atgggggtcatgaggaaaccgatgacttgctgcacaagcgccgcccactgggtgtactccagattgggttcccctgatgaattgtcacatttcctgctcagtttgctagagtcattgccatcacttgctatacatggttttgttcttccactagctctgcaatggatatcgccaatgcttaaaagggactcaaattcggttttgtatgctatggctgttcgattactctgcaagatatgggctgtaaccgactgggcatttccaaacttacaagtggttctggatcctgagaatttttccaatttcatctctgacagagagatctctgcaagtattgccacatcaatacgcgatgtttgcaagcaaaatccagatagaggcgttgatataatattatctgtctctttttgtattgagagtcgtgattctgtggttcaagctcttggcctcgagagcctctcgtacctttgtgaagcagatgtggtcgatttctacacggcgtggaaagttatatcaaagcaggtgcttgattattacgttgagcctgctgttgctcacagtttgtgtattctgttgaggtgcggagcgatggatgctgaggcatattctgtaatatctggtaaccttgtaagaacattgtggagaattggaacatccaagaaaaataatcccgatccactctgggataaagcaagaggaactgcttttcactccttgtccaactacaaggtatcacttattcaagatgctattcctgatttctggaaactaaactatgagttctttacgaacgaacataatctggcagttctcaaggccatggagcaccttcaagatgagatcatcagatatgagcacataaatcgtcgtcgagtgactactgacaaaagaactgcagtgcataaatttgagaagctactggaggtttttcctcgggcggtatttaaagggatgttatctcatcatcagttgcctggtgctgctcttttaactctcaattttactccaaaggacatacttaatgaagggaaacctaaggatttgcctagagttcattccgcttttgagcaagcttttgtggaaattgctgaatctatgtatgtgtcaagaaacatagtggtagctcttcttgccttgcagtcatggaagtcatttgtttccaactggatgcaagcagttgtggcattgcttgacactaaagactcgtcaaagttgaacaaagcaatgaaagctgctaatgatatatttaaggttatctcaaaaactgaaagctgtcttgtaaaaggagcttgtggactggcattaggctatgtttgccacggtcttttgacaagagcacataatgctgttgattcagaagtagaggctattacacaactcaatgagcgtgcatcagttgaggatattcttcatgctttggttaccttgttaattcaactatgtccatcctcatgctattctctgaagaagcttagtatatacggaatatcctccatgggagggatggaagaaaatattcatagcttcagtgatgatccttgggctgtcgctggacttgtcattggtctgggaaactctgttgttgctctgtatagacttggagcttatgaagcagttactgaagtcaaggatgtattgatatcatggataccaaatgttgattcgaactctgcattatttgatgaaatagattcagtatcactatgtatgggttcatgtcttgctcttccatctgttgtggctttttgccaaagagtggagctgttgaatgacgacttggatgcattgttcaatcgctacacttctttagcttctgagctcctgaacctcaataaatctgggattatctttcagaatttgttaatggcaatctgtattggtgctggatcttttctctcttctatattgaatgatggcgtgcatgctatggaatttaatggtgttaaaggctttctggacactctcagacatatatatacccacccttttcctccccttgttcatttgggaggcatgtttggtgtggtcaacgcttttggtgcaggtgcaggagatcttactggggtgttttcaaagcctatgacttctcaaatcaaacatgaggtttccttcatacatcttaacacttaatgttctgtaaaattgttagaataatctatttagttgtgtgcacaggagtcatcttttgtgagtggttcattactgacaagtcctgttggtgagactctgtcaacatcaatgattcaggaaatatttcttcttgctaaggatgctaaggataagcacatacaagattatgctgcatgggctatttcatttctcagaagcaggtggtcgaagaatcagaatcagattctttatgaggacaatggttctaatagaagtcctgatgatcatgatcaagcttcaagtttttctgaacaaagcttagtttggaacttaagtctctggttgagtgatctaaaatttgaaaagtctggtgatgtggtgccaataagtacagttggaacagttttaaaatgcctttccaaagctccccgattgccaactacagactggggagctattgtacggaggtgcattaaagctgaggcgcagatttctcataagttaaccaatcaggaagatcctaagatactaaaggaggcatgcttatatttgactctagctcatgctgctcacataagtccccttctgcagtttttggatgatctgactgacatactcagattccagagattagatataaatgttcagtctattttgctcaaacatttgttacacctaatgaagctattctctgattcaagattggataaattgcatgaggattttaccgaatacttgtattcccccacttcttcatacttgaattactcatctgaacagaaaagcatgctaagaatgtcgttctgggaaggcatttatacgtgcctggtggatgtttctgaagaatctggtgttttttcattcattgaaaaatgcattcagtgcttgttgcctcttttgacgctccatagtgatggtcaacctgaattcatgaaagagtggtctgttgctatcttatgtcttacaaacgcccagaaaaaatggctggatgatattttgcagattcgcagtactgccttagtcaatgaaggacatgttgatgttgcaaaaaagattatcctcagagcaagattgtgtgcaactggttgtggttcaacacatgagctgggaaatataaagacagcaatattgtgtacaaaagctgatggtgtttggtggagtgtccttgttgagatcacttcagccttaaactcagccgaaaacatcatcaaaagacagtggcttctggatgcattagacattggctgtgttacagctcacccctcaacggtgctgtgttttgttggcttgctttgtggtagctgctgcatctatatgccgcttcttcttgttaattcgataaatgtactgagcgacttgccggtcaccctgcctgcctttctctccaccatcgtttctgatgatttcaggaactctgtggcagacaggctatggctgttgactactgacatctatacttgggctgaacaattagctcacggacacgatcaacctggacatgatcgtattcatagaagtgaaactgagattgcgacttttttggccaatattctgctctctacatgcattacagtcgaggactacctgtctgttgataagcggctaaagcttgcaaatcttgaagcactctaatcaaagggagatgtgtttcttttctattttatgtatgtatttatgtacggtatcagtcatgttttaatagttgatgtccctgctgatgatccagcaatgtttttttcatgtacataattaatttaactaactcatcttatgcactgaaaacaatctattgttcaaagatagatagacctatgaaataatattgttgtgtacactcactttgtcataccgccactgaacaatttaagagcagtcaccttacaatttgatgggagtaaacttctgaggtattaacagagattatctgagaccatagctgagatgtaaaagctcccatgcaagtttacttggattatgccataactgtaaatgagtctaatcgcaattacatttgccttgagctcag

SEQ ID NO: 29338 - DNA, 4375 bp, Zea Mays
atgggggtcatgaggaaaccgatgacttgctgcacaagcgccgcccactgggtgtactccagattgggttcccctgatgaattgtcacatttcctgctcagtttgctagagtcattgccatcacttgctatacatggttttgttcttccactagctctgcaatggatatcgccaatgcttaaaagggactcaaattcggttttgtatgctatggctgttcgattactctgcaagatatgggctgtaaccgactgggcatttccaaacttacaagtggttctggatcctgagaatttttccaatttcatctctgacagagagatctctgcaagtattgccacatcaatacgcgatgtttgcaagcaaaatccagatagaggcgttgatataatattatctgtctctttttgtattgagagtcgtgattctgtggttcaagctcttggcctcgagagcctctcgtacctttgtgaagcagatgtggtcgatttctacacggcgtggaaagttatatcaaagcaggtgcttgattattacgttgagcctgctgttgctcacagtttgtgtattctgttgaggtgcggagcgatggatgctgaggcatattctgtaatatctggtaaccttgtaagaacattgtggagaattggaacatccaagaaaaataatcccgatccactctgggataaagcaagaggaactgcttttcactccttgtccaactacaaggtatcacttattcaagatgctattcctgatttctggaaactaaactatgagttctttacgaacgaacataatctggcagttctcaaggccatggagcaccttcaagatgagatcatcagatatgagcacataaatcgtcgtcgagtgactactgacaaaagaactgcagtgcataaatttgagaagctactggaggtttttcctcgggcggtatttaaagggatgttatctcatcatcagttgcctggtgctgctcttttaactctcaattttactccaaaggacatacttaatgaagggaaacctaaggatttgcctagagttcattccgcttttgagcaagcttttgtggaaattgctgaatctatgtatgtgtcaagaaacatagtggtagctcttcttgccttgcagtcatggaagtcatttgtttccaactggatgcaagcagttgtggcattgcttgacactaaagactcgtcaaagttgaacaaagcaatgaaagctgctaatgatatatttaagattctgtgcgaccaagttccggtgtctactcctcaagttgttgttaacatagctcttgttattggggcactggccttgattgttccgccaactgctcatttggtagtatcttcggtatcagattttcttttaaaatggttgcttcaatacgagcatgagcacaagcaatggtcagcagctctctctcttggattaatattcaattgttttcatcctacggacaaaaagagcagacttcaggttatctcaaaaactgaaagctgtcttgtaaaaggagcttgtggactggcattaggctatgtttgccacggtcttttgacaagagcacataatgctgttgattcagaagtagaggctattacacaactcaatgagcgtgcatcagttgaggatattcttcatgctttggttaccttgttaattcaactatgtccatcctcatgctattctctgaagaagcttagtatatacggaatatcctccatgggagggatggaagaaaatattcatagcttcagtgatgatccttgggctgtcgctggacttgtcattggtctgggaaactctgttgttgctctgtatagacttggagcttatgaagcagttactgaagtcaaggatgtattgatatcatggataccaaatgttgattcgaactctgcattatttgatgaaatagattcagtatcactatgtatgggttcatgtcttgctcttccatctgttgtggctttttgccaaagagtggagctgttgaatgacgacttggatgcattgttcaatcgctacacttctttagcttctgagctcctgaacctcaataaatctgggattatctttcagaatttgttaatggcaatctgtattggtgctggatcttttctctcttctatattgaatgatggcgtgcatgctatggaatttaatggtgttaaaggctttctggacactctcagacatatatatacccacccttttcctccccttgttcatttgggaggcatgtttggtgtggtcaacgcttttggtgcaggtgcaggagatcttactggggtgttttcaaagcctatgacttctcaaatcaaacatgaggtttccttcatacatcttaacacttaatgttctgtaaaattgttagaataatctatttagttgtgtgcacaggagtcatcttttgtgagtggttcattactgacaagtcctgttggtgagactctgtcaacatcaatgattcaggaaatatttcttcttgctaaggatgctaaggataagcacatacaagattatgctgcatgggctatttcatttctcagaagcaggtggtcgaagaatcagaatcagattctttatgaggacaatggttctaatagaagtcctgatgatcatgatcaagcttcaagtttttctgaacaaagcttagtttggaacttaagtctctggttgagtgatctaaaatttgaaaagtctggtgatgtggtgccaataagtacagttggaacagttttaaaatgcctttccaaagctccccgattgccaactacagactggggagctattgtacggaggtgcattaaagctgaggcgcagatttctcataagttaaccaatcaggaagatcctaagatactaaaggaggcatgcttatatttgactctagctcatgctgctcacataagtccccttctgcagtttttggatgatctgactgacatactcagattccagagattagatataaatgttcagtctattttgctcaaacatttgttacacctaatgaagctattctctgattcaagattggataaattgcatgaggattttaccgaatacttgtattcccccacttcttcatacttgaattactcatctgaacagaaaagcatgctaagaatgtcgttctgggaaggcatttatacgtgcctggtggatgtttctgaagaatctggtgttttttcattcattgaaaaatgcattcagtgcttgttgcctcttttgacgctccatagtgatggtcaacctgaattcatgaaagagtggtctgttgctatcttatgtcttacaaacgcccagaaaaaatggctggatgatattttgcagattcgcagtactgccttagtcaatgaaggacatgttgatgttgcaaaaaagattatcctcagagcaagattgtgtgcaactggttgtggttcaacacatgagctgggaaatataaagacagcaatattgtgtacaaaagctgatggtgtttggtggagtgtccttgttgagatcacttcagccttaaactcagccgaaaacatcatcaaaagacagtggcttctggatgcattagacattggctgtgttacagctcacccctcaacggtgctgtgttttgttggcttgctttgtggtagctgctgcatctatatgccgcttcttcttgttaattcgataaatgtactgagcgacttgccggtcaccctgcctgcctttctctccaccatcgtttctgatgatttcaggaactctgtggcagacaggctatggctgttgactactgacatctatacttgggctgaacaattagctcacggacacgatcaacctggacatgatcgtattcatagaagtgaaactgagattgcgacttttttggccaatattctgctctctacatgcattacagtcgaggactacctgtctgttgataagcggctaaagcttgcaaatcttgaagcactctaatcaaagggagatgtgtttcttttctattttatgtatgtatttatgtacggtatcagtcatgttttaatagttgatgtccctgctgatgatccagcaatgtttttttcatgtacataattaatttaactaactcatcttatgcactgaaaacaatctattgttcaaagatagatagacctatgaaataatattgttgtgtacactcactttgtcataccgccactgaacaatttaagagcagtcaccttacaatttgatgggagtaaacttctgaggtattaacagagattatctgagaccatagctgagatgtaaaagctcccatgcaagtttacttggattatgccataactgtaaatgagtctaatcgcaattacatttgccttgagctcag

SEQ ID NO: 29339 - DNA, 4467 bp, Zea Mays
atgggggtcatgaggaaaccgatgacttgctgcacaagcgccgcccactgggtgtactccagattgggttcccctgatgaattgtcacatttcctgctcagtttgctagagtcattgccatcacttgctatacatggttttgttcttccactagctctgcaatggatatcgccaatgcttaaaagggactcaaattcggttttgtatgctatggctgttcgattactctgcaagatatgggctgtaaccgactgggcatttccaaacttacaagtggttctggatcctgagaatttttccaatttcatctctgacagagagatctctgcaagtattgccacatcaatacgcgatgtttgcaagcaaaatccagatagaggcgttgatataatattatctgtctctttttgtattgagagtcgtgattctgtggttcaagctcttggcctcgagagcctctcgtacctttgtgaagcagatgtggtcgatttctacacggcgtggaaagttatatcaaagcaggtgcttgattattacgttgagcctgctgttgctcacagtttgtgtattctgttgaggtgcggagcgatggatgctgaggcatattctgtaatatctggtaaccttgtaagaacattgtggagaattggaacatccaagaaaaataatcccgatccactctgggataaagcaagaggaactgcttttcactccttgtccaactacaagttctcaaggccatggagcaccttcaagatgagatcatcagatatgagcacataaatcgtcgtcgagtgactactgacaaaagaactgcagtgcataaatttgagaagctactggaggtttttcctcgggcggtatttaaagggatgttatctcatcatcagttgcctggtgctgctcttttaactctcaattttactccaaaggacatacttaatgaagggaaacctaaggatttgcctagagttcattccgcttttgagcaagcttttgtggaaattgctgaatctatgtatgtgtcaagaaacatagtggtagctcttcttgccttgcagtcatggaagtcatttgtttccaactggatgcaagcagttgtggcattgcttgacactaaagactcgtcaaagttgaacaaagcaatgaaagctgctaatgatatatttaaggagctctgcatttcaattaagaatggaattgacccagttttaaggaaaaccgggcctgaatcctacacagagcgcacaaacaacccagacaacgatagccccacacaaagcccatctagatttatcgttgccgagctcaacacaagggacgagcagctccgactccgtgagacgagccgcacatggccaaaggaactcgacgacacctacatcgaaacaccgattctgtgcgaccaagttccggtgtctactcctcaagttgttgttaacatagctcttgttattggggcactggccttgattgttccgccaactgctcatttggtagtatcttcggtatcagattttcttttaaaatggttgcttcaatacgagcatgagcacaagcaatggtcagcagctctctctcttggattaatattcaattgttttcatcctacggacaaaaagagcagacttcaggttattaatgggtttcttgaggttatctcaaaaactgaaagctgtcttgtaaaaggagcttgtggactggcattaggctatgtttgccacggtcttttgacaagagcacataatgctgttgattcagaagtagaggctattacacaactcaatgagcgtgcatcagttgaggatattcttcatgctttggttaccttgttaattcaactatgtccatcctcatgctattctctgaagaagcttagtatatacggaatatcctccatgggagggatggaagaaaatattcatagcttcagtgatgatccttgggctgtcgctggacttgtcattggtctgggaaactctgttgttgctctgtatagacttggagcttatgaagcagttactgaagtcaaggatgtattgatatcatggataccaaatgttgattcgaactctgcattatttgatgaaatagattcagtatcactatgtatgggttcatgtcttgctcttccatctgttgtggctttttgccaaagagtggagctgttgaatgacgacttggatgcattgttcaatcgctacacttctttagcttctgagctcctgaacctcaataaatctgggattatctttcagaatttgttaatggcaatctgtattggtgctggatcttttctctcttctatattgaatgatggcgtgcatgctatggaatttaatggtgttaaaggctttctggacactctcagacatatatatacccacccttttcctccccttgttcatttgggaggcatgtttggtgtggtcaacgcttttggtgcaggtgcaggagatcttactggggtgttttcaaagcctatgacttctcaaatcaaacatgaggagtcatcttttgtgagtggttcattactgacaagtcctgttggtgagactctgtcaacatcaatgattcaggaaatatttcttcttgctaaggatgctaaggataagcacatacaagattatgctgcatgggctatttcatttctcagaagcaggtggtcgaagaatcagaatcagattctttatgaggacaatggttctaatagaagtcctgatgatcatgatcaagcttcaagtttttctgaacaaagcttagtttggaacttaagtctctggttgagtgatctaaaatttgaaaagtctggtgatgtggtgccaataagtacagttggaacagttttaaaatgcctttccaaagctccccgattgccaactacagactggggagctattgtacggaggtgcattaaagctgaggcgcagatttctcataagttaaccaatcaggaagatcctaagatactaaaggaggcatgcttatatttgactctagctcatgctgctcacataagtccccttctgcagtttttggatgatctgactgacatactcagattccagagattagatataaatgttcagtctattttgctcaaacatttgttacacctaatgaagctattctctgattcaagattggataaattgcatgaggattttaccgaatacttgtattcccccacttcttcatacttgaattactcatctgaacagaaaagcatgctaagaatgtcgttctgggaaggcatttatacgtgcctggtggatgtttctgaagaatctggtgttttttcattcattgaaaaatgcattcagtgcttgttgcctcttttgacgctccatagtgatggtcaacctgaattcatgaaagagtggtctgttgctatcttatgtcttacaaacgcccagaaaaaatggctggatgatattttgcagattcgcagtactgccttagtcaatgaaggacatgttgatgttgcaaaaaagattatcctcagagcaagattgtgtgcaactggttgtggttcaacacatgagctgggaaatataaagacagcaatattgtgtacaaaagctgatggtgtttggtggagtgtccttgttgagatcacttcagccttaaactcagccgaaaacatcatcaaaagacagtggcttctggatgcattagacattggctgtgttacagctcacccctcaacggtgctgtgttttgttggcttgctttgtggtagctgctgcatctatatgccgcttcttcttgttaattcgataaatgtactgagcgacttgccggtcaccctgcctgcctttctctccaccatcgtttctgatgatttcaggaactctgtggcagacaggctatggctgttgactactgacatctatacttgggctgaacaattagctcacggacacgatcaacctggacatgatcgtattcatagaagtgaaactgagattgcgacttttttggccaatattctgctctctacatgcattacagtcgaggactacctgtctgttgataagcggctaaagcttgcaaatcttgaagcactctaatcaaagggagatgtgtttcttttctattttatgtatgtatttatgtacggtatcagtcatgttttaatagttgatgtccctgctgatgatccagcaatgtttttttcatgtacataattaatttaactaactcatcttatgcactgaaaacaatctattgttcaaagatagatagacctatgaaataatattgttgtgtacactcactttgtcataccgccactgaacaatttaagagcagtcaccttacaatttgatgggagtaaacttctgaggtattaacagagattatctgagaccatagctgagatgtaaaagctcccatgcaagtttacttggattatgccataactgtaaatgagtctaatcgcaattacatttgccttgagctcag

SEQ ID NO: 29340 - DNA, 4492 bp, Zea Mays
atgggggtcatgaggaaaccgatgacttgctgcacaagcgccgcccactgggtgtactccagattgggttcccctgatgaattgtcacatttcctgctcagtttgctagagtcattgccatcacttgctatacatggttttgttcttccactagctctgcaatggatatcgccaatgcttaaaagggactcaaattcggttttgtatgctatggctgttcgattactctgcaagatatgggctgtaaccgactgggcatttccaaacttacaagtggttctggatcctgagaatttttccaatttcatctctgacagagagatctctgcaagtattgccacatcaatacgcgatgtttgcaagcaaaatccagatagaggcgttgatataatattatctgtctctttttgtattgagagtcgtgattctgtggttcaagctcttggcctcgagagcctctcgtacctttgtgaagcagatgtggtcgatttctacacggcgtggaaagttatatcaaagcaggtgcttgattattacgttgagcctgctgttgctcacagtttgtgtattctgttgaggtgcggagcgatggatgctgaggcatattctgtaatatctggtaaccttgtaagaacattgtggagaattggaacatccaagaaaaataatcccgatccactctgggataaagcaagaggaactgcttttcactccttgtccaactacaaggtatcacttattcaagatgctattcctgatttctggaaactaaactatgagttctttacgaacgaacataatctggcagttctcaaggccatggagcaccttcaagatgagatcatcagatatgagcacatgttagtatatttttgttgtctttcttctgaattcagatgcttagtgtcactcttaactgatgaaccctgttcacatagaaatcgtcgtcgagtgactactgacaaaagaactgcagtgcataaatttgagaagctactggaggtttttcctcgggcggtatttaaagggatgttatctcatcatcagttgcctggtgctgctcttttaactctcaattttactccaaaggacatacttaatgaagggaaacctaaggatttgcctagagttcattccgcttttgagcaagcttttgtggaaattgctgaatctatgtatgtgtcaagaaacatagtggtagctcttcttgccttgcagtcatggaagtcatttgtttccaactggatgcaagcagttgtggcattgcttgacactaaagactcgtcaaagttgaacaaagcaatgaaagctgctaatgatatatttaagattctgtgcgaccaagttccggtgtctactcctcaagttgttgttaacatagctcttgttattggggcactggccttgattgttccgccaactgctcatttggtagtatcttcggtatcagattttcttttaaaatggttgcttcaatacgagcatgagcacaagcaatggttatctcaaaaactgaaagctgtcttgtaaaaggagcttgtggactggcattaggctatgtttgccacggtcttttgacaagagcacataatgctgttgattcagaagtagaggctattacacaactcaatgagcgtgcatcagttgaggatattcttcatgctttggttaccttgttaattcaactatgtccatcctcatgctattctctgaagaagcttagtatatacggaatatcctccatgggagggatggaagaaaatattcatagcttcagtgatgatccttgggctgtcgctggacttgtcattggtctgggaaactctgttgttgctctgtatagacttggagcttatgaagcagttactgaagtcaaggatgtattgatatcatggataccaaatgttgattcgaactctgcattatttgatgaaatagattcagtatcactatgtatgggttcatgtcttgctcttccatctgttgtggctttttgccaaagagtggagctgttgaatgacgacttggatgcattgttcaatcgctacacttctttagcttctgagctcctgaacctcaataaatctgggattatctttcagaatttgttaatggcaatctgtattggtgctggatcttttctctcttctatattgaatgatggcgtgcatgctatggaatttaatggtgttaaaggctttctggacactctcagacatatatatacccacccttttcctccccttgttcatttgggaggcatgtttggtgtggtcaacgcttttggtgcaggtgcaggagatcttactggggtgttttcaaagcctatgacttctcaaatcaaacatgaggtttccttcatacatcttaacacttaatgttctgtaaaattgttagaataatctatttagttgtgtgcacaggagtcatcttttgtgagtggttcattactgacaagtcctgttggtgagactctgtcaacatcaatgattcaggaaatatttcttcttgctaaggatgctaaggataagcacatacaagattatgctgcatgggctatttcatttctcagaagcaggtggtcgaagaatcagaatcagattctttatgaggacaatggttctaatagaagtcctgatgatcatgatcaagcttcaagtttttctgaacaaagcttagtttggaacttaagtctctggttgagtgatctaaaatttgaaaagtctggtgatgtggtgccaataagtacagttggaacagttttaaaatgcctttccaaagctccccgattgccaactacagactggggagctattgtacggaggtgcattaaagctgaggcgcagatttctcataagttaaccaatcaggaagatcctaagatactaaaggaggcatgcttatatttgactctagctcatgctgctcacataagtccccttctgcagtttttggatgatctgactgacatactcagattccagagattagatataaatgttcagtctattttgctcaaacatttgttacacctaatgaagctattctctgattcaagattggataaattgcatgaggattttaccgaatacttgtattcccccacttcttcatacttgaattactcatctgaacagaaaagcatgctaagaatgtcgttctgggaaggcatttatacgtgcctggtggatgtttctgaagaatctggtgttttttcattcattgaaaaatgcattcagtgcttgttgcctcttttgacgctccatagtgatggtcaacctgaattcatgaaagagtggtctgttgctatcttatgtcttacaaacgcccagaaaaaatggctggatgatattttgcaggttctcaacatcatagatctgttctttatgaaccattctccgtgaataatttatttcagtatttttttcattgtacgtttcacagttctatgttaacctttcctttcagattcgcagtactgccttagtcaatgaaggacatgttgatgttgcaaaaaagattatcctcagagcaagattgtgtgcaactggttgtggttcaacacatgagctgggaaatataaagacagcaatattgtgtacaaaagctgatggtgtttggtggagtgtccttgttgagatcacttcagccttaaactcagccgaaaacatcatcaaaagacagtggcttctggatgcattagacattggctgtgttacagctcacccctcaacggtgctgtgttttgttggcttgctttgtggtagctgctgcatctatatgccgcttcttcttgttaattcgataaatgtactgagcgacttgccggtcaccctgcctgcctttctctccaccatcgtttctgatgatttcaggaactctgtggcagacaggctatggctgttgactactgacatctatacttgggctgaacaattagctcacggacacgatcaacctggacatgatcgtattcatagaagtgaaactgagattgcgacttttttggccaatattctgctctctacatgcattacagtcgaggactacctgtctgttgataagcggctaaagcttgcaaatcttgaagcactctaatcaaagggagatgtgtttcttttctattttatgtatgtatttatgtacggtatcagtcatgttttaatagttgatgtccctgctgatgatccagcaatgtttttttcatgtacataattaatttaactaactcatcttatgcactgaaaacaatctattgttcaaagatagatagacctatgaaataatattgttgtgtacactcactttgtcataccgccactgaacaatttaagagcagtcaccttacaatttgatgggagtaaacttctgaggtattaacagagattatctgagaccatagctgagatgtaaaagctcccatgcaagtttacttggattatgccataactgtaaatgagtctaatcgcaattacatttgccttgagctcag

SEQ ID NO: 29341 - DNA, 3110 bp, Zea Mays
gtttgctgaaatttgtggcaagattggcatcgtcaagattctgtgcgaccaagttccggtgtctactcctcaagttgttgttaacatagctcttgttattggggcactggccttgattgttccgccaactgctcatttggtagtatcttcggtatcagattttcttttaaaatggttgcttcaatacgagcatgagcacaagcaatggtcagcagctctctctcttggattaatattcaattgttttcatcctacggacaaaaagagcagacttcaggttattaatgggtttcttgaggttatctcaaaaactgaaagctgtcttgtaaaaggagcttgtggactggcattaggctatgtttgccacggtcttttgacaagagcacataatgctgttgattcagaagtagaggctattacacaactcaatgagcgtgcatcagttgaggatattcttcatgctttggttaccttgttaattcaactatgtccatcctcatgctattctctgaagaagcttagtatatacggaatatcctccatgggagggatggaagaaaatattcatagcttcagtgatgatccttgggctgtcgctggacttgtcattggtctgggaaactctgttgttgctctgtatagacttggagcttatgaagcagttactgaagtcaaggatgtattgatatcatggataccaaatgttgattcgaactctgcattatttgatgaaatagattcagtatcactatgtatgggttcatgtcttgctcttccatctgttgtggctttttgccaaagagtggagctgttgaatgacgacttggatgcattgttcaatcgctacacttctttagcttctgagctcctgaacctcaataaatctgggattatctttcagaatttgttaatggcaatctgtattggtgctggatcttttctctcttctatattgaatgatggcgtgcatgctatggaatttaatggtgttaaaggctttctggacactctcagacatatatatacccacccttttcctccccttgttcatttgggaggcatgtttggtgtggtcaacgcttttggtgcaggtgcaggagatcttactggggtgttttcaaagcctatgacttctcaaatcaaacatgaggagtcatcttttgtgagtggttcattactgacaagtcctgttggtgagactctgtcaacatcaatgattcaggaaatatttcttcttgctaaggatgctaaggataagcacatacaagattatgctgcatgggctatttcatttctcagaagcaggtggtcgaagaatcagaatcagattctttatgaggacaatggttctaatagaagtcctgatgatcatgatcaagcttcaagtttttctgaacaaagcttagtttggaacttaagtctctggttgagtgatctaaaatttgaaaagtctggtgatgtggtgccaataagtacagttggaacagttttaaaatgcctttccaaagctccccgattgccaactacagactggggagctattgtacggaggtgcattaaagctgaggcgcagatttctcataagttaaccaatcaggaagatcctaagatactaaaggaggcatgcttatatttgactctagctcatgctgctcacataagtccccttctgcagtttttggatgatctgactgacatactcagattccagagattagatataaatgttcagtctattttgctcaaacatttgttacacctaatgaagctattctctgattcaagattggataaattgcatgaggattttaccgaatacttgtattcccccacttcttcatacttgaattactcatctgaacagaaaagcatgctaagaatgtcgttctgggaaggcatttatacgtgcctggtggatgtttctgaagaatctggtgttttttcattcattgaaaaatgcattcagtgcttgttgcctcttttgacgctccatagtgatggtcaacctgaattcatgaaagagtggtctgttgctatcttatgtcttacaaacgcccagaaaaaatggctggatgatattttgcagattcgcagtactgccttagtcaatgaaggacatgttgatgttgcaaaaaagattatcctcagagcaagattgtgtgcaactggttgtggttcaacacatgagctgggaaatataaagacagcaatattgtgtacaaaagctgatggtgtttggtggagtgtccttgttgagatcacttcagccttaaactcagccgaaaacatcatcaaaagacagtggcttctggatgcattagacattggctgtgttacagctcacccctcaacggtgctgtgttttgttggcttgctttgtggtagctgctgcatctatatgccgcttcttcttgttaattcgataaatgtactgagcgacttgccggtcaccctgcctgcctttctctccaccatcgtttctgatgatttcaggaactctgtggcagacaggctatggctgttgactactgacatctatacttgggctgaacaattagctcacggacacgatcaacctggacatgatcgtattcatagaagtgaaactgagattgcgacttttttggccaatattctgctctctacatgcattacagtcgaggactacctgtctgttgataagcggctaaagcttgcaaatcttgaagcactctaatcaaagggagatgtgtttcttttctattttatgtatgtatttatgtacggtatcagtcatgttttaatagttgatgtccctgctgatgatccagcaatgtttttttcatgtacataattaatttaactaactcatcttatgcactgaaaacaatctattgttcaaagatagatagacctatgaaataatattgttgtgtacactcactttgtcataccgccactgaacaatttaagagcagtcaccttacaatttgatgggagtaaacttctgaggtattaacagagattatctgagaccatagctgagatgtaaaagctcccatgcaagtttacttggattatgccataactgtaaatgagtctaatcgcaattacatttgccttgagctcag

SEQ ID NO: 29342 - DNA, 1849 bp, Zea Mays
cattaatcccaatttgtccttatttatctgtttaccctctctttctctctcctcggccgggcccttttttttctttgcaacatacaccaccacaatattcttcaacactctcacctcctctcattcaatactgtctctcagcctttttttttcatagtgtgtgcggccgatctatgcacctcacctttcccttgctgcagttggaggaagtgtgctgcaggtggaagaagagaggggagaagctggttcccctctccatatctctcctccccagctccctccccctctcatagatcgatcacacagcctgcaggcacagacaagagttaggctgttctacctgatcatatgaccctccagcaattctctcatccacacacaaactgaagcaagaattattgcttatctatatcctgtctgtcctttcctctatttcccccctcccctttctatttccattgtgcagcttgttattagtagatagcagtggatcgatgtgtgatggaggaaacaagctagctagctagctaccagctgaagcagcagggagaagaaggatagagagagagagagagagagaaaacatcttcttcatccatagtctcggcctttcttcaccaggtcgtctgcagatctgtctcctgtgaccttccagaggccaagctaggccaggaaggaaaaatggcgtccccgtcgagcaccagcaacaactcggccttctcccctgtggcggcgtcggccgggacgacgatgcctggtgccggggcgccgtgcgcggcgtgcaagttcctgcggcgcaagtgcctgccggggtgcgtgttcgcgccctacttcccgccggaggagccgcagaagttcgccaacgtgcacaaggtgttcggcgccagcaacgtgaccaagctgctgaacgagctgctgccgcaccagcgggaggacgccgtgagctcgctcgcctacgaggccgaggcgcgcgtcaaggaccccgtctacggctgcgtcggcgccatctccgtgctgcagcgccaggtccaccgcctccagaaggagctggacgccgcgcacgccgagctcctccgctacgcctgcggcgacgtcgccgccggcatccccaccgcgctccccgtcgtcagcgccgcccccaggctctccacggcgccaatgacgacgacgagccccggccagttcgccgccggcatgtacggcagcggcaggaggcttggggtcgtcgacggactagcagcgccaccgctgcctccgtcgggcggcggcggcggctgctacttcatgcggaaccaccacaacaacgtcgtcattagtagctccccaggcgctgacgtggcgcccgtcctgccttacgcttccgtggctaattgggcggtgaatgccatcagcgcgtcgacgaccaccacctccggatcagagagcattgggttggatcacaaggaagggggagacagcagcatgtgaagtgaaggggaagcgctgcgctgccgtgaatgatgtggaggcgacgacatggatttgagccctttgaccttaatgagctgtgggatcggacggcggagtcggtgaaggaaggaaggaaggaagcttcaggggggggggggagacgatgtcatgggagcccaatcgatctcagcaggttgattaagagctaaggagcaatctatctatctatctatctacctacctttcgctatatatatctatatagccgacatgaattatatatatcgactgcatctatcccctttctgcatgttgtgcaaaccaatactttggagtactaaatgtaatcgagccgagatcttgatctctcttcttttcatgattaattcttcgttctcgc

SEQ ID NO: 29343 - DNA, 1786 bp, Zea Mays
caacactctcacctcctctcattcaatactgtctctcagcctttttttttcatagtgtgtgcggccgatctatgcacctcacctttcccttgctgcagttggaggaagtgtgctgcaggtggaagaagagaggggagaagctggttcccctctccatatctctcctccccagctccctccccctctcatagatcgatcacacagcctgcaggcacagacaagagttaggctgttctacctgatcatatgaccctccagcaattctctcatccacacacaaactgaagcaagaattattgcttatctatatcctgtctgtcctttcctctatttcccccctcccctttctatttccattgtgcagcttgttattagtagatagcagtggatcgatgtgtgatggaggaaacaagctagctagctagctaccagctgaagcagcagggagaagaaggatagagagagagagagagagagaaaacatcttcttcatccatagtctcggcctttcttcaccaggtcgtctgcagatctgtctcctgtgaccttccagaggccaagctaggccaggaaggaaaaatggcgtccccgtcgagcaccagcaacaactcggccttctcccctgtggcggcgtcggccgggacgacgatgcctggtgccggggcgccgtgcgcggcgtgcaagttcctgcggcgcaagtgcctgccggggtgcgtgttcgcgccctacttcccgccggaggagccgcagaagttcgccaacgtgcacaaggtgttcggcgccagcaacgtgaccaagctgctgaacgagctgctgccgcaccagcgggaggacgccgtgagctcgctcgcctacgaggccgaggcgcgcgtcaaggaccccgtctacggctgcgtcggcgccatctccgtgctgcagcgccaggtccaccgcctccagaaggagctggacgccgcgcacgccgagctcctccgctacgcctgcggcgacgtcgccgccggcatccccaccgcgctccccgtcgtcagcgccgcccccaggctctccacggcgccaatgacgacgacgagccccggccagttcgccgccggcatgtacggcagcggcaggaggcttggggtcgtcgacggactagcagcgccaccgctgcctccgtcgggcggcggcggcggctgctacttcatgcggaaccaccacaacaacgtcgtcattagtagctccccaggcgctgacgtggcgcccgtcctgccttacgcttccgtggctaattgggcggtgaatgccatcagcgcgtcgacgaccaccacctccggatcagagagcattgggttggatcacaaggaagggggagacagcagcatgtgaagtgaaggggaagcgctgcgctgccgtgaatgtgtgttgtgcagtgatgtattactctaatccttgttaagatgtggaggcgacgacatggatttgagccctttgaccttaatgagctgtgggatcggacggcggagtcggtgaaggaaggaaggaaggaagcttcaggggggggggggagacgatgtcatgggagcccaatcgatctcagcaggttgattaagagctaaggagcaatctatctatctatctatctacctacctttcgctatatatatctatatagccgacatgaattatatatatcgactgcatctatcccctttctgcatgttgtgcaaaccaatactttggagtactaaatgtaatcgagccgagatcttgatctctcttcttttcatgattaattcttcgttctcgc

SEQ ID NO: 29344 - DNA, 1645 bp, Zea Mays
atacgatccgctcctcctgttcctgcttcacttctactagctcgtcgattctcttgcagcaggttccacatgggaaggcaacctttggtcatcgtggccaacgcagagctctgcaaggaggtcggcatcaagaagttcaagagcatgccgaaccggagcttaccttcggccatcgccaattccccgatccacctcaaaggcctcttctcgacaagggattcacggtggtcggcgttgcgaaacatcatcgtctccatctaccagccctcgcacctggcggggctgatcccgagcatgcagtcgcacatcgagcgcgcggccacgaacctggacgacggcggcgaggccgaggtcgccttctccaagctcgcgctcagcctcgccaccgacgtgatcggacaggcggcgttcggcgcggacttcggcctgaccacaaagcctgccgcgccgccccctcaccacggaccaccacgacagcacggcgaggaagacggagacggtagtcacagcaccaggtcgtcggagttcataaagatgcacatccactcgaccacgtcgctgaagatggacctgtcggggtcgctgtccaccatcgtcggcacgctcctgcccgtgctgcagtggccgctacggcagctgctcctgcgggtcccgggcgccgccgacagggagatccagcgcgtcaacggcgcgctctgccggatgatggacggcatcgtggccgacagggtggccgcgagggagcgcgcgccccaagcccagcggcagaaagacttcctgtccgtggtcctcgccgcgcgcgacagcgacgcggccgcgcggaagctgctcacgccggactacctcagcgctctcacctacgagcacctcctcgccgggtcggccaccacggccttcacgctgtcctccgtgctctacctcgtcgcccagcacccgcgggtggaggagaagctgctgagggaggttgacgcgttcggacctccggaccgcgttcccacggcggaagatcttcagagccgcttcccctacaccgatcaggtgctgaaggaatcgatgagatttttcatggtctcgccgctggttgcgcgggagacctctgagcaggtggacatcgctggctatgtcctgcccaagagtacgtgggtgtggatggcaccgggggttctggcaaaggaccccgtcaacttccctgagccagagctcttccggccggagcggttcgaccctgccggcgacgagcagaagaggcggcacccctacgcgttcatcccgttcggaatcggtcccaggatttgcatcggccagaggttctccatccaggagatcaagcttgcgctgatccacctctaccggcagtacgtgttccggcactctccaagcatggagtcccctttggagtttcagttcggtgttgtgctcaacttcaaacatggagtgaagcttcagtccatcaagaggcacaaatgttagatcggcgcggtggtgttgattattctgatccttgatctatctttgtgcaaataaaggtgcaacgtatacggtcatacatgcacattttgcaaaaggaaacaatatgggggtgattggtctcaacttaacctgtattatgcaacataactcatcaaggcaagccaacacaaatgtg

SEQ ID NO: 29345 - DNA, 1406 bp, Zea Mays
atggcggtcgccttcgcctcctcgcggcgcgccctgcacaccctccaccgccgcctcctcctccacccctcccccacacccgccgccgcgcgccgcgcgctacccacttccactcgtactcccatccccgcccactcccccaccttcatctcctcctcctcctcctcctcctcctcccgcttcttcaccaccgcgcgcaccgatgcgacgaggctgcggcacggggtgctgccgcagcggctggcgggcggggtcaggtcggtggcgagcggcgggtcgaagctggcgccgctgggccagggggtcaaggggctggggcggcccatggaggcggcgaggagcgcggccgcgcggtaccgcgcggccgtcggcctgcaggtcgaggccttctggcggcgcaactacatgatcctcgtcggcgcgggggcagtcgtcgtctgcgtcgcgctgtggaggatcatgttcggcatcgccagcaccttcgtcggcctctccgagggcatggccaaggcatgtatgcccgggcaaggttaaccataaaccctgacaaggtttaccggctggctatgacaaaactcaatacatctgctgcaatccttgaagttatgggtgcgcccctaactgcaaacggtgcttcctcattttccccatcaaaggatcagaaagaaggggtcttgtaagtgttgagttcaagaagaaaaagggacagtatgacatgaaactactagctgttgacataccaatggcatcaggtcctgaccagcggctgttcgtcgtcggtgatgaacaagagtacaaggtgggcgggggcttgatatctgagctgcgagacccgatcgtaaaagctatggctgcagaaaaggagtttgattatcttgatgaaagagaggacgaggaagatgagcggagggagcgtgaggaggcggagcaagaggaagcggaagcattgaggcgcgaggaggaaaggttgcgtcagcaggctgaagaacggaggcggcgggaggaggctgagagcctggagaaagcttcgtgacatgatttaactgcatcgattttccaccttgtgcattgttttatacttctctccccctcccggagtgtagcagtccgcgtttccacagcaagagaagattgcttctgagttcggttgagttccagacttccaggtggtcgattcggcgtcaccagtctcaagttgttgaggagaaaggaataattttgcatgttccgcaacagaacacttcggcgaaacaatgtaatttagtggttggtcagttgttaaagccttttttttttttgctgaatgtctgcggtcatggaattgagatgagtaaagttgagtttgtagttaggttttgattaacccaaaaagatttataaaagtttaattcatcatctctctcctt

SEQ ID NO: 29346 - DNA, 1518 bp, Zea Mays
atggcggtcgccttcgcctcctcgcggcgcgccctgcacaccctccaccgccgcctcctcctccacccctcccccacacccgccgccgcgcgccgcgcgctacccacttccactcgtactcccatccccgcccactcccccaccttcatctcctcctcctcctcctcctcctcctcccgcttcttcaccaccgcgcgcaccgatgcgacgaggctgcggcacggggtgctgccgcagcggctggcgggcggggtcaggtcggtggcgagcggcgggtcgaagctggcgccgctgggccagggggtcaaggggctggggcggcccatggaggcggcgaggagcgcggccgcgcggtaccgcgcggccgtcggcctgcaggtcgaggccttctggcggcgcaactacatgatcctcgtcggcgcgggggcagtcgtcgtctgcgtcgcgctgtggaggatcatgttcggcatcgccagcaccttcgtcggcctctccgagggcatggccaagtacggcttcctcgccctagccaccgcccttgtcgcctttgccacaacagcttaccatgttgggaaacaaatagagagcctataccctgcaagatggtcatattaatagcagataaccatgcatcagggcatgtatgcccgggcaaggttaaccataaaccctgacaaggtttaccggctggctatgacaaaactcaatacatctgctgcaatccttgaagttatggcaaacggtgcttcctcattttccccatcaaaggatcagaaagaaggggtcttgtaagtgttgagttcaagaagaaaaagggacagtatgacatgaaactactagctgttgacataccaatggcatcaggtcctgaccagcggctgttcgtcgtcggtgatgaacaagagtacaaggtgggcgggggcttgatatctgagctgcgagacccgatcgtaaaagctatggctgcagaaaaggagtttgattatcttgatgaaagagaggacgaggaagatgagcggagggagcgtgaggaggcggagcaagaggaagcggaagcattgaggcgcgaggaggaaaggttgcgtcagcaggctgaagaacggaggcggcgggaggaggctgagagcctggagaaagcttcgtgacatgatttaactgcatcgattttccaccttgtgcattgttttatacttctctccccctcccggagtgtagcagtccgcgtttccacagcaagagaagattgcttctgagttcggttgagttccagacttccaggtggtcgattcggcgtcaccagtctcaagttgttgaggagaaaggaataattttgcatgttccgcaacagaacacttcggcgaaacaatgtaatttagtggttggtcagttgttaaagccttttttttttttgctgaatgtctgcggtcatggaattgagatgagtaaagttgagtttgtagttaggttttgattaacccaaaaagatttataaaagtttaattcatcatctctctcctt

SEQ ID NO: 29347 - DNA, 1434 bp, Zea Mays
atggcggtcgccttcgcctcctcgcggcgcgccctgcacaccctccaccgccgcctcctcctccacccctcccccacacccgccgccgcgcgccgcgcgctacccacttccactcgtactcccatccccgcccactcccccaccttcatctcctcctcctcctcctcctcctcctcccgcttcttcaccaccgcgcgcaccgatgcgacgaggctgcggcacggggtgctgccgcagcggctggcgggcggggtcaggtcggtggcgagcggcgggtcgaagctggcgccgctgggccagggggtcaaggggctggggcggcccatggaggcggcgaggagcgcggccgcgcggtaccgcgcggccgtcggcctgcaggtcgaggccttctggcggcgcaactacatgatcctcgtcggcgcgggggcagtcgtcgtctgcgtcgcgctgtggaggatcatgttcggcatcgccagcaccttcgtcggcctctccgagggcatggccaagtacggcttcctcgccctagccaccgcccttgtcgcctttgccggcatgtatgcccgggcaaggttaaccataaaccctgacaaggtttaccggctggctatgacaaaactcaatacatctgctgcaatccttgaagttatggcaaacggtgcttcctcattttccccatcaaaggatcagaaagaaggggtcttgtaagtgttgagttcaagaagaaaaagggacagtatgacatgaaactactagctgttgacataccaatggcatcaggtcctgaccagcggctgttcgtcgtcggtgatgaacaagagtacaaggtgggcgggggcttgatatctgagctgcgagacccgatcgtaaaagctatggctgcagaaaaggagtttgattatcttgatgaaagagaggacgaggaagatgagcggagggagcgtgaggaggcggagcaagaggaagcggaagcattgaggcgcgaggaggaaaggttgcgtcagcaggctgaagaacggaggcggcgggaggaggctgagagcctggagaaagcttcgtgacatgatttaactgcatcgattttccaccttgtgcattgttttatacttctctccccctcccggagtgtagcagtccgcgtttccacagcaagagaagattgcttctgagttcggttgagttccagacttccaggtggtcgattcggcgtcaccagtctcaagttgttgaggagaaaggaataattttgcatgttccgcaacagaacacttcggcgaaacaatgtaatttagtggttggtcagttgttaaagccttttttttttttgctgaatgtctgcggtcatggaattgagatgagtaaagttgagtttgtagttaggttttgattaacccaaaaagatttataaaagtttaattcatcatctctctcctt

SEQ ID NO: 29348 - DNA, 1107 bp, Zea Mays
tattaatctgtgaaatatattacaatctgttcagatacaagaacagaatatgaaaagtatgggtagtgcgaacttgactgcagagtaccgaatccattttaactgaaaattatcagtgaatgtgctttccacacaatatatcttcttgccagttttcttgtgcctattcttttggtttactctcaattttattacgttgagcaattgactatcttcgttttatagggcatgtatgcccgggcaaggttaaccataaaccctgacaaggtttaccggctggctatgacaaaactcaatacatctgctgcaatccttgaagttatggcaaacggtgcttcctcattttccccatcaaaggatcagaaagaaggggtcttgtaagtgttgagttcaagaagaaaaagggacagtatgacatgaaactactagctgttgacataccaatggcatcaggtcctgaccagcggctgttcgtcgtcggtgatgaacaagagtacaaggtgggcgggggcttgatatctgagctgcgagacccgatcgtaaaagctatggctgcagaaaaggagtttgattatcttgatgaaagagaggacgaggaagatgagcggagggagcgtgaggaggcggagcaagaggaagcggaagcattgaggcgcgaggaggaaaggttgcgtcagcaggctgaagaacggaggcggcgggaggaggctgagagcctggagaaagcttcgtgacatgatttaactgcatcgattttccaccttgtgcattgttttatacttctctccccctcccggagtgtagcagtccgcgtttccacagcaagagaagattgcttctgagttcggttgagttccagacttccaggtggtcgattcggcgtcaccagtctcaagttgttgaggagaaaggaataattttgcatgttccgcaacagaacacttcggcgaaacaatgtaatttagtggttggtcagttgttaaagccttttttttttttgctgaatgtctgcggtcatggaattgagatgagtaaagttgagtttgtagttaggttttgattaacccaaaaagatttataaaagtttaattcatcatctctctcctt

SEQ ID NO: 29349 - DNA, 816 bp, Zea Mays
ctatagcactagaacctgctgattcctcgtcgccagcttctctttcccccaccacaaccccccgccggcgcggctcccggtgtcccttccactctccaccctctccttcccttcggcgccaagtccatccgcccctccgaatctccgattgccgccgtccagttttggcaggtgccggccgacagttgagaatgggactgaggcgcctgatgagatgctgctgctgcattgcaaagcagcacgcggacgacggcgacaagatcgatttcggaggtggcaatgttcatgttgtcacaagcaaagaggactgggaccaaagaattgccgaggcaaacaaggatgggaaaaccgtggttgcaaacttcagcgcttcctggtgtgggccgtgccgtgtcatcgcacctgtctacgccgaaatgtcgcagacgtaccctcagctcatgttcctgacgatcgatgttgatgacttgatggagttcagctcgtcgtgggacatccgcgcgaccccgaccttcttcttcctcaagaacgagcagcaggtggacaagctggtcggcgccaacaagcctgagctggagaagaaagtggccgccgtcgccgacgcggccggcagcaagacagtgtagtgtaggcaaagacccgcctagcttgttgacctggccctgtacatcgttatatcctattgttgctgtgtgtttctttcttggcaccgtgcgcatgcgtcgatctgtcggcggtaatgtcttccgccatgtgctgattgtaagagttgcccggtaatggtaatggtaatggtaatggtgtcttacggtttct

SEQ ID NO: 29350 - DNA, 813 bp, Zea Mays
ctatagcactagaacctgctgattcctcgtcgccagcttctctttcccccaccacaaccccccgccggcgcggctcccggtgtcccttccactctccaccctctccttcccttcggcgccaagtccatccgcccctccgaatctccgattgccgccgtccagttttggcaggtgccggccgacagttgagaatgggactgaggcgcctgatgagatgctgctgctgcattgcaaagcacgcggacgacggcgacaagatcgatttcggaggtggcaatgttcatgttgtcacaagcaaagaggactgggaccaaagaattgccgaggcaaacaaggatgggaaaaccgtggttgcaaacttcagcgcttcctggtgtgggccgtgccgtgtcatcgcacctgtctacgccgaaatgtcgcagacgtaccctcagctcatgttcctgacgatcgatgttgatgacttgatggagttcagctcgtcgtgggacatccgcgcgaccccgaccttcttcttcctcaagaacgagcagcaggtggacaagctggtcggcgccaacaagcctgagctggagaagaaagtggccgccgtcgccgacgcggccggcagcaagacagtgtagtgtaggcaaagacccgcctagcttgttgacctggccctgtacatcgttatatcctattgttgctgtgtgtttctttcttggcaccgtgcgcatgcgtcgatctgtcggcggtaatgtcttccgccatgtgctgattgtaagagttgcccggtaatggtaatggtaatggtaatggtgtcttacggtttct

SEQ ID NO: 29351 - DNA, 1531 bp, Zea Mays
ctaccgtgctcttgctgagcgctatgataacgtgactggggaattgcgcaagggtcttgcgctgcagtctcagggctctggtatatccgaaactgattccgagacacaatcaacttcatcgtgtccagagcctaacatggaacagaacacagcaaaaccgaagcgtgatgtgctccttggttctggtgggagctcagacatttccaagaaggagagtgatggatcatcttcttcttcttcagattctgattcagaggttgacgaggcaagtgaagaaaatggcaatgggatttcttatataagtgatgaacggattgctgagctggaagatgagcttcaggaagcaaggcaacaaattgaggcgcttgaggtaaagaacatgcactgccagtgtgagaaacttgaagagagtctcaaacaagttagcaatgaaaaggaagatctggtagctgcaattctggcaagcaagaatgaggtcgaggatctaaaaggagacatggtctcggcagctaaacattttgaagcccaactagtgcaccgtgaccatgagattgagaagtgcaagcaggaggctgagcaagtttctgaaaagtatttccatgagaaatccactctcgaatctgaaatccaaaggctccaggaagttgttaagagttttgaagagaacctaacaaaagttgctgatgagaaattgcagcttgaggcccagctaaaggaacttgaacagacttctaatgatttagatgactcttctgctgagattataaagctacaagaaataatcaaggatctgcaagaaagattggaaaatgactcaaacgagaagagtgtacttgaggaacgtgctatggagctggagcaagttcgtaggcagttagaggattcaagagctgaggctagtatggagctacaaactacaattaagaacctgaatcaagttcttcaagagaaagcagaacttgagaatcgtatgaaggatgcggagcaggcaaccagcgacctaaactccctggtcgcttccctcgacggcaagctgaaagccacagaggcgcagctcgaacagcttcacgcggagagagcagaagcaatcctcgagagcgagaaacaggtatccgagctgaaccaagccatcctccggctgctcctgcagggccacaggcggccccggcccatggtgatgacagcgtgatgagttgaagtggttgttgtcctggatgttgggacttgggaagtatgtcgaaactcttgacttgaagctgctgcttctcggtgtgttgtcctgacgacatgagtgagtttctatctggatgagcggatggtaggaggaagtcgaaactctacatagttcgaggagagcttgtgctctgtagttactttgcactgcggagttactcgtcaatttgtgctgtgtgatgtaaggagctagctatcacggtgttcccttctttattctctcagttcgtgctcattgttggtttgctgaagtgaagtgggaagtgggaacgacgaattcttcgagtgctgaactgac

SEQ ID NO: 29352 - DNA, 1653 bp, Zea Mays
gccaactccatgcccacaagctccaagaacggcgccgggtcttcgggaaaaaagatagtttcttcagtccgacaccgcttctagcttcccctcggcgatctgtgaagctatgaagccacctctcgagaggaacccgactaagaagcgccactcgtggtggtgggacagtcacattagccctaagaactcgaaatggctcgccgaaaatctcgaagaaatggacaagcaagtgaaggaaatgctccagctgatcgaggaggacggcgactccttcgctaagaaagcgcaaatgtattaccagaggcgtccgatgctcgtcacccacgtcgagaacttctaccgtatgtatcgtgctctagccgagcgctatgacaatgtaaccggcgagctgcgcaagaacatccctacaaggctgcagacaaccggatttttaaccagttcagagtacggttctgagctgcagaggtcgccctcaccgtctcctgagccgttacagaggtcgtggacaagggagcagagccctagggccgctggcttcgacttcttcctgagcaataggagcaatgactcgccacctgtctacaggaaggaacccgaggacgcggcatcgcagtcggagtctgacgcgaagtctgcagacggtgaggatgatggcatcgcctacacgctgcaccagagagttcttgagctagaggacgagctcaatgcgacaaaccagaaactacaagatgcaaacgagaagcttgaggttctggaggaaaagagcttgaggtgccattgcgattataaagagaatggaaacggtgctcagcgaactacagaagtttcaggcaaagagggggagctggaagccgaaatcgtcaatctccaggagcaagcggactcggcaagaaggcgattcgaagaggcattgtctgaacgagatggagaaatcagcaagctaaagcaagagcttgctggtgcttctgagaagctgcagcgagagaagtacgccaatggcgtgcaggtatctgagctgcagcgatcggttgaacacatcaggtccgaactagagagagtttctgaagagaaactactgtccgagaacaagattaaggagctggaggcagcaaacgctgaagccgataagtacggccacgagctcacgcgagctgccgagaagatttccgaggagaagttcgcgctcgaagctgagatcctcacgatgcggcagaacattgaagatctgaaatccaggatcgagagcctcgctcgagagaagtccctgctcaaatcatggtttgaggacttggagcaagtcgtggggcgaggaaggggcatcttcgccgattaaccgagtttttctatccagaacatcatcggtagctagaatttagcaagctagtaacattttgttttgttttctggtacccataccatcttgcgaaattgagatacgtcagtgtacttcctttttgtttgctgaatcttaaacttagacgtgatggatggtggtgatgtactggtaatatatgaaatattatactgaaccgcgctcgacgtcaataataagattcctatagtgcatctaaaagttctgtctcaatgtaagtccagttcggatactgatactgttcatattgtttgaaaatcatgttcttgcataattttttt

SEQ ID NO: 29353 - DNA, 2774 bp, Zea Mays
atcaaagaaaaaagagagcgagtctcacacggtcacaccacatggctggcgagcggcacgtcaccatgtgggagaatttattcgcttgtccatttctcccacatacccctcccctctccaccgcccatctcttcctcctccagtcccgaaggaaggtctcaggtctggctggcctaccaccaagaacacacgctgcggcctgcggctgcggtcacgctactcaagtgtgaacaaaaaggagcttggcggcggccgtgaccggcgctggagagtggagatcttggacgcgtgcgacatcctggtctccgctctgtgcctctggtcttcgaaggcgccgccaccctatttttttttttaaaaaaaatcctaaggtgagatcgagctgctctttgctttgctttgctttgctttgctgcttgcgcggaatctggcctgcttgctttcacagttccacttcgttgcgtgtttcggtttattgattgatagatttcaatcgaagcttgcagattaggtttcttttctagctagatcctgcagcatctacgaggccaggccacggtcgactggttctccttcgatctagtcttccttcctttccttcctttctttctgaatgcgcatggtagtaccaccataacacagctatccttttggtgagacatccagttttctctgtctttgccaaagacaaaaaaaccccccgctattggtaatacaggcagaggtcgtcttgagaagacggatagctatgactgattatatattttttttgctgcacatgtttattaccgagtccattgctctgacgaactgatctcctgtaccattgttacatgtacctttgtttgaattggaaatcattcataccatattactatcaatccaactaacaggactaactaccttcccaaggatcgtacactaacttcttcatccgaagtaccttgaactagcatgcttgctggcatcactgtctgttacacgctgatgccgcactatttctagccttgattacccaacgccgagttcacctcaaatgcttccgttataggaaaacatgattctatatgccatactcatttttcgctgtattttaaccattttaactctcatatttgtgactgctatagtcactgtctctctctggtgctgctgcgcatttctgaatttttcagatagtttcttcagtccgacaccgcttctagcttcccctcggcgatctgtgaagctatgaagccacctctcgagaggaacccgactaagaagcgccactcgtggtggtgggacagtcacattagccctaagaactcgaaatggctcgccgaaaatctcgaagaaatggacaagcaagtgaaggaaatgctccagctgatcgaggaggacggcgactccttcgctaagaaagcgcaaatgtattaccagaggcgtccgatgctcgtcacccacgtcgagaacttctaccgtatgtatcgtgctctagccgagcgctatgacaatgtaaccggcgagctgcgcaagaacatccctacaaggctgcagacaaccggatttttaaccagttcagagtacggttctgagctgcagaggtcgccctcaccgtctcctgagccgttacagaggtcgtggacaagggagcagagccctagggccgctggcttcgacttcttcctgagcaataggagcaatgactcgccacctgtctacaggaaggaacccgaggacgcggcatcgcagtcggagtctgacgcgaagtctgcagacggtgaggatgatggcatcgcctacacgctgcaccagagagttcttgagctagaggacgagctcaatgcgacaaaccagaaactacaagatgcaaacgagaagcttgaggttctggaggaaaagagcttgaggtgccattgcgattataaagagaatggaaacggtgctcagcgaactacagaagtttcaggcaaagagggggagctggaagccgaaatcgtcaatctccaggagcaagcggactcggcaagaaggcgattcgaagaggcattgtctgaacgagatggagaaatcagcaagctaaagcaagagcttgctggtgcttctgagaagctgcagcgagagaagtacgccaatggcgtgcaggtatctgagctgcagcgatcggttgaacacatcaggtccgaactagagagagtttctgaagagaaactactgtccgagaacaagattaaggagctggaggcagcaaacgctgaagccgataagtacggccacgagctcacgcgagctgccgagaagatttccgaggagaagttcgcgctcgaagctgagatcctcacgatgcggcagaacattgaagatctgaaatccaggatcgagagcctcgctcgagagaagtccctgctcaaatcatggtttgaggacttggagcaagtcgtggggcgaggaaggggcatcttcgccgattaaccgagtttttctatccagaacatcatcggtagctagaatttagcaagctagtaacattttgttttgttttctggtacccataccatcttgcgaaattgagatacgtcagtgtacttcctttttgtttgctgaatcttaaacttagacgtgatggatggtggtgatgtactggtaatatatgaaatattatactgaaccgcgctcgacgtcaataataagattcctatagtgcatctaaaagttctgtctcaatgtaagtccagttcggatactgatactgttcatattgtttgaaaatcatgttcttgcataattttttt

SEQ ID NO: 29354 - DNA, 1817 bp, Zea Mays
aaaaaagagagcgagtctcacacggtcacaccacatggctggcgagcggcacgtcaccatgtgggagaatttattcgcttgtccatttctcccacatacccctcccctctccaccgcccatctcttcctcctccagtcccgaaggaaggtctcaggtctggctggcctaccaccaagaacacacgctgcggcctgcggctgcggtcacgctactcaagtgtgaacaaaaagtccgacaccgcttctagcttcccctcggcgatctgtgaagctatgaagccacctctcgagaggaacccgactaagaagcgccactcgtggtggtgggacagtcacattagccctaagaactcgaaatggctcgccgaaaatctcgaagaaatggacaagcaagtgaaggaaatgctccagctgatcgaggaggacggcgactccttcgctaagaaagcgcaaatgtattaccagaggcgtccgatgctcgtcacccacgtcgagaacttctaccgtatgtatcgtgctctagccgagcgctatgacaatgtaaccggcgagctgcgcaagaacatccctacaaggctgcagacaaccggatttttaaccagttcagagtacggttctgagctgcagaggtcgccctcaccgtctcctgagccgttacagaggtcgtggacaagggagcagagccctagggccgctggcttcgacttcttcctgagcaataggagcaatgactcgccacctgtctacaggaaggaacccgaggacgcggcatcgcagtcggagtctgacgcgaagtctgcagacggtgaggatgatggcatcgcctacacgctgcaccagagagttcttgagctagaggacgagctcaatgcgacaaaccagaaactacaagatgcaaacgagaagcttgaggttctggaggaaaagagcttgaggtgccattgcgattataaagagaatggaaacggtgctcagcgaactacagaagtttcaggcaaagagggggagctggaagccgaaatcgtcaatctccaggagcaagcggactcggcaagaaggcgattcgaagaggcattgtctgaacgagatggagaaatcagcaagctaaagcaagagcttgctggtgcttctgagaagctgcagcgagagaagtacgccaatggcgtgcaggtatctgagctgcagcgatcggttgaacacatcaggtccgaactagagagagtttctgaagagaaactactgtccgagaacaagattaaggagctggaggcagcaaacgctgaagccgataagtacggccacgagctcacgcgagctgccgagaagatttccgaggagaagttcgcgctcgaagctgagatcctcacgatgcggcagaacattgaagatctgaaatccaggatcgagagcctcgctcgagagaagtccctgctcaaatcatggtttgaggacttggagcaagtcgtggggcgaggaaggggcatcttcgccgattaaccgagtttttctatccagaacatcatcggtagctagaatttagcaagctagtaacattttgttttgttttctggtacccataccatcttgcgaaattgagatacgtcagtgtacttcctttttgtttgctgaatcttaaacttagacgtgatggatggtggtgatgtactggtaatatatgaaatattatactgaaccgcgctcgacgtcaataataagattcctatagtgcatctaaaagttctgtctcaatgtaagtccagttcggatactgatactgttcatattgtttgaaaatcatgttcttgcataattttttt

SEQ ID NO: 29355 - DNA, 1963 bp, Zea Mays
aaaaaagagagcgagtctcacacggtcacaccacatggctggcgagcggcacgtcaccatgtgggagaatttattcgcttgtccatttctcccacatacccctcccctctccaccgcccatctcttcctcctccagtcccgaaggaaggtctcaggtctggctggcctaccaccaagaacacacgctgcggcctgcggctgcggtcacgctactcaagtgtgaacaaaaaggagcttggcggcggccgtgaccggcgctggagagtggagatcttggacgcgtgcgacatcctggtctccgctctgtgcctctggtcttcgaaggcgccgccaccctatttttttttttaaaaaaaatcctaagatagtttcttcagtccgacaccgcttctagcttcccctcggcgatctgtgaagctatgaagccacctctcgagaggaacccgactaagaagcgccactcgtggtggtgggacagtcacattagccctaagaactcgaaatggctcgccgaaaatctcgaagaaatggacaagcaagtgaaggaaatgctccagctgatcgaggaggacggcgactccttcgctaagaaagcgcaaatgtattaccagaggcgtccgatgctcgtcacccacgtcgagaacttctaccgtatgtatcgtgctctagccgagcgctatgacaatgtaaccggcgagctgcgcaagaacatccctacaaggctgcagacaaccggatttttaaccagttcagagtacggttctgagctgcagaggtcgccctcaccgtctcctgagccgttacagaggtcgtggacaagggagcagagccctagggccgctggcttcgacttcttcctgagcaataggagcaatgactcgccacctgtctacaggaaggaacccgaggacgcggcatcgcagtcggagtctgacgcgaagtctgcagacggtgaggatgatggcatcgcctacacgctgcaccagagagttcttgagctagaggacgagctcaatgcgacaaaccagaaactacaagatgcaaacgagaagcttgaggttctggaggaaaagagcttgaggtgccattgcgattataaagagaatggaaacggtgctcagcgaactacagaagtttcaggcaaagagggggagctggaagccgaaatcgtcaatctccaggagcaagcggactcggcaagaaggcgattcgaagaggcattgtctgaacgagatggagaaatcagcaagctaaagcaagagcttgctggtgcttctgagaagctgcagcgagagaagtacgccaatggcgtgcaggtatctgagctgcagcgatcggttgaacacatcaggtccgaactagagagagtttctgaagagaaactactgtccgagaacaagattaaggagctggaggcagcaaacgctgaagccgataagtacggccacgagctcacgcgagctgccgagaagatttccgaggagaagttcgcgctcgaagctgagatcctcacgatgcggcagaacattgaagatctgaaatccaggatcgagagcctcgctcgagagaagtccctgctcaaatcatggtttgaggacttggagcaagtcgtggggcgaggaaggggcatcttcgccgattaaccgagtttttctatccagaacatcatcggtagctagaatttagcaagctagtaacattttgttttgttttctggtacccataccatcttgcgaaattgagatacgtcagtgtacttcctttttgtttgctgaatcttaaacttagacgtgatggatggtggtgatgtactggtaatatatgaaatattatactgaaccgcgctcgacgtcaataataagattcctatagtgcatctaaaagttctgtctcaatgtaagtccagttcggatactgatactgttcatattgtttgaaaatcatgttcttgcataattttttt

SEQ ID NO: 29356 - DNA, 1994 bp, Zea Mays
ctccaccgcccatctcttcctcctccagtcccgaaggaaggtctcaggtctggctggcctaccaccaagaacacacgctgcggcctgcggctgcggtcacgctactcaagtgtgaacaaaaaggtccatgcttctcctccctttcgctcgcttccttttctctgcccatccacgtgaaaagcagcagcagtggtccctaagtagatcttggattcgtctcatcaatcacactccaccaggagtaacccgcacacgtagcgtagcagcaggagtaggagcttggcggcggccgtgaccggcgctggagagtggagatcttggacgcgtgcgacatcctggtctccgctctgtgcctctggtcttcgaaggcgccgccaccctatttttttttttaaaaaaaatcctaagtccgacaccgcttctagcttcccctcggcgatctgtgaagctatgaagccacctctcgagaggaacccgactaagaagcgccactcgtggtggtgggacagtcacattagccctaagaactcgaaatggctcgccgaaaatctcgaagaaatggacaagcaagtgaaggaaatgctccagctgatcgaggaggacggcgactccttcgctaagaaagcgcaaatgtattaccagaggcgtccgatgctcgtcacccacgtcgagaacttctaccgtatgtatcgtgctctagccgagcgctatgacaatgtaaccggcgagctgcgcaagaacatccctacaaggctgcagacaaccggatttttaaccagttcagagtacggttctgagctgcagaggtcgccctcaccgtctcctgagccgttacagaggtcgtggacaagggagcagagccctagggccgctggcttcgacttcttcctgagcaataggagcaatgactcgccacctgtctacaggaaggaacccgaggacgcggcatcgcagtcggagtctgacgcgaagtctgcagacggtgaggatgatggcatcgcctacacgctgcaccagagagttcttgagctagaggacgagctcaatgcgacaaaccagaaactacaagatgcaaacgagaagcttgaggttctggaggaaaagagcttgaggtgccattgcgattataaagagaatggaaacggtgctcagcgaactacagaagtttcaggcaaagagggggagctggaagccgaaatcgtcaatctccaggagcaagcggactcggcaagaaggcgattcgaagaggcattgtctgaacgagatggagaaatcagcaagctaaagcaagagcttgctggtgcttctgagaagctgcagcgagagaagtacgccaatggcgtgcaggtatctgagctgcagcgatcggttgaacacatcaggtccgaactagagagagtttctgaagagaaactactgtccgagaacaagattaaggagctggaggcagcaaacgctgaagccgataagtacggccacgagctcacgcgagctgccgagaagatttccgaggagaagttcgcgctcgaagctgagatcctcacgatgcggcagaacattgaagatctgaaatccaggatcgagagcctcgctcgagagaagtccctgctcaaatcatggtttgaggacttggagcaagtcgtggggcgaggaaggggcatcttcgccgattaaccgagtttttctatccagaacatcatcggtagctagaatttagcaagctagtaacattttgttttgttttctggtacccataccatcttgcgaaattgagatacgtcagtgtacttcctttttgtttgctgaatcttaaacttagacgtgatggatggtggtgatgtactggtaatatatgaaatattatactgaaccgcgctcgacgtcaataataagattcctatagtgcatctaaaagttctgtctcaatgtaagtccagttcggatactgatactgttcatattgtttgaaaatcatgttcttgcataattttttt

SEQ ID NO: 29357 - DNA, 2120 bp, Zea Mays
ctccaccgcccatctcttcctcctccagtcccgaaggaaggtctcaggtctggctggcctaccaccaagaacacacgctgcggcctgcggctgcggtcacgctactcaagtgtgaacaaaaaggtccatgcttctcctccctttcgctcgcttccttttctctgcccatccacgtgaaaagcagcagcagtggtccctaagtagatcttggattcgtctcatcaatcacactccaccaggagtaacccgcacacgtagcgtagcagcaggagtaggtaggtgggcagcaggctccttgtggtgtgccctgcatgtttcgcagcttgcttcttcgagcattgaccccttccgccccgtccgtcatcttccccacctctctctccgcaccgcaggagcttggcggcggccgtgaccggcgctggagagtggagatcttggacgcgtgcgacatcctggtctccgctctgtgcctctggtcttcgaaggcgccgccaccctatttttttttttaaaaaaaatcctaagtttcttcagtccgacaccgcttctagcttcccctcggcgatctgtgaagctatgaagccacctctcgagaggaacccgactaagaagcgccactcgtggtggtgggacagtcacattagccctaagaactcgaaatggctcgccgaaaatctcgaagaaatggacaagcaagtgaaggaaatgctccagctgatcgaggaggacggcgactccttcgctaagaaagcgcaaatgtattaccagaggcgtccgatgctcgtcacccacgtcgagaacttctaccgtatgtatcgtgctctagccgagcgctatgacaatgtaaccggcgagctgcgcaagaacatccctacaaggctgcagacaaccggatttttaaccagttcagagtacggttctgagctgcagaggtcgccctcaccgtctcctgagccgttacagaggtcgtggacaagggagcagagccctagggccgctggcttcgacttcttcctgagcaataggagcaatgactcgccacctgtctacaggaaggaacccgaggacgcggcatcgcagtcggagtctgacgcgaagtctgcagacggtgaggatgatggcatcgcctacacgctgcaccagagagttcttgagctagaggacgagctcaatgcgacaaaccagaaactacaagatgcaaacgagaagcttgaggttctggaggaaaagagcttgaggtgccattgcgattataaagagaatggaaacggtgctcagcgaactacagaagtttcaggcaaagagggggagctggaagccgaaatcgtcaatctccaggagcaagcggactcggcaagaaggcgattcgaagaggcattgtctgaacgagatggagaaatcagcaagctaaagcaagagcttgctggtgcttctgagaagctgcagcgagagaagtacgccaatggcgtgcaggtatctgagctgcagcgatcggttgaacacatcaggtccgaactagagagagtttctgaagagaaactactgtccgagaacaagattaaggagctggaggcagcaaacgctgaagccgataagtacggccacgagctcacgcgagctgccgagaagatttccgaggagaagttcgcgctcgaagctgagatcctcacgatgcggcagaacattgaagatctgaaatccaggatcgagagcctcgctcgagagaagtccctgctcaaatcatggtttgaggacttggagcaagtcgtggggcgaggaaggggcatcttcgccgattaaccgagtttttctatccagaacatcatcggtagctagaatttagcaagctagtaacattttgttttgttttctggtacccataccatcttgcgaaattgagatacgtcagtgtacttcctttttgtttgctgaatcttaaacttagacgtgatggatggtggtgatgtactggtaatatatgaaatattatactgaaccgcgctcgacgtcaataataagattcctatagtgcatctaaaagttctgtctcaatgtaagtccagttcggatactgatactgttcatattgtttgaaaatcatgttcttgcataattttttt

SEQ ID NO: 29358 - DNA, 1718 bp, Zea Mays
ctccaccgcccatctcttcctcctccagtcccgaaggaaggtctcaggtctggctggcctaccaccaagaacacacgctgcggcctgcggctgcggtcacgctactcaagtgtgaacaaaaagtttcttcagtccgacaccgcttctagcttcccctcggcgatctgtgaagctatgaagccacctctcgagaggaacccgactaagaagcgccactcgtggtggtgggacagtcacattagccctaagaactcgaaatggctcgccgaaaatctcgaagaaatggacaagcaagtgaaggaaatgctccagctgatcgaggaggacggcgactccttcgctaagaaagcgcaaatgtattaccagaggcgtccgatgctcgtcacccacgtcgagaacttctaccgtatgtatcgtgctctagccgagcgctatgacaatgtaaccggcgagctgcgcaagaacatccctacaaggctgcagacaaccggatttttaaccagttcagagtacggttctgagctgcagaggtcgccctcaccgtctcctgagccgttacagaggtcgtggacaagggagcagagccctagggccgctggcttcgacttcttcctgagcaataggagcaatgactcgccacctgtctacaggaaggaacccgaggacgcggcatcgcagtcggagtctgacgcgaagtctgcagacggtgaggatgatggcatcgcctacacgctgcaccagagagttcttgagctagaggacgagctcaatgcgacaaaccagaaactacaagatgcaaacgagaagcttgaggttctggaggaaaagagcttgaggtgccattgcgattataaagagaatggaaacggtgctcagcgaactacagaagtttcaggcaaagagggggagctggaagccgaaatcgtcaatctccaggagcaagcggactcggcaagaaggcgattcgaagaggcattgtctgaacgagatggagaaatcagcaagctaaagcaagagcttgctggtgcttctgagaagctgcagcgagagaagtacgccaatggcgtgcaggtatctgagctgcagcgatcggttgaacacatcaggtccgaactagagagagtttctgaagagaaactactgtccgagaacaagattaaggagctggaggcagcaaacgctgaagccgataagtacggccacgagctcacgcgagctgccgagaagatttccgaggagaagttcgcgctcgaagctgagatcctcacgatgcggcagaacattgaagatctgaaatccaggatcgagagcctcgctcgagagaagtccctgctcaaatcatggtttgaggacttggagcaagtcgtggggcgaggaaggggcatcttcgccgattaaccgagtttttctatccagaacatcatcggtagctagaatttagcaagctagtaacattttgttttgttttctggtacccataccatcttgcgaaattgagatacgtcagtgtacttcctttttgtttgctgaatcttaaacttagacgtgatggatggtggtgatgtactggtaatatatgaaatattatactgaaccgcgctcgacgtcaataataagattcctatagtgcatctaaaagttctgtctcaatgtaagtccagttcggatactgatactgttcatattgtttgaaaatcatgttcttgcataattttttt

SEQ ID NO: 29359 - DNA, 2811 bp, Zea Mays
ctccaccgcccatctcttcctcctccagtcccgaaggaaggtctcaggtctggctggcctaccaccaagaacacacgctgcggcctgcggctgcggtcacgctactcaagtgtgaacaaaaaggtccatgcttctcctccctttcgctcgcttccttttctctgcccatccacgtgaaaagcagcagcagtggtccctaagtagatcttggattcgtctcatcaatcacactccaccaggagtaacccgcacacgtagcgtagcagcaggagtaggagcttggcggcggccgtgaccggcgctggagagtggagatcttggacgcgtgcgacatcctggtctccgctctgtgcctctggtcttcgaaggcgccgccaccctatttttttttttaaaaaaaatcctaaggtgagatcgagctgctctttgctttgctttgctttgctttgctgcttgcgcggaatctggcctgcttgctttcacagttccacttcgttgcgtgtttcggtttattgattgatagatttcaatcgaagcttgcagattaggtttcttttctagctagatcctgcagcatctacgaggccaggccacggtcgactggttctccttcgatctagtcttccttcctttccttcctttctttctgaatgcgcatggtagtaccaccataacacagctatccttttggtgagacatccagttttctctgtctttgccaaagacaaaaaaaccccccgctattggtaatacaggcagaggtcgtcttgagaagacggatagctatgactgattatatattttttttgctgcacatgtttattaccgagtccattgctctgacgaactgatctcctgtaccattgttacatgtacctttgtttgaattggaaatcattcataccatattactatcaatccaactaacaggactaactaccttcccaaggatcgtacactaacttcttcatccgaagtaccttgaactagcatgcttgctggcatcactgtctgttacacgctgatgccgcactatttctagccttgattacccaacgccgagttcacctcaaatgcttccgttataggaaaacatgattctatatgccatactcatttttcgctgtattttaaccattttaactctcatatttgtgactgctatagtcactgtctctctctggtgctgctgcgcatttctgaatttttcagatagtttcttcagtccgacaccgcttctagcttcccctcggcgatctgtgaagctatgaagccacctctcgagaggaacccgactaagaagcgccactcgtggtggtgggacagtcacattagccctaagaactcgaaatggctcgccgaaaatctcgaagaaatggacaagcaagtgaaggaaatgctccagctgatcgaggaggacggcgactccttcgctaagaaagcgcaaatgtattaccagaggcgtccgatgctcgtcacccacgtcgagaacttctaccgtatgtatcgtgctctagccgagcgctatgacaatgtaaccggcgagctgcgcaagaacatccctacaaggctgcagacaaccggatttttaaccagttcagagtacggttctgagctgcagaggtcgccctcaccgtctcctgagccgttacagaggtcgtggacaagggagcagagccctagggccgctggcttcgacttcttcctgagcaataggagcaatgactcgccacctgtctacaggaaggaacccgaggacgcggcatcgcagtcggagtctgacgcgaagtctgcagacggtgaggatgatggcatcgcctacacgctgcaccagagagttcttgagctagaggacgagctcaatgcgacaaaccagaaactacaagatgcaaacgagaagcttgaggttctggaggaaaagagcttgaggtgccattgcgattataaagagaatggaaacggtgctcagcgaactacagaagtttcaggcaaagagggggagctggaagccgaaatcgtcaatctccaggagcaagcggactcggcaagaaggcgattcgaagaggcattgtctgaacgagatggagaaatcagcaagctaaagcaagagcttgctggtgcttctgagaagctgcagcgagagaagtacgccaatggcgtgcaggtatctgagctgcagcgatcggttgaacacatcaggtccgaactagagagagtttctgaagagaaactactgtccgagaacaagattaaggagctggaggcagcaaacgctgaagccgataagtacggccacgagctcacgcgagctgccgagaagatttccgaggagaagttcgcgctcgaagctgagatcctcacgatgcggcagaacattgaagatctgaaatccaggatcgagagcctcgctcgagagaagtccctgctcaaatcatggtttgaggacttggagcaagtcgtggggcgaggaaggggcatcttcgccgattaaccgagtttttctatccagaacatcatcggtagctagaatttagcaagctagtaacattttgttttgttttctggtacccataccatcttgcgaaattgagatacgtcagtgtacttcctttttgtttgctgaatcttaaacttagacgtgatggatggtggtgatgtactggtaatatatgaaatattatactgaaccgcgctcgacgtcaataataagattcctatagtgcatctaaaagttctgtctcaatgtaagtccagttcggatactgatactgttcatattgtttgaaaatcatgttcttgcataattttttt

SEQ ID NO: 29360 - DNA, 6527 bp, Zea Mays
gtcgcaagtagcgctgcacgctgctgcattcttccgcctcacaggctctcagccgccgctgacgcgatgcccccgccggcggcgcccgccactaaccgcgttgccctctacctccgccgcgcgcgcctcatcgactccctgcgcgtccgtctgcgttcctcctccccttcctcacctcctgcgctcccacccgacgaccccgtggtcgcgctccacgccatccgcgcggcgcccacggcgtcctgcgcgctctccctttttcgcgcgatcccctcccaaccaccgccgccgctcccactctaccaagctctcgccgcccgcctctcctccctcgccgcgctctccgacctccgcgcccacctcgcttctttcccgctgcctgctccgccgctcgcgcggctccgcctcctcgccgccgcgggggaccgcgcctccgcgctcgaagccttcggttccctcccggccaccccgcgccgccctgcggaggcgcacaacgtcgtcatcgaactccacgcgcggggcggcgatcatgacgccgccgtcgaggcgttccgccgcatggtccgcgagggcgcgctcccgaatgcacgcacgtacaccgtcgtcatcgcccacctcgcctccgcggggtttgtggaccaggcgctcgaggtgttccgcatcctgccgtcgctgcgcgtgcggcggaccacccgacagtacaacgtgctcgccgaggcgcttgcgtcgggaggtaggtttgaccagcttcggtggctcgtccgcgagatggcggctgtggacggcgtcatgcccgggccgcagatgcgcgctgccatcgctgccctgcgggaggctggtcacgttgatggcacaaaggatttcgtcgaggagctttcacccaacgcaaggatcgggtacgccgtggacgacgtcgagggtgagggagacggcgaggaggaggacgacgacgacgaggacgaaggcgaggtcaaggacagaggcaacggagagaagcaaacactgaagccatggctggacccgcgtgagctcgccagggcgttggacggctgggactcgcgggaggtggccgagctagagggtgccgggctcgtctggacgccgcggctggtatgcaagctcctgcgagcattcaagaaagccgagacagcgtgggagttcttctgctgggtggcgtgccgccccggtgggttcgcgcacgaccgccacaccgtggcgaggatgatggcgatcctcgcccgcaccggccacgtcgagctggtggagcgcctgctcgctaaggtgcgtgccgacggcatcctcctcccgcttgccacggtgcggctcgtcatcgacttctacggcctctccaagaaggccgacgcggcggtcagggtgttccaggaggctgagtcaatctgcggccccatctcggggcccaaccttgcgctgctctactcgtctcttctgcggacgatgacgaagtgccggagagggcccgacgccatggacctcctcgaggagatgatggcgcgaggcgtgctcccggacctgcagaccttctccggcctgatggagcaccttgctggcgccggcgacctcaagggcgtgcaccggctgctcggtctggtccggcagtgcgagctgcagcccgacggatacatgtacagcgtgctggtccgggcatactgcaagcgggagcgtgcggcgctcgcgctgagggtgtttgacgaaatgcgcgccgcaggggtcacccccgacgcacccaccaaggcactgctggtgaagagcctgtggcgggaggggaagctccgagaggcggcgctggtggaggaaaggtgcaatgatgtagtggatggccttccagatgtgtcaccggggcatgtgtggacggccagcgccgcggacttgaagaaggtgctcgacatttactccggctgcctggatcaacctgctgctcagacttcaacggggtgatgcactgatgtcattgcccattggcgtttgatcacagaacagaagtcggattccagaatggtaacctcatcgtggcaatatttggattggattggttgcttgttgcaatgtggttgtagaagaatggaacaagcatggcagagaggaggccgagcctgtggcagaaatgaagaaccgaagaagcattgcccaagggtcatggctcgagtgccaaagtgagggattgatgctaccttcagtgcttcagtagaatatgttcagcacttaattatgtccaagaagtccacacagagcaggtagttatggtactttcatcgatttcagttagtaaaagttgatactgtggtgttactcattttttgttacatggataaaactgagcatcatccttgatcaaacaaatgcgtggtagacaaaggcagtacttcaaacaaaagcgacggcaacaacagcggccagaactgcagtactaggatgacaaagcaagaggtcaatcttcacatgatcaacagagtggatcacttgatgttctaaacatcaatgatctggctactccaaataatcatcacaatggatctgcaggttagtttcctatatctattttctgtggtttattgctttactcttctagcataatatttgtaatgcctggctaagtagaacaagtaatatcactcttggcagaattttttggtataattgttttattatcatgccagatgcagagggtgctattccacaagtggattgcactctttcagatgctatcttactctccttcccaaacaggttgaggctgtgcatcctggggattttagaccaatcagtttggttcacagttttgctaaacttctcactaaaattctggccaacagattagcacctgagctacataaaatggtcagcataaatcaaagtgtcttcatccgagatcgatgtattcatgataactttcttatggtcaaccaaactgtcaagatgctgcacaaaaagggcatccctgctctcttcttgaaattggacattaaaaaggcatttgattctatgagctgggcctttctactagaaattcttcgtcatctgggttttggacagatttggtgcaacctgattctgaacctgctcatgacatcctctacccaagttcttgtgaatggagttcctggccagcctatatgtcacaaaagagggttgaggcaaggaaatcccttatcccctcttttgttcatccttgtcatggacgttcttaacagccttttcatcaaagctaatgagtgtgggctattgcaagcccttgctggtagaaatatcaaccaaagggtctcaatgtttgcggatgatgtagctgtctttatcctgccttacttccttagagactgggttcagagaggaactgcagctttggtttttggcaggtgccaagaacttgcgtactcttttttatcctggttagaggaaggtttttatcctctttatttgttgtggtgttagagtagtgggtgcgtctggtgtgcgtatgttgtgtaagtctggtgtgtgttggagtgtttttttctgttttgtttcaagctccaggccttttcccctcttcttttaatataatgattcttttaatgtcatgatacgcaactatccggcgtattcgagagaaaaagaggcgataaagatcacttctttgtgcaatatcaacatgaaggatgcaggctctcagccaaggtcagtatatccacgctgttggtaagaatgttcctgaatttgatctgttttatgaaatgtcagtagtgtggattggcagattgtcttcaccctttggtcatccagatgttgcagaagctgttgattatcgtgaggatcctcttggttgtaaagtgtccccatctataaactatggcaccaggcagaaaaattaagatctggaactccaaagcggtgatgtttccttcactattagaaatcatatgtaatatgtattgttcctactgattgaattaaagctcaattctatccaactatttgaaaaaaaaggtccatcaactcgcaagtgtattatatttgggacattggccaacactttgactaggaatttctataagaatatgaatcttcaaaatatgttgattatatatatactatacaatcagtttccatgataagcctatcatgcgccacgaatctttgtaattctttaatgtattcgtgatcaaaattttaaaagtttgtctggtagaaatcctagtgaagggtagttctggtgcagtggtgagtgctgtcttattgagtcatcaggtcgtaggttcgaagcatcttctccgcatttgcatggaggcttgtctcggtttatccttttcctagatcccactcatgtgggagcctcagtcactgagtctgcttttttcgagatcctagttttggtagcaattattgcttgaaactagaggagaaaggatcggttgatgtttgtagctgtggaattgaataatttatttgtaaacgtcatttttgcttttattggtttgtaagttgcattgttgatgttgatctagttgttatatataattgaaacacatgtctgactatgatttgtagttgctgtaatttcacatatttatttgaagtgttattaaaactacatttaaatgtcaaaacgctaattagaggttgaaaccgcgttttggcgttctaaactgtaaagagcagtgtttcatgcgctttagatcattagctacttttgagccagtctgttagttacttttgggtccaatccagctcatgggtgaagtttaggtaagccattaacctctctgttttagtttttaacttcatgttattatctaaaattatgagatattggtatttttcttatattatttaaaactttgtttaacgtttcaaagtcaaaactcgttgtcacttccggatttaaggacaaattcagacatattttatatgtgtggcaggatcaagtttcacacatatggtgactcagtgtatagaaaacaatgtcacatttttattatataataattctaaaaaaaatagctaaataaatacacatgtgttgaatgtgtgggggtcggtggagtgtttgtatgtgttcttgcctcttttttcctctctcttattataaagatacacatgtgtgtttgagaaaaaaaattgcaggtgcacagaaaaccactcgaactgaataatgattggcattcaaagtctgctttggcccagctctgactacgatgaacagtctaggaagacaacacagagctggtaatttgggcctccacgttacggcgtactagcttctcatctccaactacgcaccaggtggcgataagaccttatcctgcgcgaccacttggcgccaagggtgtccatccacgtgggaggagcgggctgacctggcgcccctccagctcatcctatctacatatctgtgccgctctccccggggcgccgggccccggccagccgctcctgccagtgccatcacacgtcccgagagcagcgcctgagcggagcccaggacccatggccgtcaccgccgtcgcggcgtctctgtccgtggcgcagggtctcgggaagcctctctgcgccggcaggaacgcgacgtcgcgccgggccgtcgcgctcgcgccccgtcgttcggcgacccggatggccgtcgtccgggcgtcgtccgcgcatcagaagcagcacccggccaaggagtgggcggccgcggcggccgtggcggcggcgctggtgctgccggaggtcgcggaggccgcgcccgggatctcgccgtcgctcaagaacttcctcctcagcatcgtctccggaggcgtcgtgctcgtcgccatcgtcggcgccgtcgtcgctgtctctaacttcgatcccgtcaagcggcgctgagctcaatcaactacacgtgcacacatgcatgcagcgttgtatgttgcattgcatgctgtacgccgcctgtacctatgtactacttcccaatgtaaacagcgtttaatctgtgaatcttttgccgtgtaaatgcgattttcacatacatgttcagctttcgtccatgtttcgcccgagcccgatcaagatcctcaacgtgcggtcggtttttgttctcacgtaggagtatatgaggttcttggaactttgtactcctttttttgtgttacggactagtatggttcctttttctgctctgtttttttttttggttttcactgtgaaggaattccttcctcgcatgatctcttttctgatcattggttgatggatgatgagggcactgaacttttcaagtgggaaaggtcattttgtcggtcgggcacccaccaagcaagaaaaaaaatcccattcaaataacacttttggtccttctgcttggtcttttgacatggtcgatggttcagagaaaaaggaggagcctgataaagtatcggagggtctacttgtaactgtgtatggatgggctgtatgtattccttattgttctttacgtcgtgcaaaattattacgaatccgttgctgatccttttcaaaattgttctttttttactgaagaatcatgcgtatctgctgcgataatg

SEQ ID NO: 29361 - DNA, 6832 bp, Zea Mays
acaggctctcagccgccgctgacgcgatgcccccgccggcggcgcccgccactaaccgcgttgccctctacctccgccgcgcgcgcctcatcgactccctgcgcgtccgtctgcgttcctcctccccttcctcacctcctgcgctcccacccgacgaccccgtggtcgcgctccacgccatccgcgcggcgcccacggcgtcctgcgcgctctccctttttcgcgcgatcccctcccaaccaccgccgccgctcccactctaccaagctctcgccgcccgcctctcctccctcgccgcgctctccgacctccgcgcccacctcgcttctttcccgctgcctgctccgccgctcgcgcggctccgcctcctcgccgccgcgggggaccgcgcctccgcgctcgaagccttcggttccctcccggccaccccgcgccgccctgcggaggcgcacaacgtcgtcatcgaactccacgcgcggggcggcgatcatgacgccgccgtcgaggcgttccgccgcatggtccgcgagggcgcgctcccgaatgcacgcacgtacaccgtcgtcatcgcccacctcgcctccgcggggtttgtggaccaggcgctcgaggtgttccgcatcctgccgtcgctgcgcgtgcggcggaccacccgacagtacaacgtgctcgccgaggcgcttgcgtcgggaggtaggtttgaccagcttcggtggctcgtccgcgagatggcggctgtggacggcgtcatgcccgggccgcagatgcgcgctgccatcgctgccctgcgggaggctggtcacgttgatggcacaaaggatttcgtcgaggagctttcacccaacgcaaggatcgggtacgccgtggacgacgtcgagggtgagggagacggcgaggaggaggacgacgacgacgaggacgaaggcgaggtcaaggacagaggcaacggagagaagcaaacactgaagccatggctggacccgcgtgagctcgccagggcgttggacggctgggactcgcgggaggtggccgagctagagggtgccgggctcgtctggacgccgcggctggtatgcaagctcctgcgagcattcaagaaagccgagacagcgtgggagttcttctgctgggtggcgtgccgccccggtgggttcgcgcacgaccgccacaccgtggcgaggatgatggcgatcctcgcccgcaccggccacgtcgagctggtggagcgcctgctcgctaaggtgcgtgccgacggcatcctcctcccgcttgccacggtgcggctcgtcatcgacttctacggcctctccaagaaggccgacgcggcggtcagggtgttccaggaggctgagtcaatctgcggccccatctcggggcccaaccttgcgctgctctactcgtctcttctgcggacgatgacgaagtgccggagagggcccgacgccatggacctcctcgaggagatgatggcgcgaggcgtgctcccggacctgcagaccttctccggcctgatggagcaccttgctggcgccggcgacctcaagggcgtgcaccggctgctcggtctggtccggcagtgcgagctgcagcccgacggatacatgtacagcgtgctggtccgggcatactgcaagcgggagcgtgcggcgctcgcgctgagggtgtttgacgaaatgcgcgccgcaggggtcacccccgacgcacccaccaaggcactgctggtgaagagcctgtggcgggaggggaagctccgagaggcggcgctggtggaggaaaggtgcaatgatgtagtggatggccttccagatgtgtcaccggggcatgtgtggacggccagcgccgcggacttgaagaaggtgctcgacatttactccggctgcctggatcaacctgctgctcagacttcaacggggtgatgcactgatgtcattgcccattggcgtttgatcacagaacagaagtcggattccagaatggtaacctcatcgtggcaatatttggattggattggttgcttgttgcaatgtggttgtagaagaatggaacaagcatggcagagaggaggccgagcctgtggcagaaatgaagaaccgaagaagcattgcccaagggtcatggctcgagtgccaaagtgagggattgatgctaccttcagtgcttcagtagaatatgttcagcacttaattatgtccaagaagtccacacagagcaggtagttatggtactttcatcgatttcagttagtaaaagttgatactgtggtgttactcattttttgttacatggataaaactgagcatcatccttgatcaaacaaatgcgtggtagacaaaggcagtacttcaaacaaaagcgacggcaacaacagcggccagaactgcagtactaggatgacaaagcaagaggtcaatcttcacatgatcaacagagtggatcacttgatgttctaaacatcaatgatctggctactccaaataatcatcacaatggatctgcaggttgaggctgtgcatcctggggattttagaccaatcagtttggttcacagttttgctaaacttctcactaaaattctggccaacagattagcacctgagctacataaaatggtcagcataaatcaaagtgtcttcatccgagatcgatgtattcatgataactttcttatggtcaaccaaactgtcaagatgctgcacaaaaagggcatccctgctctcttcttgaaattggacattaaaaaggcatttgattctatgagctgggcctttctactagaaattcttcgtcatctgggttttggacagatttggtgcaacctgattctgaacctgctcatgacatcctctacccaagttcttgtgaatggagttcctggccagcctatatgtcacaaaagagggttgaggcaaggaaatcccttatcccctcttttgttcatccttgtcatggacgttcttaacagccttttcatcaaagctaatgagtgtgggctattgcaagcccttgctggtagaaatatcaaccaaagggtctcaatgtttgcggatgatgtagctgtctttatcctgccttacttccttagagactgggttcagagaggaactgcagctttggtttttggcaggtgccaagaacttgcgtactcttttttatcctggttagaggaaggtttttatcctctttatttgttgtggtgttagagtagtgggtgcgtctggtgtgcgtatgttgtgtaagtctggtgtgtgttggagtgtttttttctgttttgtttcaagctccaggccttttcccctcttcttttaatataatgattcttttaatgtcatgatacgcaactatccggcgtattcgagagaaaaagaggcgataaagatcacttctttgtgcaatatcaacatgaaggatgcaggtgaggctgccatttctgcataaacagtcaaataaactaattaagaataaactactttcttgtgctatggtatttcaatttttcaacataggcacattggcaacaacatatgttgtgatttttaacagactaggtactcccttggtccctccagtctcttctacatgttgaataggaatttgttgtggtttttagagttttttttaacaaagtggcatgagctctgcctttcaattaataaaagagtatatgtacaaggtagttattaataattttccctatctctgtatttggcatggtagcaaaaggtactaaaaatgttggtgaattgtttttcttttttcgaaaatagttcatagcctaagttttaaaaggttggctggacaatctacaggatgccatctaatttggactggaagtagttgtagatatatgtcttcctctgttgatttatctaaacaaagaatgaacttttaaggtaatattactttgtgaagtgtgtaaagagccctttcgttacattaaggtttatcatgaacttctattatgcaggctctcagccaaggtcagtatatccacgctgttggtaagaatgttcctgaatttgatctgttttatgaaatgtcagtagtgtggattggcagattgtcttcaccctttggtcatccagatgttgcagaagctgttgattatcgtgaggatcctcttggttgtaaagtgtccccatctataaactatggcaccaggcagaaaaattaagatctggaactccaaagcggtgatgtttccttcactattagaaatcatatgtaatatgtattgttcctactgattgaattaaagctcaattctatccaactatttgaaaaaaaaggtccatcaactcgcaagtgtattatatttgggacattggccaacactttgactaggaatttctataagaatatgaatcttcaaaatatgttgattatatatatactatacaatcagtttccatgataagcctatcatgcgccacgaatctttgtaattctttaatgtattcgtgatcaaaattttaaaagtttgtctggtagaaatcctagtgaagggtagttctggtgcagtggtgagtgctgtcttattgagtcatcaggtcgtaggttcgaagcatcttctccgcatttgcatggaggcttgtctcggtttatccttttcctagatcccactcatgtgggagcctcagtcactgagtctgcttttttcgagatcctagttttggtagcaattattgcttgaaactagaggagaaaggatcggttgatgtttgtagctgtggaattgaataatttatttgtaaacgtcatttttgcttttattggtttgtaagttgcattgttgatgttgatctagttgttatatataattgaaacacatgtctgactatgatttgtagttgctgtaatttcacatatttatttgaagtgttattaaaactacatttaaatgtcaaaacgctaattagaggttgaaaccgcgttttggcgttctaaactgtaaagagcagtgtttcatgcgctttagatcattagctacttttgagccagtctgttagttacttttgggtccaatccagctcatgggtgaagtttaggtaagccattaacctctctgttttagtttttaacttcatgttattatctaaaattatgagatattggtatttttcttatattatttaaaactttgtttaacgtttcaaagtcaaaactcgttgtcacttccggatttaaggacaaattcagacatattttatatgtgtggcaggatcaagtttcacacatatggtgactcagtgtatagaaaacaatgtcacatttttattatataataattctaaaaaaaatagctaaataaatacacatgtgttgaatgtgtgggggtcggtggagtgtttgtatgtgttcttgcctcttttttcctctctcttattataaagatacacatgtgtgtttgagaaaaaaaattgcaggtgcacagaaaaccactcgaactgaataatgattggcattcaaagtctgctttggcccagctctgactacgatgaacagtctaggaagacaacacagagctggtaatttgggcctccacgttacggcgtactagcttctcatctccaactacgcaccaggtggcgataagaccttatcctgcgcgaccacttggcgccaagggtgtccatccacgtgggaggagcgggctgacctggcgcccctccagctcatcctatctacatatctgtgccgctctccccggggcgccgggccccggccagccgctcctgccagtgccatcacacgtcccgagagcagcgcctgagcggagcccaggacccatggccgtcaccgccgtcgcggcgtctctgtccgtggcgcagggtctcgggaagcctctctgcgccggcaggaacgcgacgtcgcgccgggccgtcgcgctcgcgccccgtcgttcggcgacccggatggccgtcgtccgggcgtcgtccgcgcatcagaagcagcacccggccaaggagtgggcggccgcggcggccgtggcggcggcgctggtgctgccggaggtcgcggaggccgcgcccgggatctcgccgtcgctcaagaacttcctcctcagcatcgtctccggaggcgtcgtgctcgtcgccatcgtcggcgccgtcgtcgctgtctctaacttcgatcccgtcaagcggcgctgagctcaatcaactacacgtgcacacatgcatgcagcgttgtatgttgcattgcatgctgtacgccgcctgtacctatgtactacttcccaatgtaaacagcgtttaatctgtgaatcttttgccgtgtaaatgcgattttcacatacatgttcagctttcgtccatgtttcgcccgagcccgatcaagatcctcaacgtgcggtcggtttttgttctcacgtaggagtatatgaggttcttggaactttgtactcctttttttgtgttacggactagtatggttcctttttctgctctgtttttttttttggttttcactgtgaaggaattccttcctcgcatgatctcttttctgatcattggttgatggatgatgagggcactgaacttttcaagtgggaaaggtcattttgtcggtcgggcacccaccaagcaagaaaaaaaatcccattcaaataacacttttggtccttctgcttggtcttttgacatggtcgatggttcagagaaaaaggaggagcctgataaagtatcggagggtctacttgtaactgtgtatggatgggctgtatgtattccttattgttctttacgtcgtgcaaaattattacgaatccgttgctgatccttttcaaaattgttctttttttactgaagaatcatgcgtatctgctgcgataatg

SEQ ID NO: 29362 - DNA, 966 bp, Zea Mays
atccacgtgggaggagcgggctgacctggcgcccctccagctcatcctatctacatatctgtgccgctctccccggggcgccgggccccggccagccgctcctgccagtgccatcacacgtcccgagagcagcgcctgagcggagcccaggacccatggccgtcaccgccgtcgcggcgtctctaacttcctcctcagcatcgtctccggaggcgtcgtgctcgtcgccatcgtcggcgccgtcgtcgctgtctctaacttcgatcccgtcaagcggcgctgagctcaatcaactacacgtgcacacatgcatgcagcgttgtatgttgcattgcatgctgtacgccgcctgtacctatgtactacttcccaatgtaaacagcgtttaatctgtgaatcttttgccgtgtaaatgcgattttcacatacatgttcagctttcgtccatgtttcgcccgagcccgatcaagatcctcaacgtgcggtcggtttttgttctcacgtaggagtatatgaggttcttggaactttgtactcctttttttgtgttacggactagtatggttcctttttctgctctgtttttttttttggttttcactgtgaaggaattccttcctcgcatgatctcttttctgatcattggttgatggatgatgagggcactgaacttttcaagtgggaaaggtcattttgtcggtcgggcacccaccaagcaagaaaaaaaatcccattcaaataacacttttggtccttctgcttggtcttttgacatggtcgatggttcagagaaaaaggaggagcctgataaagtatcggagggtctacttgtaactgtgtatggatgggctgtatgtattccttattgttctttacgtcgtgcaaaattattacgaatccgttgctgatccttttcaaaattgttctttttttactgaagaatcatgcgtatctgctgcgataatg

SEQ ID NO: 29363 - DNA, 5039 bp, Zea Mays
agtcatctcagcatttattaatttattatccatctggcgccaaaagtagaaatgtgtacacaggcacacgcgccaaacacattaaaaaaacgaaaaacattcaatatttaaaattgacgttcgtctgccgttgttctgccactgctcctttctcacgcctataaaacacactctacctcgagcatttaaagcactcaccagcctattaaacacaaaacgcaaacatcacatatgtcgatcgatcttaatcagctgccattggatggaaatgaagatgatgtacctgaggttggtggagtctttccttttgttcctccacatcaaatactccattcttttgatctaaatatccaaatggatgaacaacaagagaacctgcatctaggtaaacattcacaagataatgaacttaatgttttggaggactaccttaatgattatggggtttatgccgattttgacactgtgttcgatcaagatgtgttgtcgaattcagaagacaatgaagaagagcatgaaattcagcccggtggactagatctgtcacatacacaaaggaaacaagtatatgaagcactgctggcgaggagtaataatggaaaacaaagaaagaacaacacaatgatagttgcaaaccagttctatgttagccatcgtgcagtccaacgtaatttgaatagagcaaagggatgttgtcagcgtggtgagccagttgatgtttcatcaaggaaaccaaagcgttgtggcaacaaaaaaaagtcagttgatctatcaacaattgatgcaatcccctttcataagaggagtactatacgaaaactagcacgtgaacttagtgtaagcaaaagttggttacataggcaattcaaaatggccttttaagaaggcacccaaactcattggaaccttgtttgaaggaggaaaacaaaaaagagaggctaagatggtgcctttcgatgctagaccaaagtactttgccaaacaatcccaaattcattgaaatggataatgttatccatatcgatgagaagtggttcaatgcaacaaaaaagacaaggaacttttacctgctaccagaagaggaggacccatataggacagttcaaaacaaaaattcaatagataaattgatgttcttgggagcagttggcaaaccaaaaaaggatgatgaaggtaacctaatctttaatggaaaaataggcatatggccttttgttagaaaggaaccagcacaaaggagaagccgtaatagggacagaggaacactaatgactaagtgcatcaatgttgacagaaacactatgcgatcatttcttattgccaaagttctatcagctatcaaagcaagttggcctagatcagaagcacatagaactatatggatttagcaggaaaatgcaaggactcatgttcgtcatgatgatcttgagttttgagagcacctagagggggggtgaataggtgatcctgtaaaacttaaacttatagccacaaaactttgattaagcgttagcacagttaatgccaagtggctagagaggagtcaaaacacaataaccacaagagttcaatcacagagatgacacggtggttatcccgtggttcggccaagtacaaaacttgcctactccacgttgtggcgtcccaacggacgagagttgcactcaactcctctcaagtgatccaatgatcaacttgaataccacggtgttcttgcttttcttttctcaatcccgtttgcgaggaatctccacagcttggagcctctcgcccttacaaaagatgttcacagagaatcacggagcaagggagggattagcaactcacacacgacacaaagatcacagcgagtacgcacacacaagacccagacttaagctcaagagactagcacactagaacggagctcaaatcactagaatgtcgaacaagtgcgcaagattgatgtgtgagtgatcaagagtgctcaaggaatgcttggtctcctcctccatgtgcctaggggtcccttttatagccccaaggcagctaggagccgttgagaacaaatctggaaggccatccttgccttctgtcgtcgggcgcaccggacagtccggtgcacaccggacactgtccggtgcccgatttctttccttaaacagcccagtcgaccgttgccaaccgttgcagatctggcgcaccggacatgtccggtgcacaccggacagtccggtgccctctcccgaccgttggctcgaccacgtgtctcgcgcagatcgcgcggccgaccgttggctcggccgaccgttggctcaccggacagtccggtgcacaccagacagtccggtgaattatagccgtacgccgtcggcaatttcccgagagcggcctcttcgcccgaggcagcctggcgcaccggacactgtccggtgcaccaccggacagtccggtgccccagaccgaactgagtcttggctgtacacagccaagtccttttcacctcttttcttcttctttctgtttctaacacttagacaagtatattagtacacaaaaccaatgtactaaggcttagaaacatacctttacttgtgatttgcactttgttcatccatgggcataggttcacatttaagcacttgtgtttgcactcaatcaccaaaatacttagaaatggcccaaaggcacatttccctttcaatctccccctttttggtgatttatgccaacacaacataaaacaactagagcaagtgcaaaatcacttcaaatgaaataaattcgagttttattcaattttggcatatatggatcatcctttgccaccacttggtttgtttttgcaaaccaagcctaaatctctatctctaagtcaaacacacatgttgaagcacaaagagagtcattccaaaagagattgatcaaagatttcaaaaactccccctatttcccataatcaacacttctccccacaagaagccaacatttgacagaagagacaatacaagagttttgaacaaaccaaaagctctattctaaaaatttctcaagtggtagctgatccatttattgctttggcctttattttctccccctttggcatcaagcaccaaaacgggatcaatcttggccttctaaccccattgcctcaccaaaatcttcacttaagagcaaatggcaataagagttcatgagatgaacttggaataagttaccctctcatcggagtgcagtggaagtctttcatggtccaagtccaccttttgcctttcaattctccttcaagactaaatcaagcaaactcaagcatatagttagtctcaaagggtcatgtaacaccccggggtccacaaacaccccaggatgctactaaactacacatctaacattcatatataaaatttcgacagcatctcctttgaaaattgcataaacgggggaagcaacaaagtataaatagatatcatgataagaaaacatataatacattaataatctgctagcaatgggaagacaaccataacaacaatgaactgaattaatcagtgcgcacgactagttaaaaacaaacatcctttgacaagaagtttctaattaaatcatggctgtgtctgggcagcattattatgagagtgaaggtggatgtgctgctacttcccactccccttgatgagcaacaagcacctgcattgagtaatgcaagagtgagatgaaacatctcagcaagctaattgttctgacgagatatttaaaccacaaattgaattcatcaacattttaaaagagtcacaataaaaaaatcagaaatacttgtagatatagaactcagtagtcccactataaccaataccatctcatttcctcgaacaaccacaataggttctataacacttccctgcgtcaacaatacctgcaaatatcacttcaatgtatgcataggaatgcaatgtgtaggtactctatcttcatacctctgggggtataaaaccacatcatctgcaaatatcacttcaatgaatgcatatgagtgcaatgcatatgtcctctgccttcatacctctaagggtatgaagccgcatcgtaccccttctcgggcaacgtacgatgctaagttgtaccggtacggtcggaccataggtcacgacaaaacttcatatgcaaatgagtcatgcaatgtatatggcatgctacatttatcaataaacttcacttccttcagatacaacacaaacctcaaataatacttcatttaccttcagatacaataccaacctcaaataatacttcatttaccttcagatatgtgaattaatctcgtgagtcatactcaaatcataatcatcatcaatatatgattgagcattagtataatgcaagcaagtaaagcatcaccatagagtccaattatgaaagaatctgatacttctgaatattagagtgtaggcaatagaaataacaggtcagaacggaagcaaccaccgctacattcacttgtctgtactagacatgatctggagtgtagccacctgctagtgggcataaaacttagtacaaatatttcacaaacatttgccatcaatcaacaaaacactcctacacttgaaaccaagacccagtggaaagactcccaccctgaaccacatgccatacagcaacaacgctgtttgttaattttgtatctttaaaattaaaacagcggtgatatcaagcaaatactctaggagtatctacacaaaatactctacaacttcagtattcaatagataattaaattctgccatctacaagttctaaaacatctgacaagataactgactgaatctgttttagacagcagtatagttaactttaaaattcgatatatcccaaactactgaaccaaaaattatgaaattctgctggaagtaagaacttttatccctctacaaaagtctccatagttggaagagccaattcggccatttactagatgaaacccaccagtgaacagacccactcatttttgtcaggtaaacaggaacagccacagtaaaacaaacataactggagtttcacaa

SEQ ID NO: 29364 - DNA, 1985 bp, Zea Mays
ctcgcaacaatatcttctctttcttctgtaaaaatataaaagacccgtctccgtctcgggggagcaggagagggggagaggccaagaacccagccgcgaagccaagcccatctgatccggcccctgctgccctgccccagctcgtctctcaggtcgccttgccgttgccggttccgcgcccgggcccggctcagagtcgcgagctcgtctcgcagatccggcttcgcttgcttgaattctgttctttgggagcaaagaggtgctggccggtggcgtggcttggtgctctggggccggcgagtttttttttttgcgtccgctcgctctgcctgtagtcttcttgctgcggcggcggggtggagatgggggtggcgggggagaagttccagctggggacggtgggggcactcagcctctcggtggtgtcctccgtctccatcgtcatctgcaacaaggctctcatgagctcccttggcttcaacttcgccactactttgacaagctggcatctcctggttacattctgttctctccatgtggcattatgtatgaagctgtttgagcacaaacctttcgatgcaaggactgtcatgggattcggagtgctcaatggcatatctattggacttcttaacttgagtctgggtttcaattctgttggtttctatcaggtatgcatcccttttctgtttgtattcagccaaacttaaggtttattgggtgacctggcaccgacttcttattcggcactcatagcatgacatgttatcatcggtaaagatgacaaagctggccataattccctgtactgttatactggagacccttttcttccggaagaaatttagccggaatatcaagctttcccttagtgtgctccttcttggtgttggtgttgcaactgtaactgatctgcaactcaacgttatgggatctgtactgtccctactggcaatcatcacaacctgcatcgctcagatcatgacaaatacaatacagaagaagttcaaggtatcttcaacacagctcctgtaccagtcatgcccataccaggcattgacgttgttccttgtcggtccattcctcgatggatttttgaccaaccaaaatgtctttgctttcgactacacaactcaagttctgtttttcatcgtgctgtcgtgcctgatttcagtctcggtgaacttcagcacttttctcgtgatcgggaagacgtctcctgtaacctaccaagtccttggccatctgaaaacatgcttggtcctcacctttggctatgtcctgcttcacgacccgtttagctggagaaacatacttgggatcctaatcgcggtaatcgggatggttctgtactcgtacttctgcactagagagactcagcaaaaaccagcagaagcctccccgcaagccgttcaggcaaaggagggtgaatcgaacccgctgatctcggactccctgagcgctgccgaaaatggaggcagtgccaccgacgatgaacctctgaaggtaccaatgtggagctcgaagtactcgaaggcgtgaagtggctgttctggtattagtgcacacggtgctatacagaattcagcgtggtaggcagatactagggttggaaggcaaccctgttcctgttccatttttggccttctattttttcttcttcctggcacaaatactataaatatgtgctgtcagtaaatggatctcactcttgagaggaatacctcagctcgagaccgagtgttctgttctgcctgaaagctagtatttgtttgtgctccactccacgtgtaaagtggtagatggacatgatctcaacagtagtagtttgcattcttttgtactagtgatatacaatatttatgtattcctcgtgttccctaagctctgcatgtcccacaccactaccaagcaggggcggagccaaggggccccagcaggggccatggccccgtccaaggctgtggaatacacatatatatttt

SEQ ID NO: 29365 - DNA, 1812 bp, Zea Mays
tgtaaaaatataaaagacccgtctccgtctcgggggagcaggagagggggagaggccaagaacccagccgcgaagccaagcccatctgatccggcccctgctgccctgccccagctcgtctctcaggtcgccttgccgttgccggttccgcgcccgggcccggctcagagtcgcgagctcgtctcgcagatccggcttcgcttgcttgaattctgttctttgggagcaaagaggtgctggccggtggcgtggcttggtgctctggggccggcgagtttttttttttgcgtccgctcgctctgcctgtagtcttcttgctgcggcggcggggtggagatgggggtggcgggggagaagttccagctggggacggtgggggcactcagcctctcggtggtgtcctccgtctccatcgtcatctgcaacaaggctctcatgagctcccttggcttcaacttcgccactactttgacaagctggcatctcctggttacattctgttctctccatgtggcattatgtatgaagctgtttgagcacaaacctttcgatgcaaggactgtcatgggattcggagtgctcaatggcatatctattggacttcttaacttgagtctgggtttcaattctgttggtttctatcaggtatgcatcccttttctgtttgtattcagccaaacttaaggtttattgggtgacctggcaccgacttcttattcggcactcatagcatgacatgttatcatcggtaaaggtatatcaggatgggccaaaaacatcgtacaaccatatggtttcaatttgacgctatttatgtcactacatctcacatgctaattactccaccatgctcataacaaaatactgtttatatgttcagatgacaaagctggccataattccctgtactgttatactggagacccttttcttccggaagaaatttagccggaatatcaagctttcccttagtgtgctccttcttggtgttggtgttgcaactgtaactgatctgcaactcaacgttatgggatctgtactgtccctactggcaatcatcacaacctgcatcgctcagatcatgacaaatacaatacagaagaagttcaaggtatcttcaacacagctcctgtaccagtcatgcccataccaggcattgacgttgttccttgtcggtccattcctcgatggatttttgaccaaccaaaatgtctttgctttcgactacacaactcaagttctggcaaaggagggtgaatcgaacccgctgatctcggactccctgagcgctgccgaaaatggaggcagtgccaccgacgatgaacctctgaaggtaccaatgtggagctcgaagtactcgaaggcgtgaagtggctgttctggtattagtgcacacggtgctatacagaattcagcgtggtaggcagatactagggttggaaggcaaccctgttcctgttccatttttggccttctattttttcttcttcctggcacaaatactataaatatgtgctgtcagtaaatggatctcactcttgagaggaatacctcagctcgagaccgagtgttctgttctgcctgaaagctagtatttgtttgtgctccactccacgtgtaaagtggtagatggacatgatctcaacagtagtagtttgcattcttttgtactagtgatatacaatatttatgtattcctcgtgttccctaagctctgcatgtcccacaccactaccaagcaggggcggagccaaggggccccagcaggggccatggccccgtccaaggctgtggaatacacatatatatttt

SEQ ID NO: 29366 - DNA, 2140 bp, Zea Mays
ctcgcctgcccacctccctcgccatcgctagtctcaaaccacaaccctagagaagaagaagagagagagaaagggagatggtggggctgcagtacgatctcgtcgggaacccattgggcgcggtgcgcgccaccttcgagaggacggccgccgccgctgcagcgcagtctggaggagctgaccctgtggcggcgttccgtggcaaagactggggcgccggtgacctcttccgctccttcctcttcgagcaagacggtcttggcaaggttccggtgttggattcgtcaaatcttggattgatcaaaccgaacaccctggtccggtatcggggaatggttcaggatatgcttgggaatgagtactacattggtgctttcaaggatgggtcaacttggaggacaaacaagtacactgacttctcaccgtactcaatgccgcatccttgtgattcacatctttgggagcgccatctcttccactgtgtgcctgcacctggacaaaattcttggacactggagtcttcaccaggacctgatgtctgcaggatgtcgaactgtttggcacctgaactaagagagaaaaggaagagagatggagatgacgatgccatggatgtttcagaaaatggccatggcaattcttcattctgcaagaagccggaaggtgatgttcatgtctcttccagttcaactgaagtggcaggaaccattccagagatgaatggaggcgatcatcatatacctggaagctccttttcatgtctagtgaagatctatgacatgcctgatagtcaagtgaaattaaatgatgttattgagtttattggcgtatatacatttgacccagaacttgctgctcctagtgacaacccagatgatataatgttagacctcatcgaagatgtaacagttcagttgcctccgagcaaggtgccacgtcttcactgtttggtatggagaaaattatcattccatgattttatttcaaggcctgttgttgagccttcacccagcctgttaagaggcattcggcaatctttgctctcacacctcacccttgtattaggcaatgacgagcttgcagcccagtgcttgctgttgcatcttctatccagacttcgtaatagggtggatgtggtcaccgttggcagactctccttgaatttcactggcttcaacagggaaagtgcttccatatttgggaatcagctgtattctttgatccagaaattggtgccgtattcacaagccatacctctgtcaattgagtatctcaacacagctacacttcaacctagaaaggacaacaagtcaggaaggagttctgcagctacctcaaggcactcatctgatctttgatgagactcttctgcagacaggatcattgacatccaaaggtgtggagaataccatgctgctcaagaacctgatggagtcgcagaaggttgactacgattttgagtactacaagctggaaatggcagctgatgtgcagctactcactctctctgaggggaaatcaaacatccttccttcagatttggtagtgcctttccggccatcctctgttcccacagttaatgcaggtgctgaggaaactgagagctggaggtggtttttgaccacagtaaggtctcttcctcagtccactgaacctgaaacttaccagatgattcaggatgaaatggtcagtgccatgcgtgatgataggagcttgggttgttctgaacttagcagatggctaacaatggcacaaataatggcctccagctttggcgagaagagtctttctttggagcactggcagatggtgaaggagcttgagaggcttagaaagcagaggatgcaatgagaatgactcatcattagcatgtgtttttgcactctaattgtttatgttggtatgctgttatgtgtatagtactagacgtttgaatcaagacatggatctaaggcatttctgtaacaactgacaacttttatgatcctatgcatgtcagcatgtgtatctgctgctcattttctttgctcaaatttgagatttactctgggaactatggaatgccaatgtcagacctgtgatttcaggattgtaatgctaaattgctctgcgactacgtaatggatgttttgaaataaac

SEQ ID NO: 29367 - DNA, 2036 bp, Zea Mays
tggtacatataaagcttcacataaataagtggcatgtgttggtgcatcttgttgtgatgtttcacaactcgatgaactatcttcggaacataatcaaggaccaaatttagataaagctcatccttctcagttgttgaaaagaagcaatgcttcaaagcaacaacattagggtggtcaaggaggcgtatggtctgcagttcgcggttcttgtaacgcttgtcttgaagaaccttctttatggcaacagtctcacccgtttccaaacacttggcctatgaacaggtcaaatggcattgcaaattaggagaggcatctgattacaaaaaggcccttggcacacaagctatgaaagacctaaaacatgaaaactgctaggatagcaataccacagatagctgcataataaaacatatctaagtcaggagttgttgcaactaacctggaagactgttggtgtattatgaacaagttgaagggtctatttgtaaagtggtaaagtataatggaaaagagagtggtgctgtgggagattaacacacaccaaaattccacatggtatcagagctagggtttatgggcgccgccgctctgcctgcatccgctgtgcagccatccgccgcacgctgcgccgctgctcctggtagccagcgcgggcgcgaccccgcggcgcgcacgggcacgacttcggccgcgcgcggccatagcgcggcccaggcgtggaggcgcgcgtctccccggcgacggcgtgcgggcaggcggcccagggcgcaggcgcgtggggggcgggggagcgcaagcgtgacggcccggcggtgctgagccctgacggcgctctcgggtgcttggcgcgtggcgcggcggctgacggcgcagcgcaccaactgctgtgcggtgaagagagacgcgggcaggtgtgtacacggaggctgaaatagggaggaaggagtcgagaaccggggtgcttactctctgctgtttgccatcggagttggagttggctgcatctgctgtttatccatcggaggagttgaagctagcttcttctgctgctgatgatctgtgcttctgtgaaaatgagtactgaggagactgcgaagaagacagaaattgatggtagtggttcaggagggattacaaagagtgagatgatgaatgaaatgagaagtatgatccaggagctcatgggattagggttgattggtgctaaggccaatacaggtacatctgagttgaagttggaacttgtgcctaatgatgtgaagttagaaggtagtaagaattatctaagctggtctcaaagagtgtgtgtactcctaggaggcaagggagtggagcattatttggaggagacatgtgttgagccgattgataagctcggcgcagaatggagaatctggcatgcggcaaactctgtgatagttgcatggttattggcatccatgtctcctactgttagcaagagggtggaagccatgcgtactgcatcacaaatctggaagaccttgagtaatatatactctcgaaaggggaatgtgatggtgatgatggaaattcagagcaaggcagatgcagtaaagcagatggggagaccagtggaacaatatgctagtgagctccagcacttatggggagagctggatcattatgctcctctccaaatggtttgcccacatgatgcacaaatggctcataagtgggtagaggataggagggtgactcactttctaaagaatctggattctgagtttgaaagcaggagagcggccttttgtcaccaggagagtcttcctaccatggatgaggttgtgtctgccatgatagatgaagagagcagactttcgagtgatgagtagtggtaatcatgtgaagccagcatacgttgcaattgaggatagagaatgctataattgtggggaaaggggacatctgagttacaattgtcccaaccctagaggaaattgtggcagggaaggatctcgtggaggacgagggggtactcgtggtcgtgggagctatggaagaggtcgcagaggtcg

SEQ ID NO: 29368 - DNA, 394 bp, Zea Mays
atgaagtttaccgataaacaccgtatattaaaatcaatgaatataaataggttaccattttgatctctgggtcacgcaagatacatctctaaaagtggacagggcaagggcaacaaaggaaaacatgtaatagaaaacaaaattaagttacacatgctccgtaacaatctgagactaatcaacgattttccagagtcaagtatatatcttcatgcagtaagatgctaaatgtatggctttggacattctagttgggcaagcagccaagcaccttcattgatcatgagctgccgtggcagcaactgtattattttagccaatggttttgatgaaagcatcgacataaaattcttttctcatgcattatcctgaacatttcgctgaaaagtccttc

SEQ ID NO: 29369 - DNA, 1855 bp, Zea Mays
attgcagatcttcaaggacaagggtctgtcgtggtgtttagaggcggaggcggtgcccggccagcatacactctggtttcacagaatgaggcacactttgctggtgactggttcgaaatttgatttctactagccaggatgtacccaatgaactcatggatctagctatgaagggttctttaaatgatgttggaagtgtagatgtcttctcttggataagatgtttggatcttcgcactctcgctgtgctgacaaattccaccctgtccagctcaagtgatccacataatatatctttccattacttaatacctgaaggaggcaacgataagttgtcctacttcaagctaaaagtcttgctacctgattcagatctcactgttactagtcaaaagcaaatcaaggacaagctaaatgttgccactccaaaaggaaattttctttggttattccacatagaactgtcaccctttcttatcgcaaaatctcagttgtcgaaaaagagatttgtttatatcgctgcagattccatcataaagggcaaagtcgaagatcttggtcgcatggaactaggcggttacgccattggcgctgtagaagattgcagcaagcgtctcagcgattatatcagtatggatgttcttagtgccatacaaagagcgggagctacattcagttgggtgcctaaagaaccttataacgaggatgcatgcctacttgattttgacgtgctattgatggagcctcgcaagctggagaaaaccctgattacttccatcatgtggtgggctactggatgtttgcagcaatagtaatgggaagctacaaggaaatttgctccagaaatttcacaaaatcaagatcggtcagaaacttcaagccttgaacgtggtcttcagcttcctggtcggcgagtgggaacttgatctcactgttgtgtaactgcttgttgttgtccctcttgcacagcttggttgtgcagtacatggagacatggcatatctttatctactttatatagaaggagcatgctttgccctggtttctcactcttgaacttgcatataagcccattgatgtaaggagagcgcaacttgcatataaactctttgatgaggttcttgatgatgttctaatctacaaatgtgttagaggatggccggatcctgtgtggctggcaagatttacaatttaaaaactatgccctcggagaatgaggagaattctatccgacttattacacgttctgatgccacatttaagaagagcaagaactgagcacctacaacccttttaagttaagcaacacaagttgaattcatgggagcatgtggtttgttaccaagatctgttgtatatacatatgacttatcaatgattttcaggttgttgtaactatccagtatcgtacaactgacttgttacctagggagaaacactgcatgagtgttgttggtatccttgtctaatatgaggcggagggggtgattcttgcagattctcctagaggtggaggaggatgaagtggtgatagacttcaagcaaactccaagtgtcgtgtcgacctctgcctccgctccctgcacacatccctcccagtcgtcttcaaggtccagacctcctccccgctcaagttcctcatcagcacgttgcacagtgtcgtgtcgtcgctttcctcggtgtccatacgcgtcgtgcgaggcgtcccgcttcatctctaatcacctttatgtgcacatcgtccatatgtgacccccttctccatataatttcaacaaattttactcttttgggctccgtgtaatttcattagtaaaatctctactaattattaatgcttcaaagttaacctgtc

SEQ ID NO: 29370 - DNA, 1069 bp, Zea Mays
aagatcccctctacttccattatatcactaaaagtaatgggaagctacaaggaaatttgctccagaaatttcacaaaatcaagatcggtcagaaacttcaagccttgaacgtggtcttcagcttcctggtcggcgagtgggaacttgatctcactgttgtgtaactgcttgttgttgtccctcttgcacagcttggtacatggagacatggcatatctttatctactttatatagaaggagcatgctttgccctggtttctcactcttgaacttgcatataagcccattgatgtaaggagagcgcaacttgcatataaactctttgatgaggttcttgatgatgttctaatctacaaatgtgttagaggatggccggatcctgtgtggctggcaagatttacaatttaaaaactatgccctcggagaatgaggagaattctatccgacttattacacgttctgatgccacatttaagaagagcaagaactgagcacctacaacccttttaagttaagcaacacaagttgaattcatgggagcatgtggtttgttaccaagatctgttgtatatacatatgacttatcaatgattttcaggttgttgtaactatccagtatcgtacaactgacttgttacctagggagaaacactgcatgagtgttgttggtatccttgtctaatatgaggcggagggggtgattcttgcagattctcctagaggtggaggaggatgaagtggtgatagacttcaagcaaactccaagtgtcgtgtcgacctctgcctccgctccctgcacacatccctcccagtcgtcttcaaggtccagacctcctccccgctcaagttcctcatcagcacgttgcacagtgtcgtgtcgtcgctttcctcggtgtccatacgcgtcgtgcgaggcgtcccgcttcatctctaatcacctttatgtgcacatcgtccatatgtgacccccttctccatataatttcaacaaattttactcttttgggctccgtgtaatttcattagtaaaatctctactaattattaatgcttcaaagttaacctgtc

SEQ ID NO: 29371 - DNA, 1241 bp, Zea Mays
caacaggcatgtagccccggtgctgatgtggcatgtctgcctccacccctccgccaccaccacagccgttgcctttgccgcgagcgaccgtagcgaggtgattgcaatggtggcctccactgcttcccgcctctcgcccccgcgcttcagcaccccttccccgtctcttcatcctccaaaccgccgctcgcgcttctcccctgttcgcgcagccaagttggaagctgtgctgtctattggtgctcatctaatcccacacccaagaaaggctgcaagtggcggagaagatgctttctttgccaatagcgatgctggcggagtatttgccattgcagatggtgtctcgggtcattctcttatctactgacagatgggcagaaaagaatgtcaatccagctctattctctcgagagctcatgagaaacagctctaatttcctcaatgatgaggcggtcagtcatgatcctcagattcttctcatgaaagctcatgctgcaacttcttctattggatctgcaacagtaatcatcgccatgcttgagaagaccgggactctaaaaattgcaagtgtgggagattgtgggttgaaagttattcgtaaagggcaagtaatgttctctatatcccctcaagaacattattttgactgcccataccagataagctcagaggcagagggtcaaacatataaggatgcattggtttgcagtgtaaatcttatggagggtgatataattgtgagtggttcagatggactttttgacaatatctttgaccaagagattgtttccataatttctgagtcgccaagtgtagatgaagctgcaaaagcattggcggagcttgcaagaaaacactcggtggatgtcagattcgattcaccctactcaatggaggcccggagtagggggttcgatgtcccctggtggaagaagctacttggaggcaaactaataggcggtaagatggatgacatcacagttgttgtcgcacaagtgaagacagtagtggtcccagaggacgaggttcagggtggcgacacagaagaacaaaaggggaatgagcagggcgctgcagctgtggttgcatacaaaatgaatgatgaagaagtagcttgagttctgggaccatcctcattttcattctcttcattttacttttctgtgatgactgtattatactgcacataaaggaattgaagcaaaataaatttgtgtgattgtgtctagctgtgcgtatat

SEQ ID NO: 29372 - DNA, 1319 bp, Zea Mays
tgctgatgtggcatgtctgcctccacccctccgccaccaccacagccgttgcctttgccgcgagcgaccgtagcgaggtgattgcaatggtggcctccactgcttcccgcctctcgcccccgcgcttcagcaccccttccccgtctcttcatcctccaaaccgccgctcgcgcttctcccctgttcgcgcagccaagttggaagctgtgctgtctattggtgctcatctaatcccacacccaagaaaggctgcaagtggcggagaagatgctttctttgccaatagcgatgctggcggagtatttgccattgcagatggtgtctcgggtcattctcttatctactgacagatgggcagaaaagaatgtcaatccagctctattctctcgagagctcatgagaaacagctctaatttcctcaatgatgaggcgttgcaggtcagtcatgatcctcagattcttctcatgaaagctcatgctgcaacttcttctattggatctgcaacagtaatcatcgccatgcttgagaagaccgggactctaaaaattgcaagtgtgggagattgtgggttgaaagttattcgtaaagggcaagtaatgttctctatatcccctcaagaacattattttgactgcccataccagataagctcagaggcagagggtcaaacatataaggatgcattggtttgcagtgtaaatcttatggagggtgatataattgtgagtggttcagatggactttttgacaatatctttgaccaagagattgtttccataatttctgagtcgccaagtgtagatgaagctgcaaaagcattggcggagcttgcaagaaaacactcggtggatgtcagattcgattcaccctactcaatggaggcccggagtagggggttcgatgtcccctggtggaagaagctacttggaggcaaactaataggcggtaagatggatgacatcacagttgttgtcgcacaagtgaagacagtagtggtcccagaggacgaggtagacctaaaaaaacacacatttttatataaacgcaacgctatttcatctttttctttattttttattgatgtgaatatgtgctatttcaggttcagggtggcgacacagaagaacaaaaggggaatgagcagggcgctgcagctgtggttgcatacaaaatgaatgatgaagaagtagcttgagttctgggaccatcctcattttcattctcttcattttacttttctgtgatgactgtattatactgcacataaaggaattgaagcaaaataaatttgtgtgattgtgtctagctgtgcgtatat

SEQ ID NO: 29373 - DNA, 3416 bp, Zea Mays
actctggagctctcaatatggtctcccgtaccagcaaccagcagctcctgctgagcctgttcgttgtccttggaatccaccaactctcctgctccctcgccaccagcagcaaccaaactaccaagccaccggcagccgctccgtgccggccggaccagtcctcggcgctgctccggctccggcgttccatctccaccaccaccgactccacgtgcaccctcgcgtcgtggcggaacggcacggactgctgccgctgggagggcgtcgcctgcgccgccgccgccgacggccgcgtcaccaccctcgacctcggcgaatgcgggctgcagagcgacggcctccacccggcgcttttcgacctcacctccctgaggcaagataccgcacgggatgcggcggctcagcaagctggtgtctctggacttcaccaactggatctacctcgttgagggcgacaacgactacttcctgccgctcggggatgggaggtggcctatcgtagagccagacatcggagcgctcgtcgccaacctcagcaacctcaaggagcttcacctcggcaacgtcgacttgtctggcaacggggcagcgtggtgcagtgccttcgctaactccactccccagctccaggttctcagcctacagaacacccacatcgacgctccgatttgtgagtcgctgtcagccattcgctcgctgaccaagatcaacctgaactacaacaaagtgtacggccggattccagagtccttcgctgacatgccttccctcagtgttcttcgtcttgcctataatcgcctcgaaggacggttccccatgaggatcttccagaacagaaacttgacggttgttgatgtcagttataattctaaagtatccggtctactgcccaacttctcatctgccagtattatgacggaactgctttgtagcaacactaacttctctggtcccattcctagttcaataagtaatctcaaagccctcaagaaattaggtattgcagcagctgacgacctacaccaggagcacctccccacttcgatcggtgagctcagatcgttgacatcattacaggtttctggggctggtgtggtaggagaaataccatcttgggtcgcaaatttaacttctctggagactctacagttctcgagctgtggcttatctggccaaataccttcattcatagtttcagtggtaccatcgagctcagctcgttcttcaaaatgcccaacatagccagattgaatctttcaaacaacaagctttctgtagtagacggagaatacaatgcttcatgggcatccatcgcagattttgatactctatgtctagcatcttgtaacatatccaagctccctgaagccttgaggcacatggattcctttgcagttcttgacctttcaaacaaccacatccatggcactctacctcagtgggcatgggataattggatcaactctctcatcttgatgaacatatcacacaaccaattcagcggtggtattggatatggctctgtcatttctgccaatatgtttgtttttgatattagttataacctatttgaagggcctatacctataccaggaccacagaaccaactgtttgattgctcgaacaaccaattctcatccatgccattcaattttggttctcacttaactggtatttcccttctcatggcttccggaaacaatttgtccggagaaattccacaatcaatctgtgaagcaacaagccttatgctccttgatctctccaataataatctgcttggctccatcccttcttgtttaatggaggatatgagtaacctcaatgtattaaatttgaaaggaaatcaacttcatggaagattaccaaatagcctaaagcaagattgtgcattcgaggcattagacttcagcgataatcagattgaagggcagttacctagatctctagttgcttgcaaagatttagaggtttttgatatcgggaagaatcttattaatgatgcatttccatgttggatgagtatgcttcctaaacttcaagtccttgttctaaagtccaacatgttcactggggatgtggggccatctatttcagaagatcaaaatagttgtgaacttggaaaacttcgaattattgatttggcttcaaacaatttctctggattattgcgaaacgaatggtttacgacgatggaatccatgatgactaaagatgtcaatgagacgttggtcatggaaaatcaatatgatctacttggtaaaacgtaccagttcaccactgcgatcacatataaaggatctgatataagtttttctaagatattgcggaccattgtccttattgatgtttcgaataatgcattttgtggccctattcctgagtcaattggggaccttgttctactcagtggactaaatatgtcacataataccctcattggaccgatcccgtcccagcttggcatgctacatcaacttgaggcactagacttatcttcaaataaactttctggggagattccattggagttggcatcattggacttcctttcagtattggatctatcctacaacctgctacagggaagaatacctgagtcttcccacttcttgacattctctgctctctcatttttgggaaacattggcctatgtggatttcaagtgtccaaagcatgcaacaacatgacaccagatgtggttctacatcagtcaaataaggtatcaatagacattgtactattcctttttactggtttaggatttggtgttggattcgcaattgcaattgtcttgacatggggaatctcaaggagcccattcttaccttttcaatgcaccattgccaaggataatgttccatctccaatctgtctaactcctttacctaatcaaccatgtcatctcaaggaggaccatccccatcttcccattgttgaagaactagaggctcctaagctccgttgtatgagctcctcttcagaacatattttctccagttaggggtatacacattttggccttcatttaaaaaactagaggcctgtaagcttcgttgtatgtaattatttttatcttatctttatcttatagttacaacatgttataggtgacttaaggttgaggcttggtatgaagatttcacttaagatttcatagttattgacaagcataccaatatatcataggaacgcacatgcaaacctagtgtctatgtggatgattgatctatcctaacaaaacacactcaaaggaatttgtgaaacaatacaagcatatataacaagctcactcaagcaagtataacatacaaaatgcaatcatacttacatcactatctgaattatttagttatgcaatgtaacatgctgtattaatatgttaatactagatgcttaatttactgtgataaag

SEQ ID NO: 29374 - DNA, 7206 bp, Zea Mays
ctgccttttcaggctatcaccgccacacagctgatcctctcccgagtcccgacccgtcatcgccgccgccattgtcccgccgcgcagggtttagggttcagtagcggcggcaccagtttttctcctcatcaagggagtcgcggccaccgccaacgagacaagctgtcggcgatgtcgtctatcgcatcgcagctgaaggccatcaagtcggcgctcggcgctgcgccggagccggctcggcggcccgtcacccggccgtctgtgctcttcgacgccaaagaggccgccgacatcgacctccgggccatcctgcccattgccctctctgggttggagcaccttaccagcgtagacgagagatttgcaaaatacagcaacactctgttcagggagactagccttgaggtgaaccgcgaacagttgactcccaaggagaacgacaaactcaacaagtctatctccacctaccttcgccttctagctggctatttgcatcttccctctgccctcaagacccttgaataccttatccgcagatacctggtgcatgtatacaattcggatgagttgctgctgagcgcactgccataccatgatacacatgcgtttgttcggatcgtgcagttggtcaacttagggaatagtaactgggcatttcttggcggtgtcaagtcctcaggtgcaccgccacccaggagtgttctagtgcaacagtgcatccgtgataaggctgtgctggagaccctatgcaactatgctacaccaacaaaggaattcagtcactcgaagacagtcgtctgcttttgcactgctgtgattgttgagtgtttgggtgctgtccctaagcttgacacagatgtagtgcagagggtgttgggatttgtgtttgactctcttaatcctgcagtgacgcgagaccaggaatataaggctggcgctcttatgattgttggagtacttggaacccgtgcgactctagcgcctaaacttgttcaaaatttgattcttttcgttgcaaggactgcacaacatgatgcattcgagtcagttgacttgccatggcttcgtgtttcagtgatggctcttataagtcttgttcagtcccaatctgtccatgttttccctaagaagccactgatggttttgaaagacatcagggatttttctggtatactttctgtattatccagtgaatacaacatcgagaaattcattaggctttatgttgaatcattaattgactacagtattgtcgatggtacctgccacacacacctgattgaaactattgagagtctgccaatgaagaatttcattgaaagtgtcgtgtgcaaaattcttggaaactgtatcaaggtatctcgggccacaggaatcccagatattaatcacacagaattatgggctaagaaaatttttaaggcaattgaaagaaaatatcccctggagctacgtgatgctattcataaatttcttgagaactctgaaactaattcaccgggaggggattctttggctgaggtttttgggatattgtttgatgaaaacaagaatttgccaactgaaatatctgactcaaacatttggttcagtctcgatcatccaaaggctacggttcgtcaatctgctctctcaaaagttgctacatctggcatcttcaataacagaactctaaatcctcagaagtttatcaatatgcaagatgctatattacgtagtctgtatgatgatgatctaagtgttgtccaagctgctttatccatagaaggactagctgctgttgccaatcctgatagcctgttaaaagcatatgattgcgtgctcaccaaatgcatcaaaatcatcaacaaaggtggttcaaaggcattaaaagcttctgatgttgctgtttcttgcttggaaaagctggtaacggaataccaatcgcatcatatggaacatgccaaggatatagctacattagtgtttcgtctccttattgttcacccaaagacccttagggtgaacataaaggccttggagctagctaagaaaatacggtgggagttctacgcaagtagttctcttgtatatgatggggtcgattttgataaaatgaagaacatgagtgcagactccattgcttctattaacatgaacaacatcaaagcttttgctgaaactttcctagcagacccaaataagcatgtggagtggttagctaactctggaagtggaagtagattttctaaaactctgtttctgctcatagtattgcaaacacttgtttccacagaagctttggatgagcaggtgaatctttgtcatgcttgtttgccagtcctgaaggatgaatgtcatcacatacagcccaaagatagcgatgttggtgatgagatcagcattactaaccttgagatgtgcagtttagaattggtgaagcattttttcaacagagacacagaggcattgaatgttagaatccttgtatgtatattttggggtatagtaagggtgcagtcctcctgtattaagcagaatcccgtggttggcagtggtggaaacacaatgctggatgatttgtttctcttcttccttgtttcacctgccaaaaatatcttccagaagcacctacagtatcttgttaattgcattggagcaccttttcaatttatttcaaagtacttcctggatgaagatttatcagaaagagtccaagtggagagtcttcttgtgtttgcatctatttgttccaagtgcgcttcctctgacaataatagcttggatgaaagcatctgtgtgcagcttctactaggttttccttccattattctaccacttgctcatgtcaacaaggatataagggcatctgcaattaagtgtattgaggggttatctttggtgtggcagcgcttgagcacttctgtaccaagaaatggaaacaacaccaaattacctcaatgtttgtcatctccaacttttggtagtttccttgaattgttggttaaccaaaagaccatgatctgctcggacgcaaaatttcttcctgcatatatttcatctatgctgagcccatgtaaagatattctggttcccgagaatctccatgaaagatttgatccgcatacaaaggatactattcttactttcatcttgcgctctgctttgaggctccctccttacggaaagttcatggttctgtcagtcctgaaaggagtaggaagcatcttatttcatgcagaagatgtgaagtctctgttttttgatcttctggaccgtcgtgatcagtaccagaatcgacataattgcaagcagatcctatccacccatgaaatgcataccttgtgcttgcttttggaggttttattctcaacgccagatcatgtgaatattggttttaacatgtttgaacctttgatgaaagctttaaaggttgatgcttcgtctccaggtgattctgttgttgtgatgccatgtcttactgtcctgcagaatcttcaaccagggttctttgataatttgaagactgatactaaggaaaaagttgttggacgccttatttccttggttcgaactgagagtttcgtagttcgaaatgctgcacgggatgctttactgcgtattaatgttcattcttccactttagtaaaatttattgaattaatttcaacacttggtgatgcaagaggacattcaaaaaggataaagagaaatgaagatcgggaccttaatgtgttctgcaattttgcggagatatttggagaaaattctgtagcttctattcttgtttctcttctagatatcttgtttcttaagaaagatgtgaagcaaaggtcgcgtttattacaacctcttttccagattctatcgaagctcctttctgatcaatgggtctcagttattgttagtcagtataacgaccaacaagatacctcatctgaaatccctgatttatctagttttgtaaaagaagttcaacacttggtactgctggccctcaaagatattacagatacactacaatcgggtcaccatgatgcaatggtcagcagttccgatgtaggtcttcttattgattgtgtacggtccatccaggacataggaactcggaatcatggcttttccttgatagcttctttgggaaaggcttgcccgcaactggtctcagagagtattgttgatttgtttgtcgctattggggatgctattaaacaggacgatagccactcgcaacgtgttttggaggatttattatctgtcttagtcccatgttggttatcaaggaccacaagcatagaaaagcttcttcagatattcattaaagctttagcagatgtgcctgaacataggcgattgacgcttatggtttacctcttaaggaccatgggaaaagaaaataatttgagtactgtgatcatgcatctgttacactcggtggttgagcggatttcacactcgttttctgtacatcatggggacgattatagattggctatgtcacaggagtgggagtatggattggcagtaaatgtgcttgaccagttttcgtataaattgtggtttccttgtttgagtaagcttctaaaaaacatcagggtgcatgagaagcaagatctgcatcttatgctacatttggcaatgaggcttattctatttaagttgcaagatacagaacttaattttgaacttgaatctgaggaagctgctaattctatccagggttctcttggggcacttatggaggaagttatcttgtgtggtgtgtatgccagagataaaaaaagagatatttgtactgacattactaaagaagtcagagattttgcaaatacaatactcaaaactattacaggctggatgcgtgcttcgacatacttgatgggaattactctgctgttggatcattcagataatcatgtgaaaagaaagacacttcggattttgtctgaaacggccagaggaaacagtttggttcagaagaatcaaaggaaagcacgaaaactgaagcatatatctggtactactattaaagtagacaagagctctggtccttatttcagcaaattgtgcttaaagattctggagttgattgacagagttggtgattcggacactaaagtgaaagtagctgctatttcttcgcttgaaacactagcaaaagaatatccctctgataatcctgtttatagcaactgccttgcaacaatcattgatcaaattggctctgatgaggcagctgtgtcttctgcattaattcatactgtgggctctctggtaaatgtgatcggatcaaaagcattaccacaactcccattaatcatgaaaaacataatgctaatgtcacatcaaatttcatgttgccctagcggaaattatgctcatggttccactagaactgccgctgaactttctaaccaagacataactgtgttgctatctgcactgacaacaattgaggtgattgtggaaaagctgggtgaatttgttaatccatatttgaaagaaatacttgatctggtagtactgcatcctgaatgcagcactcaaatgcatgccaaattagatgcaaaagcagcacgtgttcgagagctattgactgtaaaagttccagtccggcttatcctctcacctttactgaatctgtactctcttactgcaaattgtggagatgcaagtcttacgttggcattcagcatgcttgctagtctagttggtacaatggaccggctggctgtaggaacttaccattcaaaaatatatgaacattgtttagcagctcttgatctccgtcgtcaacaccctgactctttgaagaatataaatatggtggaacaaagtattattcatgccataatctctcttaccatgaaacttacggagggcacttttaggccactttttcttcgtactttggaatgggctgaggctgaagttgatgaatcctcatcaaagaaaagtttggaccgtgcaattgttttctacaaattggttaacaaacttgctgaaaaacacaggtccttgttcacaccttacttcaaatatctactcgagggatctatacaatatctctctgaagacgatgctttgggtggttcgaagcataagaagaagaagaccaaacttgtagatgttcaagttgaacagaaggataaattattggggttaaaattgtggaatttaagagctctagttttgaaatccttacaccaatgtttcctctatgataatgaccagaagatccttgattcctctaatttccaggttcttttgaaacctattgtctcccagttcgttgtggaaccaccaaaatctgttgaatcagttcttgacgctccatcaattgaagaagtagatgaaactataattctgtgcttgggccaaatggcagtaactgcacggacagatgttctttggaagcctcttaaccatgaggtgctgatgcagactaggagtgatgaagttcgccccaaaatgctgggcctgaaggttatcaggtacatggtccaacatctgaaggaggagtatgtcgttctcgtaccagagaccataccgttcctaggcgaattgctcgaggatgtggagcttcctgtcaagaccctgtcgcaggagatcttgaaagagatggaaaccctcagtggcgaaagcctccagcagtacctatgaggcatcatctcctcgcggtagtaccgtttggctgatgaactgtagaacatctactcatttcctgtggattaccagttcaacagatcggcatacttgtcggatgtctggaaactgaaattacatgctgtccaattcatggaaggcaagtgcaattaacttaaccttcaaggaggcaaatgcagtttaaggaaaacttacacgttgaaagcacccatattatgttttcggatgagttcctatgtagctacgttgaaagagtacttttctacacaattgattgaggtgttctcgatttgatctctttttgagcttttggtgtcgttgggattttgcgctaaatattggaaattagaccaaggggctgtttgttcgttgtgaaggaattataatttacttaatatagtaggttatttggtttggaatttaatattccatcacatgttaaagtttagatataatcctatcctaaatttatagggtgagaatatggaaattggctatatattactagtttatgattctactttgtaatttatgacatgctataataaaaatgtagcatat

SEQ ID NO: 29375 - DNA, 7137 bp, Zea Mays
cctctcccgagtcccgacccgtcatcgccgccgccattgtcccgccgcgcagggtttagggttcagtagcggcggcaccagtttttctcctcatcaagggagtcgcggccaccgccaacgagacaagctgtcggcgatgtcgtctatcgcatcgcagctgaaggccatcaagtcggcgctcggcgctgcgccggagccggctcggcggcccgtcacccggccgtctgtgctcttcgacgccaaagaggccgccgacatcgacctccgggccatcctgcccattgccctctctgggttggagcaccttaccagcgtagacgagagatttgcaaaatacagcaacactctgttcagggagactagccttgaggtgaaccgcgaacagttgactcccaaggagaacgacaaactcaacaagtctatctccacctaccttcgccttctagctggctatttgcatcttccctctgccctcaagacccttgaataccttatccgcagatacctggtgcatgtatacaattcggatgagttgctgctgagcgcactgccataccatgatacacatgcgtttgttcggatcgtgcagttggtcaacttaggtcctcaggtgcaccgccacccaggagtgttctagtgcaacagtgcatccgtgataaggctgtgctggagaccctatgcaactatgctacaccaacaaaggaattcagtcactcgaagacagtcgtctgcttttgcactgctgtgattgttgagtgtttgggtgctgtccctaagcttgacacagatgtagtgcagagggtgttgggatttgtgtttgactctcttaatcctgcagtgacgcgagaccaggaatataaggctggcgctcttatgattgttggagtacttggaacccgtgcgactctagcgcctaaacttgttcaaaatttgattcttttcgttgcaaggactgcacaacatgatgcattcgagtcagttgacttgccatggcttcgtgtttcagtgatggctcttataagtcttgttcagtcccaatctgtccatgttttccctaagaagccactgatggttttgaaagacatcagggatttttctggtatactttctgtattatccagtgaatacaacatcgagaaattcattaggctttatgttgaatcattaattgactacagtattgtcgatggtacctgccacacacacctgattgaaactattgagagtctgccaatgaagaatttcattgaaagtgtcgtgtgcaaaattcttggaaactgtatcaaggtatctcgggccacaggaatcccagatattaatcacacagaattatgggctaagaaaatttttaaggcaattgaaagaaaatatcccctggagctacgtgatgctattcataaatttcttgagaactctgaaactaattcaccgggaggggattctttggctgaggtttttgggatattgtttgatgaaaacaagaatttgccaactgaaatatctgactcaaacatttggttcagtctcgatcatccaaaggctacggttcgtcaatctgctctctcaaaagttgctacatctggcatcttcaataacagaactctaaatcctcagaagtttatcaatatgcaagatgctatattacgtagtctgtatgatgatgatctaagtgttgtccaagctgctttatccatagaaggactagctgctgttgccaatcctgatagcctgttaaaagcatatgattgcgtgctcaccaaatgcatcaaaatcatcaacaaaggtggttcaaaggcattaaaagcttctgatgttgctgtttcttgcttggaaaagctggtaacggaataccaatcgcatcatatggaacatgccaaggatatagctacattagtgtttcgtctccttattgttcacccaaagacccttagggtgaacataaaggccttggagctagctaagaaaatacggtgggagttctacgcaagtagttctcttgtatatgatggggtcgattttgataaaatgaagaacatgagtgcagactccattgcttctattaacatgaacaacatcaaagcttttgctgaaactttcctagcagacccaaataagcatgtggagtggttagctaactctggaagtggaagtagattttctaaaactctgtttctgctcatagtattgcaaacacttgtttccacagaagctttggatgagcaggtgaatctttgtcatgcttgtttgccagtcctgaaggatgaatgtcatcacatacagcccaaagatagcgatgttggtgatgagatcagcattactaaccttgagatgtgcagtttagaattggtgaagcattttttcaacagagacacagaggcattgaatgttagaatccttgtatgtatattttggggtatagtaagggtgcagtcctcctgtattaagcagaatcccgtggttggcagtggtggaaacacaatgctggatgatttgtttctcttcttccttgtttcacctgccaaaaatatcttccagaagcacctacagtatcttgttaattgcattggagcaccttttcaatttatttcaaagtacttcctggatgaagatttatcagaaagagtccaagtggagagtcttcttgtgtttgcatctatttgttccaagtgcgcttcctctgacaataatagcttggatgaaagcatctgtgtgcagcttctactaggttttccttccattattctaccacttgctcatgtcaacaaggatataagggcatctgcaattaagtgtattgaggggttatctttggtgtggcagcgcttgagcacttctgtaccaagaaatggaaacaacaccaaattacctcaatgtttgtcatctccaacttttggtagtttccttgaattgttggttaaccaaaagaccatgatctgctcggacgcaaaatttcttcctgcatatatttcatctatgctgagcccatgtaaagatattctggttcccgagaatctccatgaaagatttgatccgcatacaaaggatactattcttactttcatcttgcgctctgctttgaggctccctccttacggaaagttcatggttctgtcagtcctgaaaggagtaggaagcatcttatttcatgcagaagatgtgaagtctctgttttttgatcttctggaccgtcgtgatcagtaccagaatcgacataattgcaagcagatcctatccacccatgaaatgcataccttgtgcttgcttttggaggttttattctcaacgccagatcatgtgaatattggttttaacatgtttgaacctttgatgaaagctttaaaggttgatgcttcgtctccaggtgattctgttgttgtgatgccatgtcttactgtcctgcagaatcttcaaccagggttctttgataatttgaagactgatactaaggaaaaagttgttggacgccttatttccttggttcgaactgagagtttcgtagttcgaaatgctgcacgggatgctttactgcgtattaatgttcattcttccactttagtaaaatttattgaattaatttcaacacttggtgatgcaagaggacattcaaaaaggataaagagaaatgaagatcgggaccttaatgtgttctgcaattttgcggagatatttggagaaaattctgtagcttctattcttgtttctcttctagatatcttgtttcttaagaaagatgtgaagcaaaggtcgcgtttattacaacctcttttccagattctatcgaagctcctttctgatcaatgggtctcagttattgttagtcagtataacgaccaacaagatacctcatctgaaatccctgatttatctagttttgtaaaagaagttcaacacttggtactgctggccctcaaagatattacagatacactacaatcgggtcaccatgatgcaatggtcagcagttccgatgtaggtcttcttattgattgtgtacggtccatccaggacataggaactcggaatcatggcttttccttgatagcttctttgggaaaggcttgcccgcaactggtctcagagagtattgttgatttgtttgtcgctattggggatgctattaaacaggacgatagccactcgcaacgtgttttggaggatttattatctgtcttagtcccatgttggttatcaaggaccacaagcatagaaaagcttcttcagatattcattaaagctttagcagatgtgcctgaacataggcgattgacgcttatggtttacctcttaaggaccatgggaaaagaaaataatttgagtactgtgatcatgcatctgttacactcggtggttgagcggatttcacactcgttttctgtacatcatggggacgattatagattggctatgtcacaggagtgggagtatggattggcagtaaatgtgcttgaccagttttcgtataaattgtggtttccttgtttgagtaagcttctaaaaaacatcagggtgcatgagaagcaagatctgcatcttatgctacatttggcaatgaggcttattctatttaagttgcaagatacagaacttaattttgaacttgaatctgaggaagctgctaattctatccagggttctcttggggcacttatggaggaagttatcttgtgtggtgtgtatgccagagataaaaaaagagatatttgtactgacattactaaagaagtcagagattttgcaaatacaatactcaaaactattacaggctggatgcgtgcttcgacatacttgatgggaattactctgctgttggatcattcagataatcatgtgaaaagaaagacacttcggattttgtctgaaacggccagaggaaacagtttggttcagaagaatcaaaggaaagcacgaaaactgaagcatatatctggtactactattaaagtagacaagagctctggtccttatttcagcaaattgtgcttaaagattctggagttgattgacagagttggtgattcggacactaaagtgaaagtagctgctatttcttcgcttgaaacactagcaaaagaatatccctctgataatcctgtttatagcaactgccttgcaacaatcattgatcaaattggctctgatgaggcagctgtgtcttctgcattaattcatactgtgggctctctggtaaatgtgatcggatcaaaagcattaccacaactcccattaatcatgaaaaacataatgctaatgtcacatcaaatttcatgttgccctagcggaaattatgctcatggttccactagaactgccgctgaactttctaaccaagacataactgtgttgctatctgcactgacaacaattgaggtgattgtggaaaagctgggtgaatttgttaatccatatttgaaagaaatacttgatctggtagtactgcatcctgaatgcagcactcaaatgcatgccaaattagatgcaaaagcagcacgtgttcgagagctattgactgtaaaagttccagtccggcttatcctctcacctttactgaatctgtactctcttactgcaaattgtggagatgcaagtcttacgttggcattcagcatgcttgctagtctagttggtacaatggaccggctggctgtaggaacttaccattcaaaaatatatgaacattgtttagcagctcttgatctccgtcgtcaacaccctgactctttgaagaatataaatatggtggaacaaagtattattcatgccataatctctcttaccatgaaacttacggagggcacttttaggccactttttcttcgtactttggaatgggctgaggctgaagttgatgaatcctcatcaaagaaaagtttggaccgtgcaattgttttctacaaattggttaacaaacttgctgaaaaacacaggtccttgttcacaccttacttcaaatatctactcgagggatctatacaatatctctctgaagacgatgctttgggtggttcgaagcataagaagaagaagaccaaacttgtagatgttcaagttgaacagaaggataaattattggggttaaaattgtggaatttaagagctctagttttgaaatccttacaccaatgtttcctctatgataatgaccagaagatccttgattcctctaatttccaggttcttttgaaacctattgtctcccagttcgttgtggaaccaccaaaatctgttgaatcagttcttgacgctccatcaattgaagaagtagatgaaactataattctgtgcttgggccaaatggcagtaactgcacggacagatgttctttggaagcctcttaaccatgaggtgctgatgcagactaggagtgatgaagttcgccccaaaatgctgggcctgaaggttatcaggtacatggtccaacatctgaaggaggagtatgtcgttctcgtaccagagaccataccgttcctaggcgaattgctcgaggatgtggagcttcctgtcaagaccctgtcgcaggagatcttgaaagagatggaaaccctcagtggcgaaagcctccagcagtacctatgaggcatcatctcctcgcggtagtaccgtttggctgatgaactgtagaacatctactcatttcctgtggattaccagttcaacagatcggcatacttgtcggatgtctggaaactgaaattacatgctgtccaattcatggaaggcaagtgcaattaacttaaccttcaaggaggcaaatgcagtttaaggaaaacttacacgttgaaagcacccatattatgttttcggatgagttcctatgtagctacgttgaaagagtacttttctacacaattgattgaggtgttctcgatttgatctctttttgagcttttggtgtcgttgggattttgcgctaaatattggaaattagaccaaggggctgtttgttcgttgtgaaggaattataatttacttaatatagtaggttatttggtttggaatttaatattccatcacatgttaaagtttagatataatcctatcctaaatttatagggtgagaatatggaaattggctatatattactagtttatgattctactttgtaatttatgacatgctataataaaaatgtagcatat

SEQ ID NO: 29376 - DNA, 7130 bp, Zea Mays
cctctcccgagtcccgacccgtcatcgccgccgccattgtcccgccgcgcagggtttagggttcagtagcggcggcaccagtttttctcctcatcaagggagtcgcggccaccgccaacgagacaagctgtcggcgatgtcgtctatcgcatcgcagctgaaggccatcaagtcggcgctcggcgctgcgccggagccggctcggcggcccgtcacccggccgtctgtgctcttcgacgccaaagaggccgccgacatcgacctccgggccatcctgcccattgccctctctgggttggagcaccttaccagcgtagacgagagatttgcaaaatacagcaacactctgttcagggagactagccttgaggtgaaccgcgaacagttgactcccaaggagaacgacaaactcaacaagtctatctccacctaccttcgccttctagctggctatttgcatcttccctctgccctcaagacccttgaataccttatccgcagatacctggtgcatgtatacaattcggatgagttgctgctgagcgcactgccataccatgatacacatgcgtttgttcggatcgtgcagttggtcaacttagggtgcaccgccacccaggagtgttctagtgcaacagtgcatccgtgataaggctgtgctggagaccctatgcaactatgctacaccaacaaaggaattcagtcactcgaagacagtcgtctgcttttgcactgctgtgattgttgagtgtttgggtgctgtccctaagcttgacacagatgtagtgcagagggtgttgggatttgtgtttgactctcttaatcctgcagtgacgcgagaccaggaatataaggctggcgctcttatgattgttggagtacttggaacccgtgcgactctagcgcctaaacttgttcaaaatttgattcttttcgttgcaaggactgcacaacatgatgcattcgagtcagttgacttgccatggcttcgtgtttcagtgatggctcttataagtcttgttcagtcccaatctgtccatgttttccctaagaagccactgatggttttgaaagacatcagggatttttctggtatactttctgtattatccagtgaatacaacatcgagaaattcattaggctttatgttgaatcattaattgactacagtattgtcgatggtacctgccacacacacctgattgaaactattgagagtctgccaatgaagaatttcattgaaagtgtcgtgtgcaaaattcttggaaactgtatcaaggtatctcgggccacaggaatcccagatattaatcacacagaattatgggctaagaaaatttttaaggcaattgaaagaaaatatcccctggagctacgtgatgctattcataaatttcttgagaactctgaaactaattcaccgggaggggattctttggctgaggtttttgggatattgtttgatgaaaacaagaatttgccaactgaaatatctgactcaaacatttggttcagtctcgatcatccaaaggctacggttcgtcaatctgctctctcaaaagttgctacatctggcatcttcaataacagaactctaaatcctcagaagtttatcaatatgcaagatgctatattacgtagtctgtatgatgatgatctaagtgttgtccaagctgctttatccatagaaggactagctgctgttgccaatcctgatagcctgttaaaagcatatgattgcgtgctcaccaaatgcatcaaaatcatcaacaaaggtggttcaaaggcattaaaagcttctgatgttgctgtttcttgcttggaaaagctggtaacggaataccaatcgcatcatatggaacatgccaaggatatagctacattagtgtttcgtctccttattgttcacccaaagacccttagggtgaacataaaggccttggagctagctaagaaaatacggtgggagttctacgcaagtagttctcttgtatatgatggggtcgattttgataaaatgaagaacatgagtgcagactccattgcttctattaacatgaacaacatcaaagcttttgctgaaactttcctagcagacccaaataagcatgtggagtggttagctaactctggaagtggaagtagattttctaaaactctgtttctgctcatagtattgcaaacacttgtttccacagaagctttggatgagcaggtgaatctttgtcatgcttgtttgccagtcctgaaggatgaatgtcatcacatacagcccaaagatagcgatgttggtgatgagatcagcattactaaccttgagatgtgcagtttagaattggtgaagcattttttcaacagagacacagaggcattgaatgttagaatccttgtatgtatattttggggtatagtaagggtgcagtcctcctgtattaagcagaatcccgtggttggcagtggtggaaacacaatgctggatgatttgtttctcttcttccttgtttcacctgccaaaaatatcttccagaagcacctacagtatcttgttaattgcattggagcaccttttcaatttatttcaaagtacttcctggatgaagatttatcagaaagagtccaagtggagagtcttcttgtgtttgcatctatttgttccaagtgcgcttcctctgacaataatagcttggatgaaagcatctgtgtgcagcttctactaggttttccttccattattctaccacttgctcatgtcaacaaggatataagggcatctgcaattaagtgtattgaggggttatctttggtgtggcagcgcttgagcacttctgtaccaagaaatggaaacaacaccaaattacctcaatgtttgtcatctccaacttttggtagtttccttgaattgttggttaaccaaaagaccatgatctgctcggacgcaaaatttcttcctgcatatatttcatctatgctgagcccatgtaaagatattctggttcccgagaatctccatgaaagatttgatccgcatacaaaggatactattcttactttcatcttgcgctctgctttgaggctccctccttacggaaagttcatggttctgtcagtcctgaaaggagtaggaagcatcttatttcatgcagaagatgtgaagtctctgttttttgatcttctggaccgtcgtgatcagtaccagaatcgacataattgcaagcagatcctatccacccatgaaatgcataccttgtgcttgcttttggaggttttattctcaacgccagatcatgtgaatattggttttaacatgtttgaacctttgatgaaagctttaaaggttgatgcttcgtctccaggtgattctgttgttgtgatgccatgtcttactgtcctgcagaatcttcaaccagggttctttgataatttgaagactgatactaaggaaaaagttgttggacgccttatttccttggttcgaactgagagtttcgtagttcgaaatgctgcacgggatgctttactgcgtattaatgttcattcttccactttagtaaaatttattgaattaatttcaacacttggtgatgcaagaggacattcaaaaaggataaagagaaatgaagatcgggaccttaatgtgttctgcaattttgcggagatatttggagaaaattctgtagcttctattcttgtttctcttctagatatcttgtttcttaagaaagatgtgaagcaaaggtcgcgtttattacaacctcttttccagattctatcgaagctcctttctgatcaatgggtctcagttattgttagtcagtataacgaccaacaagatacctcatctgaaatccctgatttatctagttttgtaaaagaagttcaacacttggtactgctggccctcaaagatattacagatacactacaatcgggtcaccatgatgcaatggtcagcagttccgatgtaggtcttcttattgattgtgtacggtccatccaggacataggaactcggaatcatggcttttccttgatagcttctttgggaaaggcttgcccgcaactggtctcagagagtattgttgatttgtttgtcgctattggggatgctattaaacaggacgatagccactcgcaacgtgttttggaggatttattatctgtcttagtcccatgttggttatcaaggaccacaagcatagaaaagcttcttcagatattcattaaagctttagcagatgtgcctgaacataggcgattgacgcttatggtttacctcttaaggaccatgggaaaagaaaataatttgagtactgtgatcatgcatctgttacactcggtggttgagcggatttcacactcgttttctgtacatcatggggacgattatagattggctatgtcacaggagtgggagtatggattggcagtaaatgtgcttgaccagttttcgtataaattgtggtttccttgtttgagtaagcttctaaaaaacatcagggtgcatgagaagcaagatctgcatcttatgctacatttggcaatgaggcttattctatttaagttgcaagatacagaacttaattttgaacttgaatctgaggaagctgctaattctatccagggttctcttggggcacttatggaggaagttatcttgtgtggtgtgtatgccagagataaaaaaagagatatttgtactgacattactaaagaagtcagagattttgcaaatacaatactcaaaactattacaggctggatgcgtgcttcgacatacttgatgggaattactctgctgttggatcattcagataatcatgtgaaaagaaagacacttcggattttgtctgaaacggccagaggaaacagtttggttcagaagaatcaaaggaaagcacgaaaactgaagcatatatctggtactactattaaagtagacaagagctctggtccttatttcagcaaattgtgcttaaagattctggagttgattgacagagttggtgattcggacactaaagtgaaagtagctgctatttcttcgcttgaaacactagcaaaagaatatccctctgataatcctgtttatagcaactgccttgcaacaatcattgatcaaattggctctgatgaggcagctgtgtcttctgcattaattcatactgtgggctctctggtaaatgtgatcggatcaaaagcattaccacaactcccattaatcatgaaaaacataatgctaatgtcacatcaaatttcatgttgccctagcggaaattatgctcatggttccactagaactgccgctgaactttctaaccaagacataactgtgttgctatctgcactgacaacaattgaggtgattgtggaaaagctgggtgaatttgttaatccatatttgaaagaaatacttgatctggtagtactgcatcctgaatgcagcactcaaatgcatgccaaattagatgcaaaagcagcacgtgttcgagagctattgactgtaaaagttccagtccggcttatcctctcacctttactgaatctgtactctcttactgcaaattgtggagatgcaagtcttacgttggcattcagcatgcttgctagtctagttggtacaatggaccggctggctgtaggaacttaccattcaaaaatatatgaacattgtttagcagctcttgatctccgtcgtcaacaccctgactctttgaagaatataaatatggtggaacaaagtattattcatgccataatctctcttaccatgaaacttacggagggcacttttaggccactttttcttcgtactttggaatgggctgaggctgaagttgatgaatcctcatcaaagaaaagtttggaccgtgcaattgttttctacaaattggttaacaaacttgctgaaaaacacaggtccttgttcacaccttacttcaaatatctactcgagggatctatacaatatctctctgaagacgatgctttgggtggttcgaagcataagaagaagaagaccaaacttgtagatgttcaagttgaacagaaggataaattattggggttaaaattgtggaatttaagagctctagttttgaaatccttacaccaatgtttcctctatgataatgaccagaagatccttgattcctctaatttccaggttcttttgaaacctattgtctcccagttcgttgtggaaccaccaaaatctgttgaatcagttcttgacgctccatcaattgaagaagtagatgaaactataattctgtgcttgggccaaatggcagtaactgcacggacagatgttctttggaagcctcttaaccatgaggtgctgatgcagactaggagtgatgaagttcgccccaaaatgctgggcctgaaggttatcaggtacatggtccaacatctgaaggaggagtatgtcgttctcgtaccagagaccataccgttcctaggcgaattgctcgaggatgtggagcttcctgtcaagaccctgtcgcaggagatcttgaaagagatggaaaccctcagtggcgaaagcctccagcagtacctatgaggcatcatctcctcgcggtagtaccgtttggctgatgaactgtagaacatctactcatttcctgtggattaccagttcaacagatcggcatacttgtcggatgtctggaaactgaaattacatgctgtccaattcatggaaggcaagtgcaattaacttaaccttcaaggaggcaaatgcagtttaaggaaaacttacacgttgaaagcacccatattatgttttcggatgagttcctatgtagctacgttgaaagagtacttttctacacaattgattgaggtgttctcgatttgatctctttttgagcttttggtgtcgttgggattttgcgctaaatattggaaattagaccaaggggctgtttgttcgttgtgaaggaattataatttacttaatatagtaggttatttggtttggaatttaatattccatcacatgttaaagtttagatataatcctatcctaaatttatagggtgagaatatggaaattggctatatattactagtttatgattctactttgtaatttatgacatgctataataaaaatgtagcatat

SEQ ID NO: 29377 - DNA, 5982 bp, Zea Mays
atcgccgccgccattgtcccgccgcgcagggtttagggttcagtagcggcggcaccagtttttctcctcatcaagggagtcgcggccaccgccaacgagacaagctgtcggcgatgtcgtctatcgcatcgcagctgaaggccatcaagtcggcgctcggcgctgcgccggagccggctcggcggcccgtcacccggccgtctgtgctcttcgacgccaaagaggccgccgacatcgacctccgggccatcctgcccattgccctctctgggttggagcaccttaccagcgtagacgagagatttgcaaaatacagcaacactctgttcagggagactagccttgaggtgaaccgcgaacagttgactcccaaggagaacgacaaactcaacaagtctatctccacctaccttcgccttctagctggctatttgcatcttccctctgccctcaagacccttgaataccttatccgcagatacctggtgcatgtatacaattcggatgagttgctgctgagcgcactgccataccatgatacacatgcgtttgttcggatcgtgcagttggtcaacttagggaatagtaactgggcatttcttggcggtgtcaagtcctcaggtgcaccgccacccaggagtgttctagtgcaacagtgcatccgtgataaggctgtgctggagaccctatgcaactatgctacaccaacaaaggaattcagtcactcgaagacagtcgtctgcttttgcactgctgtgattgttgagtgtttgggtgctgtccctaagcttgacacagatgtagtgcagagggtgttgggatttgtgtttgactctcttaatcctgcagtgacgcgagaccaggaatataaggctggcgctcttatgattgttggagtacttggaacccgtgcgactctagcgcctaaacttgttcaaaatttgattcttttcgttgcaaggactgcacaacatgatgcattcgagtcagttgacttgccatggcttcgtgtttcagtgatggctcttataagtcttgttcagtcccaatctgtccatgttttccctaagaagccactgatggttttgaaagacatcagggatttttctggtatactttctgtattatccagtgaatacaacatcgagaaattcattaggctttatgttgaatcattaattgactacagtattgtcgatggtacctgccacacacacctgattgaaactattgagagtctgccaatgaagaatttcattgaaagtgtcgtgtgcaaaattcttggaaactgtatcaaggtatctcgggccacaggaatcccagatattaatcacacagaattatgggctaagaaaatttttaaggcaattgaaagaaaatatcccctggagctacgtgatgctattcataaatttcttgagaactctgaaactaattcaccgggaggggattctttggctgaggtttttgggatattgtttgatgaaaacaagaatttgccaactgaaatatctgactcaaacatttggttcagtctcgatcatccaaaggctacggttcgtcaatctgctctctcaaaagttgctacatctggcatcttcaataacagaactctaaatcctcagaagtttatcaatatgcaagatgctatattacgtagtctgtatgatgatgatctaagtgttgtccaagctgctttatccatagaaggactagctgctgttgccaatcctgatagcctgttaaaagcatatgattgcgtgctcaccaaatgcatcaaaatcatcaacaaaggtggttcaaaggcattaaaagcttctgatgttgctgtttcttgcttggaaaagctggtaacggaataccaatcgcatcatatggaacatgccaaggatatagctacattagtgtttcgtctccttattgttcacccaaagacccttagggtgaacataaaggccttggagctagctaagaaaatacggtgggagttctacgcaagtagttctcttgtatatgatggggtcgattttgataaaatgaagaacatgagtgcagactccattgcttctattaacatgaacaacatcaaagcttttgctgaaactttcctagcagacccaaataagcatgtggagtggttagctaactctggaagtggaagtagattttctaaaactctgtttctgctcatagtattgcaaacacttgtttccacagaagctttggatgagcaggtgaatctttgtcatgcttgtttgccagtcctgaaggatgaatgtcatcacatacagcccaaagatagcgatgttggtgatgagatcagcattactaaccttgagatgtgcagtttagaattggtgaagcattttttcaacagagacacagaggcattgaatgttagaatccttgtatgtatattttggggtatagtaagggtgcagtcctcctgtattaagcagaatcccgtggttggcagtggtggaaacacaatgctggatgatttgtttctcttcttccttgtttcacctgccaaaaatatcttccagaagcacctacagtatcttgttaattgcattggagcaccttttcaatttatttcaaagtacttcctggatgaagatttatcagaaagagtccaagtggagagtcttcttgtgtttgcatctatttgttccaagtgcgcttcctctgacaataatagcttggatgaaagcatctgtgtgcagcttctactaggttttccttccattattctaccacttgctcatgtcaacaaggatataagggcatctgcaattaagtgtattgaggggttatctttggtgtggcagcgcttgagcacttctgtaccaagaaatggaaacaacaccaaattacctcaatgtttgtcatctccaacttttggtagtttccttgaattgttggttaaccaaaagaccatgatctgctcggacgcaaaatttcttcctgcatatatttcatctatgctgagcccatgtaaagatattctggttcccgagaatctccatgaaagatttgatccgcatacaaaggatactattcttactttcatcttgcgctctgctttgaggctccctccttacggaaagttcatggttctgtcagtcctgaaaggagtaggaagcatcttatttcatgcagaagatgtgaagtctctgttttttgatcttctggaccgtcgtgatcagtaccagaatcgacataattgcaagcagatcctatccacccatgaaatgcataccttgtgcttgcttttggaggttttattctcaacgccagatcatgtgaatattggttttaacatgtttgaacctttgatgaaagctttaaaggtgagttgatgcttcgtctccaggtgattctgttgttgtgatgccatgtcttactgtcctgcagaatcttcaaccagggttctttgataatttgaagactgatactaaggaaaaagttgttggacgccttatttccttggttcgaactgagagtttcgtagttcgaaatgctgcacgggatgctttactgcgtattaatgttcattcttccactttagtaaaatttattgaattaatttcaacacttggtgatgcaagaggacattcaaaaaggataaagagaaatgaagatcgggaccttaatgtgttctgcaattttgcggagatatttggagaaaattctgtagcttctattcttgtttctcttctagatatcttgtttcttaagaaagatgtgaagcaaaggtcgcgtttattacaacctcttttccagattctatcgaagctcctttctgatcaatgggtctcagttattgttagtcagtataacgaccaacaagatacctcatctgaaatccctgatttatctagttttgtaaaagaagttcaacacttggtactgctggccctcaaagatattacagatacactacaatcgggtcaccatgatgcaatggtcagcagttccgatgtaggtcttcttattgattgtgtacggtccatccaggacataggaactcggaatcatggcttttccttgatagcttctttgggaaaggcttgcccgcaactggtctcagagagtattgttgatttgtttgtcgctattggggatgctattaaacaggacgatagccactcgcaacgtgttttggaggatttattatctgtcttagtcccatgttggttatcaaggaccacaagcatagaaaagcttcttcagatattcattaaagctttagcagatgtgcctgaacataggcgattgacgcttatggtttacctcttaaggaccatgggaaaagaaaataatttgagtactgtgatcatgcatctgttacactcggtggttgagcggatttcacactcgttttctgtacatcatggggacgattatagattggctatgtcacaggagtgggagtatggattggcagtaaatgtgcttgaccagttttcgtataaattgtggtttccttgtttgagtaagcttctaaaaaacatcagggtgcatgagaagcaagatctgcatcttatgctacatttggcaatgaggcttattctatttaagttgcaagatacagaacttaattttgaacttgaatctgaggaagctgctaattctatccagggttctcttggggcacttatggaggaagttatcttgtgtggtgtgtatgccagagataaaaaaagagatatttgtactgacattactaaagaagtcagagattttgcaaatacaatactcaaaactattacaggctggatgcgtgcttcgacatacttgatgggaattactctgctgttggatcattcagataatcatgtgaaaagaaagacacttcggattttgtctgaaacggccagaggaaacagtttggttcagaagaatcaaaggaaagcacgaaaactgaagcatatatctggtactactattaaagtagacaagagctctggtccttatttcagcaaattgtgcttaaagattctggagttgattgacagagttggtgattcggacactaaagtgaaagtagctgctatttcttcgcttgaaacactagcaaaagaatatccctctgataatcctgtttatagcaactgccttgcaacaatcattgatcaaattggctctgatgaggcagctgtgtcttctgcattaattcatactgtgggctctctggtaaatgtgatcggatcaaaagcattaccacaactcccattaatcatgaaaaacataatgctaatgtcacatcaaatttcatgttgccctagcggaaattatgctcatggttccactagaactgccgctgaactttctaaccaagacataactgtgttgctatctgcactgacaacaattgaggtgattgtggaaaagctgggtgaatttgttaatccatatttgaaagaaatacttgatctggtagtactgcatcctgaatgcagcactcaaatgcatgccaaattagatgcaaaagcagcacgtgttcgagagctattgactgtaaaagttccagtccggcttatcctctcacctttactgaatctgtactctcttactgcaaattgtggagatgcaagtcttacgttggcattcagcatgcttgctagtctagttggtacaatggaccggctggctgtaggaacttaccattcaaaaatatatgaacattgtttagcagctcttgatctccgtcgtcaacaccctgactctttgaagaatataaatatggtggaacaaagtattattcatgccataatctctcttaccatgaaacttacggagggcacttttaggccactttttcttcgtactttggaatgggctgaggctgaagttgatgaatcctcatcaaagaaaagtttggaccgtgcaattgttttctacaaattggttaacaaacttgctgaaaaacacagatttatgtttactgagaatagcatcccaaagatcaagataatc

SEQ ID NO: 29378 - DNA, 6976 bp, Zea Mays
gccgccgccattgtcccgccgcgcagggtttagggttcagtagcggcggcaccagtttttctcctcatcaagggagtcgcggccaccgccaacgagacaagctgtcggcgatgtcgtctatcgcatcgcagctgaaggccatcaagtcggcgctcggcgctgcgccggagccggctcggcggcccgtcacccggccgtctgtgctcttcgacgccaaagaggccgccgacatcgacctccgggccatcctgcccattgccctctctgggttggagcaccttaccagcgtagacgagagatttgcaaaatacagcaacactctgttcagggagactagccttgaggtgaaccgcgaacagttgactcccaaggagaacgacaaactcaacaagtctatctccacctaccttcgccttctagctggctatttgcatcttccctctgccctcaagacccttgaataccttatccgcagatacctggtgcatgtatacaattcggatgagttgctgctgagcgcactgccataccatgatacacatgcgtttgttcggatcgtgcagttggtcaacttagggaatagtaactgggcatttcttggcggtgtcaagtcctcaggtgcaccgccacccaggagtgttctagtgcaacagtgcatccgtgataaggctgtgctggagaccctatgcaactatgctacaccaacaaaggaattcagtcactcgaagacagtcgtctgcttttgcactgctgtgattgttgagtgtttgggtgctgtccctaagcttgacacagatgtagtgcagagggtgttgggatttgtgtttgactctcttaatcctgcagtgacgcgagaccaggaatataaggctggcgctcttatgattgttggagtacttggaacccgtgcgactctagcgcctaaacttgttcaaaatttgattcttttcgttgcaaggactgcacaacatgatgcattcgagtcagttgacttgccatggcttcgtgtttcagtgatggctcttataagtcttgttcagtcccaatctgtccatgttttccctaagaagccactgatggttttgaaagacatcagggatttttctggtatactttctgtattatccagtgaatacaacatcgagaaattcattaggctttatgttgaatcattaattgactacagtattgtcgatggtacctgccacacacacctgattgaaactattgagagtctgccaatgaagaatttcattgaaagtgtcgtgtgcaaaattcttggaaactgtatcaaggtatctcgggccacaggaatcccagatattaatcacacagaattatgggctaagaaaatttttaaggcaattgaaagaaaatatcccctggagctacgtgatgctattcataaatttcttgagaactctgaaactaattcaccgggaggggattctttggctgaggtttttgggatattgtttgatgaaaacaagaatttgccaactgaaatatctgactcaaacatttggttcagtctcgatcatccaaaggctacggttcgtcaatctgctctctcaaaagttgctacatctggcatcttcaataacagaactctaaatcctcaggtggttcaaaggcattaaaagcttctgatgttgctgtttcttgcttggaaaagctggtaacggaataccaatcgcatcatatggaacatgccaaggatatagctacattagtgtttcgtctccttattgttcacccaaagacccttagggtgaacataaaggccttggagctagctaagaaaatacggtgggagttctacgcaagtagttctcttgtatatgatggggtcgattttgataaaatgaagaacatgagtgcagactccattgcttctattaacatgaacaacatcaaagcttttgctgaaactttcctagcagacccaaataagcatgtggagtggttagctaactctggaagtggaagtagattttctaaaactctgtttctgctcatagtattgcaaacacttgtttccacagaagctttggatgagcaggtgaatctttgtcatgcttgtttgccagtcctgaaggatgaatgtcatcacatacagcccaaagatagcgatgttggtgatgagatcagcattactaaccttgagatgtgcagtttagaattggtgaagcattttttcaacagagacacagaggcattgaatgttagaatccttgtatgtatattttggggtatagtaagggtgcagtcctcctgtattaagcagaatcccgtggttggcagtggtggaaacacaatgctggatgatttgtttctcttcttccttgtttcacctgccaaaaatatcttccagaagcacctacagtatcttgttaattgcattggagcaccttttcaatttatttcaaagtacttcctggatgaagatttatcagaaagagtccaagtggagagtcttcttgtgtttgcatctatttgttccaagtgcgcttcctctgacaataatagcttggatgaaagcatctgtgtgcagcttctactaggttttccttccattattctaccacttgctcatgtcaacaaggatataagggcatctgcaattaagtgtattgaggggttatctttggtgtggcagcgcttgagcacttctgtaccaagaaatggaaacaacaccaaattacctcaatgtttgtcatctccaacttttggtagtttccttgaattgttggttaaccaaaagaccatgatctgctcggacgcaaaatttcttcctgcatatatttcatctatgctgagcccatgtaaagatattctggttcccgagaatctccatgaaagatttgatccgcatacaaaggatactattcttactttcatcttgcgctctgctttgaggctccctccttacggaaagttcatggttctgtcagtcctgaaaggagtaggaagcatcttatttcatgcagaagatgtgaagtctctgttttttgatcttctggaccgtcgtgatcagtaccagaatcgacataattgcaagcagatcctatccacccatgaaatgcataccttgtgcttgcttttggaggttttattctcaacgccagatcatgtgaatattggttttaacatgtttgaacctttgatgaaagctttaaaggttgatgcttcgtctccaggtgattctgttgttgtgatgccatgtcttactgtcctgcagaatcttcaaccagggttctttgataatttgaagactgatactaaggaaaaagttgttggacgccttatttccttggttcgaactgagagtttcgtagttcgaaatgctgcacgggatgctttactgcgtattaatgttcattcttccactttagtaaaatttattgaattaatttcaacacttggtgatgcaagaggacattcaaaaaggataaagagaaatgaagatcgggaccttaatgtgttctgcaattttgcggagatatttggagaaaattctgtagcttctattcttgtttctcttctagatatcttgtttcttaagaaagatgtgaagcaaaggtcgcgtttattacaacctcttttccagattctatcgaagctcctttctgatcaatgggtctcagttattgttagtcagtataacgaccaacaagatacctcatctgaaatccctgatttatctagttttgtaaaagaagttcaacacttggtactgctggccctcaaagatattacagatacactacaatcgggtcaccatgatgcaatggtcagcagttccgatgtaggtcttcttattgattgtgtacggtccatccaggacataggaactcggaatcatggcttttccttgatagcttctttgggaaaggcttgcccgcaactggtctcagagagtattgttgatttgtttgtcgctattggggatgctattaaacaggacgatagccactcgcaacgtgttttggaggatttattatctgtcttagtcccatgttggttatcaaggaccacaagcatagaaaagcttcttcagatattcattaaagctttagcagatgtgcctgaacataggcgattgacgcttatggtttacctcttaaggaccatgggaaaagaaaataatttgagtactgtgatcatgcatctgttacactcggtggttgagcggatttcacactcgttttctgtacatcatggggacgattatagattggctatgtcacaggagtgggagtatggattggcagtaaatgtgcttgaccagttttcgtataaattgtggtttccttgtttgagtaagcttctaaaaaacatcagggtgcatgagaagcaagatctgcatcttatgctacatttggcaatgaggcttattctatttaagttgcaagatacagaacttaattttgaacttgaatctgaggaagctgctaattctatccagggttctcttggggcacttatggaggaagttatcttgtgtggtgtgtatgccagagataaaaaaagagatatttgtactgacattactaaagaagtcagagattttgcaaatacaatactcaaaactattacaggctggatgcgtgcttcgacatacttgatgggaattactctgctgttggatcattcagataatcatgtgaaaagaaagacacttcggattttgtctgaaacggccagaggaaacagtttggttcagaagaatcaaaggaaagcacgaaaactgaagcatatatctggtactactattaaagtagacaagagctctggtccttatttcagcaaattgtgcttaaagattctggagttgattgacagagttggtgattcggacactaaagtgaaagtagctgctatttcttcgcttgaaacactagcaaaagaatatccctctgataatcctgtttatagcaactgccttgcaacaatcattgatcaaattggctctgatgaggcagctgtgtcttctgcattaattcatactgtgggctctctggtaaatgtgatcggatcaaaagcattaccacaactcccattaatcatgaaaaacataatgctaatgtcacatcaaatttcatgttgccctagcggaaattatgctcatggttccactagaactgccgctgaactttctaaccaagacataactgtgttgctatctgcactgacaacaattgaggtgattgtggaaaagctgggtgaatttgttaatccatatttgaaagaaatacttgatctggtagtactgcatcctgaatgcagcactcaaatgcatgccaaattagatgcaaaagcagcacgtgttcgagagctattgactgtaaaagttccagtccggcttatcctctcacctttactgaatctgtactctcttactgcaaattgtggagatgcaagtcttacgttggcattcagcatgcttgctagtctagttggtacaatggaccggctggctgtaggaacttaccattcaaaaatatatgaacattgtttagcagctcttgatctccgtcgtcaacaccctgactctttgaagaatataaatatggtggaacaaagtattattcatgccataatctctcttaccatgaaacttacggagggcacttttaggccactttttcttcgtactttggaatgggctgaggctgaagttgatgaatcctcatcaaagaaaagtttggaccgtgcaattgttttctacaaattggttaacaaacttgctgaaaaacacaggtccttgttcacaccttacttcaaatatctactcgagggatctatacaatatctctctgaagacgatgctttgggtggttcgaagcataagaagaagaagaccaaacttgtagatgttcaagttgaacagaaggataaattattggggttaaaattgtggaatttaagagctctagttttgaaatccttacaccaatgtttcctctatgataatgaccagaagatccttgattcctctaatttccaggttcttttgaaacctattgtctcccagttcgttgtggaaccaccaaaatctgttgaatcagttcttgacgctccatcaattgaagaagtagatgaaactataattctgtgcttgggccaaatggcagtaactgcacggacagatgttctttggaagcctcttaaccatgaggtgctgatgcagactaggagtgatgaagttcgccccaaaatgctgggcctgaaggttatcaggtacatggtccaacatctgaaggaggagtatgtcgttctcgtaccagagaccataccgttcctaggcgaattgctcgaggatgtggagcttcctgtcaagaccctgtcgcaggagatcttgaaagagatggaaaccctcagtggcgaaagcctccagcagtacctatgaggcatcatctcctcgcggtagtaccgtttggctgatgaactgtagaacatctactcatttcctgtggattaccagttcaacagatcggcatacttgtcggatgtctggaaactgaaattacatgctgtccaattcatggaaggcaagtgcaattaacttaaccttcaaggaggcaaatgcagtttaaggaaaacttacacgttgaaagcacccatattatgttttcggatgagttcctatgtagctacgttgaaagagtacttttctacacaattgattgaggtgttctcgatttgatctctttttgagcttttggtgtcgttgggattttgcgctaaatattggaaattagaccaaggggctgtttgttcgttgtgaaggaattataatttacttaatatagtaggttatttggtttggaatttaatattccatcacatgttaaagtttagatataatcctatcctaaatttatagggtgagaatatggaaattggctatatattactagtttatgattctactttgtaatttatgacatgctataataaaaatgtagcatat

SEQ ID NO: 29379 - DNA, 5911 bp, Zea Mays
ccgccattgtcccgccgcgcagggtttagggttcagtagcggcggcaccagtttttctcctcatcaagggagtcgcggccaccgccaacgagacaagctgtcggcgatgtcgtctatcgcatcgcagctgaaggccatcaagtcggcgctcggcgctgcgccggagccggctcggcggcccgtcacccggccgtctgtgctcttcgacgccaaagaggccgccgacatcgacctccgggccatcctgcccattgccctctctgggttggagcaccttaccagcgtagacgagagatttgcaaaatacagcaacactctgttcagggagactagccttgaggtgaaccgcgaacagttgactcccaaggagaacgacaaactcaacaagtctatctccacctaccttcgccttctagctggctatttgcatcttccctctgccctcaagacccttgaataccttatccgcagatacctggtgcatgtatacaattcggatgagttgctgctgagcgcactgccataccatgatacacatgcgtttgttcggatcgtgcagttggtcaacttagggaatagtaactgggcatttcttggcggtgtcaagtcctcaggtgcaccgccacccaggagtgttctagtgcaacagtgcatccgtgataaggctgtgctggagaccctatgcaactatgctacaccaacaaaggaattcagtcactcgaagacagtcgtctgcttttgcactgctgtgattgttgagtgtttgggtgctgtccctaagcttgacacagatgtagtgcagagggtgttgggatttgtgtttgactctcttaatcctgcagtgacgcgagaccaggaatataaggctggcgctcttatgattgttggagtacttggaacccgtgcgactctagcgcctaaacttgttcaaaatttgattcttttcgttgcaaggactgcacaacatgatgcattcgagtcagttgacttgccatggcttcgtgtttcagtgatggctcttataagtcttgttcagtcccaatctgtccatgttttccctaagaagccactgatggttttgaaagacatcagggatttttctggtatactttctgtattatccagtgaatacaacatcgagaaattcattaggctttatgttgaatcattaattgactacagtattgtcgatggtacctgccacacacacctgattgaaactattgagagtctgccaatgaagaatttcattgaaagtgtcgtgtgcaaaattcttggaaactgtatcaaggtatctcgggccacaggaatcccagatattaatcacacagaattatgggctaagaaaatttttaaggcaattgaaagaaaatatcccctggagctacgtgatgctattcataaatttcttgagaactctgaaactaattcaccgggaggggattctttggctgaggtttttgggatattgtttgatgaaaacaagaatttgccaactgaaatatctgactcaaacatttggttcagtctcgatcatccaaaggctacggttcgtcaatctgctctctcaaaagttgctacatctggcatcttcaataacagaactctaaatcctcagaagtttatcaatatgcaagatgctatattacgtagtctgtatgatgatgatctaagtgttgtccaagctgctttatccatagaaggactagctgctgttgccaatcctgatagcctgttaaaagcatatgattgcgtgctcaccaaatgcatcaaaatcatcaacaaaggtggttcaaaggcattaaaagcttctgatgttgctgtttcttgcttggaaaagctggtaacggaataccaatcgcatcatatggaacatgccaaggatatagctacattagtgtttcgtctccttattgttcacccaaagacccttagggtgaacataaaggccttggagctagctaagaaaatacggtgggagttctacgcaagtagttctcttgtatatgatggggtcgattttgataaaatgaagaacatgagtgcagactccattgcttctattaacatgaacaacatcaaagcttttgctgaaactttcctagcagacccaaataagcatgtggagtggttagctaactctggaagtggaagtagattttctaaaactctgtttctgctcatagtattgcaaacacttgtttccacagaagctttggatgagcaggtgaatctttgtcatgcttgtttgccagtcctgaaggatgaatgtcatcacatacagcccaaagatagcgatgttggtgatgagatcagcattactaaccttgagatgtgcagtttagaattggtgaagcattttttcaacagagacacagaggcattgaatgttagaatccttgtatgtatattttggggtatagtaagggtgcagtcctcctgtattaagcagaatcccgtggttggcagtggtggaaacacaatgctggatgatttgtttctcttcttccttgtttcacctgccaaaaatatcttccagaagcacctacagtatcttgttaattgcattggagcaccttttcaatttatttcaaagtacttcctggatgaagatttatcagaaagagtccaagtggagagtcttcttgtgtttgcatctatttgttccaagtgcgcttcctctgacaataatagcttggatgaaagcatctgtgtgcagcttctactaggttttccttccattattctaccacttgctcatgtcaacaaggatataagggcatctgcaattaagtgtattgaggggttatctttggtgtggcagcgcttgagcacttctgtaccaagaaatggaaacaacaccaaattacctcaatgtttgtcatctccaacttttggtagtttccttgaattgttggttaaccaaaagaccatgatctgctcggacgcaaaatttcttcctgcatatatttcatctatgctgagcccatgtaaagatattctggttcccgagaatctccatgaaagatttgatccgcatacaaaggatactattcttactttcatcttgcgctctgctttgaggctccctccttacggaaagttcatggttctgtcagtcctgaaaggagtaggaagcatcttatttcatgcagaagatgtgaagtctctgttttttgatcttctggaccgtcgtgatcagtaccagaatcgacataattgcaagcagatcctatccacccatgaaatgcataccttgtgcttgcttttggaggttttattctcaacgccagatcatgtgaatattggttttaacatgtttgaacctttgatgaaagctttaaagaatcttcaaccagggttctttgataatttgaagactgatactaaggaaaaagttgttggacgccttatttccttggttcgaactgagagtttcgtagttcgaaatgctgcacgggatgctttactgcgtattaatgttcattcttccactttagtaaaatttattgaattaatttcaacacttggtgatgcaagaggacattcaaaaaggataaagagaaatgaagatcgggaccttaatgtgttctgcaattttgcggagatatttggagaaaattctgtagcttctattcttgtttctcttctagatatcttgtttcttaagaaagatgtgaagcaaaggtcgcgtttattacaacctcttttccagattctatcgaagctcctttctgatcaatgggtctcagttattgttagtcagtataacgaccaacaagatacctcatctgaaatccctgatttatctagttttgtaaaagaagttcaacacttggtactgctggccctcaaagatattacagatacactacaatcgggtcaccatgatgcaatggtcagcagttccgatgtaggtcttcttattgattgtgtacggtccatccaggacataggaactcggaatcatggcttttccttgatagcttctttgggaaaggcttgcccgcaactggtctcagagagtattgttgatttgtttgtcgctattggggatgctattaaacaggacgatagccactcgcaacgtgttttggaggatttattatctgtcttagtcccatgttggttatcaaggaccacaagcatagaaaagcttcttcagatattcattaaagctttagcagatgtgcctgaacataggcgattgacgcttatggtttacctcttaaggaccatgggaaaagaaaataatttgagtactgtgatcatgcatctgttacactcggtggttgagcggatttcacactcgttttctgtacatcatggggacgattatagattggctatgtcacaggagtgggagtatggattggcagtaaatgtgcttgaccagttttcgtataaattgtggtttccttgtttgagtaagcttctaaaaaacatcagggtgcatgagaagcaagatctgcatcttatgctacatttggcaatgaggcttattctatttaagttgcaagatacagaacttaattttgaacttgaatctgaggaagctgctaattctatccagggttctcttggggcacttatggaggaagttatcttgtgtggtgtgtatgccagagataaaaaaagagatatttgtactgacattactaaagaagtcagagattttgcaaatacaatactcaaaactattacaggctggatgcgtgcttcgacatacttgatgggaattactctgctgttggatcattcagataatcatgtgaaaagaaagacacttcggattttgtctgaaacggccagaggaaacagtttggttcagaagaatcaaaggaaagcacgaaaactgaagcatatatctggtactactattaaagtagacaagagctctggtccttatttcagcaaattgtgcttaaagattctggagttgattgacagagttggtgattcggacactaaagtgaaagtagctgctatttcttcgcttgaaacactagcaaaagaatatccctctgataatcctgtttatagcaactgccttgcaacaatcattgatcaaattggctctgatgaggcagctgtgtcttctgcattaattcatactgtgggctctctggtaaatgtgatcggatcaaaagcattaccacaactcccattaatcatgaaaaacataatgctaatgtcacatcaaatttcatgttgccctagcggaaattatgctcatggttccactagaactgccgctgaactttctaaccaagacataactgtgttgctatctgcactgacaacaattgaggtgattgtggaaaagctgggtgaatttgttaatccatatttgaaagaaatacttgatctggtagtactgcatcctgaatgcagcactcaaatgcatgccaaattagatgcaaaagcagcacgtgttcgagagctattgactgtaaaagttccagtccggcttatcctctcacctttactgaatctgtactctcttactgcaaattgtggagatgcaagtcttacgttggcattcagcatgcttgctagtctagttggtacaatggaccggctggctgtaggaacttaccattcaaaaatatatgaacattgtttagcagctcttgatctccgtcgtcaacaccctgactctttgaagaatataaatatggtggaacaaagtattattcatgccataatctctcttaccatgaaacttacggagggcacttttaggccactttttcttcgtactttggaatgggctgaggctgaagttgatgaatcctcatcaaagaaaagtttggaccgtgcaattgttttctacaaattggttaacaaacttgctgaaaaacacagatttatgtttactgagaatagcatcccaaagatcaagataatc

SEQ ID NO: 29380 - DNA, 6918 bp, Zea Mays
ctttctcggaattccctctggattttgctgctatttgcagggttggagcaccttaccagcgtagacgagagatttgcaaaatacagcaacactctgttcagggagactagccttgaggtgaaccgcgaacagttgactcccaaggagaacgacaaactcaacaagtctatctccacctaccttcgccttctagctggctatttgcatcttccctctgccctcaagacccttgaataccttatccgcagatacctggtgcatgtatacaattcggatgagttgctgctgagcgcactgccataccatgatacacatgcgtttgttcggatcgtgcagttggtcaacttagggaatagtaactgggcatttcttggcggtgtcaagtcctcaggtgcaccgccacccaggagtgttctagtgcaacagtgcatccgtgataaggctgtgctggagaccctatgcaactatgctacaccaacaaaggaattcagtcactcgaagacagtcgtctgcttttgcactgctgtgattgttgagtgtttgggtgctgtccctaagcttgacacagatgtagtgcagagggtgttgggatttgtgtttgactctcttaatcctgcagtgacgcgagaccaggaatataaggctggcgctcttatgattgttggagtacttggaacccgtgcgactctagcgcctaaacttgttcaaaatttgattcttttcgttgcaaggactgcacaacatgatgcattcgagtcagttgacttgccatggcttcgtgtttcagtgatggctcttataagtcttgttcagtcccaatctgtccatgttttccctaagaagccactgatggttttgaaagacatcagggatttttctggtatactttctgtattatccagtgaatacaacatcgagaaattcattaggctttatgttgaatcattaattgactacagtattgtcgatggtacctgccacacacacctgattgaaactattgagagtctgccaatgaagaatttcattgaaagtgtcgtgtgcaaaattcttggaaactgtatcaaggtatctcgggccacaggaatcccagatattaatcacacagaattatgggctaagaaaatttttaaggcaattgaaagaaaatatcccctggagctacgtgatgctattcataaatttcttgagaactctgaaactaattcaccgggaggggattctttggctgaggtttttgggatattgtttgatgaaaacaagaatttgccaactgaaatatctgactcaaacatttggttcagtctcgatcatccaaaggctacggttcgtcaatctgctctctcaaaagttgctacatctggcatcttcaataacagaactctaaatcctcagaagtttatcaatatgcaagatgctatattacgtagtctgtatgatgatgatctaagtgttgtccaagctgctttatccatagaaggactagctgctgttgccaatcctgatagcctgttaaaagcatatgattgcgtgctcaccaaatgcatcaaaatcatcaacaaaggtggttcaaaggcattaaaagcttctgatgttgctgtttcttgcttggaaaagctggtaacggaataccaatcgcatcatatggaacatgccaaggatatagctacattagtgtttcgtctccttattgttcacccaaagacccttagggtgaacataaaggccttggagctagctaagaaaatacggtgggagttctacgcaagtagttctcttgtatatgatggggtcgattttgataaaatgaagaacatgagtgcagactccattgcttctattaacatgaacaacatcaaagcttttgctgaaactttcctagcagacccaaataagcatgtggagtggttagctaactctggaagtggaagtagattttctaaaactctgtttctgctcatagtattgcaaacacttgtttccacagaagctttggatgagcaggtgaatctttgtcatgcttgtttgccagtcctgaaggatgaatgtcatcacatacagcccaaagatagcgatgttggtgatgagatcagcattactaaccttgagatgtgcagtttagaattggtgaagcattttttcaacagagacacagaggcattgaatgttagaatccttgtatgtatattttggggtatagtaagggtgcagtcctcctgtattaagcagaatcccgtggttggcagtggtggaaacacaatgctggatgatttgtttctcttcttccttgtttcacctgccaaaaatatcttccagaagcacctacagtatcttgttaattgcattggagcaccttttcaatttatttcaaagtacttcctggatgaagatttatcagaaagagtccaagtggagagtcttcttgtgtttgcatctatttgttccaagtgcgcttcctctgacaataatagcttggatgaaagcatctgtgtgcagcttctactaggttttccttccattattctaccacttgctcatgtcaacaaggatataagggcatctgcaattaagtgtattgaggggttatctttggtgtggcagcgcttgagcacttctgtaccaagaaatggaaacaacaccaaattacctcaatgtttgtcatctccaacttttggtagtttccttgaattgttggttaaccaaaagaccatgatctgctcggacgcaaaatttcttcctgcatatatttcatctatgctgagcccatgtaaagatattctggttcccgagaatctccatgaaagatttgatccgcatacaaaggatactattcttactttcatcttgcgctctgctttgaggctccctccttacggaaagttcatggttctgtcagtcctgaaaggagtaggaagcatcttatttcatgcagaagatgtgaagtctctgttttttgatcttctggaccgtcgtgatcagtaccagaatcgacataattgcaagcagatcctatccacccatgaaatgcataccttgtgcttgcttttggaggttttattctcaacgccagatcatgtgaatattggttttaacatgtttgaacctttgatgaaagctttaaaggttgatgcttcgtctccaggtgattctgttgttgtgatgccatgtcttactgtcctgcagaatcttcaaccagggttctttgataatttgaagactgatactaaggaaaaagttgttggacgccttatttccttggttcgaactgagagtttcgtagttcgaaatgctgcacgggatgctttactgcgtattaatgttcattcttccactttagtaaaatttattgaattaatttcaacacttggtgatgcaagaggacattcaaaaaggataaagagaaatgaagatcgggaccttaatgtgttctgcaattttgcggagatatttggagaaaattctgtagcttctattcttgtttctcttctagatatcttgtttcttaagaaagatgtgaagcaaaggtcgcgtttattacaacctcttttccagattctatcgaagctcctttctgatcaatgggtctcagttattgttagtcagtataacgaccaacaagatacctcatctgaaatccctgatttatctagttttgtaaaagaagttcaacacttggtactgctggccctcaaagatattacagatacactacaatcgggtcaccatgatgcaatggtcagcagttccgatgtaggtcttcttattgattgtgtacggtccatccaggacataggaactcggaatcatggcttttccttgatagcttctttgggaaaggcttgcccgcaactggtctcagagagtattgttgatttgtttgtcgctattggggatgctattaaacaggacgatagccactcgcaacgtgttttggaggatttattatctgtcttagtcccatgttggttatcaaggaccacaagcatagaaaagcttcttcagatattcattaaagctttagcagatgtgcctgaacataggcgattgacgcttatggtttacctcttaaggaccatgggaaaagaaaataatttgagtactgtgatcatgcatctgttacactcggtggttgagcggatttcacactcgttttctgtacatcatggggacgattatagattggctatgtcacaggagtgggagtatggattggcagtaaatgtgcttgaccagttttcgtataaattgtggtttccttgtttgagtaagcttctaaaaaacatcagggtgcatgagaagcaagatctgcatcttatgctacatttggcaatgaggcttattctatttaagttgcaagatacagaacttaattttgaacttgaatctgaggaagctgctaattctatccagggttctcttggggcacttatggaggaagttatcttgtgtggtgtgtatgccagagataaaaaaagagatatttgtactgacattactaaagaagtcagagattttgcaaatacaatactcaaaactattacaggctggatgcgtgcttcgacatacttgatgggaattactctgctgttggatcattcagataatcatgtgaaaagaaagacacttcggattttgtctgaaacggccagaggaaacagtttggttcagaagaatcaaaggaaagcacgaaaactgaagcatatatctggtactactattaaagtagacaagagctctggtccttatttcagcaaattgtgcttaaagattctggagttgattgacagagttggtgattcggacactaaagtgaaagtagctgctatttcttcgcttgaaacactagcaaaagaatatccctctgataatcctgtttatagcaactgccttgcaacaatcattgatcaaattggctctgatgaggcagctgtgtcttctgcattaattcatactgtgggctctctggtaaatgtgatcggatcaaaagcattaccacaactcccattaatcatgaaaaacataatgctaatgtcacatcaaatttcatgttgccctagcggaaattatgctcatggttccactagaactgccgctgaactttctaaccaagacataactgtgttgctatctgcactgacaacaattgaggtgattgtggaaaagctgggtgaatttgttaatccatatttgaaagaaatacttgatctggtagtactgcatcctgaatgcagcactcaaatgcatgccaaattagatgcaaaagcagcacgtgttcgagagctattgactgtaaaagttccagtccggcttatcctctcacctttactgaatctgtactctcttactgcaaattgtggagatgcaagtcttacgttggcattcagcatgcttgctagtctagttggtacaatggaccggctggctgtaggaacttaccattcaaaaatatatgaacattgtttagcagctcttgatctccgtcgtcaacaccctgactctttgaagaatataaatatggtggaacaaagtattattcatgccataatctctcttaccatgaaacttacggagggcacttttaggccactttttcttcgtactttggaatgggctgaggctgaagttgatgaatcctcatcaaagaaaagtttggaccgtgcaattgttttctacaaattggttaacaaacttgctgaaaaacacaggtccttgttcacaccttacttcaaatatctactcgagggatctatacaatatctctctgaagacgatgctttgggtggttcgaagcataagaagaagaagaccaaacttgtagatgttcaagttgaacagaaggataaattattggggttaaaattgtggaatttaagagctctagttttgaaatccttacaccaatgtttcctctatgataatgaccagaagatccttgattcctctaatttccaggttcttttgaaacctattgtctcccagttcgttgtggaaccaccaaaatctgttgaatcagttcttgacgctccatcaattgaagaagtagatgaaactataattctgtgcttgggccaaatggcagtaactgcacggacagatgttctttggaagcctcttaaccatgaggtgctgatgcagactaggagtgatgaagttcgccccaaaatgctgggcctgaaggttatcaggtacatggtccaacatctgaaggaggagtatgtcgttctcgtaccagagaccataccgttcctaggcgaattgctcgaggatgtggagcttcctgtcaagaccctgtcgcaggagatcttgaaagagatggaaaccctcagtggcgaaagcctccagcagtacctatgaggcatcatctcctcgcggtagtaccgtttggctgatgaactgtagaacatctactcatttcctgtggattaccagttcaacagatcggcatacttgtcggatgtctggaaactgaaattacatgctgtccaattcatggaaggcaagtgcaattaacttaaccttcaaggaggcaaatgcagtttaaggaaaacttacacgttgaaagcacccatattatgttttcggatgagttcctatgtagctacgttgaaagagtacttttctacacaattgattgaggtgttctcgatttgatctctttttgagcttttggtgtcgttgggattttgcgctaaatattggaaattagaccaaggggctgtttgttcgttgtgaaggaattataatttacttaatatagtaggttatttggtttggaatttaatattccatcacatgttaaagtttagatataatcctatcctaaatttatagggtgagaatatggaaattggctatatattactagtttatgattctactttgtaatttatgacatgctataataaaaatgtagcatat

SEQ ID NO: 29381 - DNA, 4533 bp, Zea Mays
atgtagatttatcagaaagagtccaagtggagagtcttcttgtgtttgcatctatttgttccaagtgcgcttcctctgacaataatagcttggatgaaagcatctgtgtgcagcttctactaggttttccttccattattctaccacttgctcatgtcaacaaggatataagggcatctgcaattaagtgtattgaggggttatctttggtgtggcagcgcttgagcacttctgtaccaagaaatggaaacaacaccaaattacctcaatgtttgtcatctccaacttttggtagtttccttgaattgttggttaaccaaaagaccatgatctgctcggacgcaaaatttcttcctgcatatatttcatctatgctgagcccatgtaaagatattctggttcccgagaatctccatgaaagatttgatccgcatacaaaggatactattcttactttcatcttgcgctctgctttgaggctccctccttacggaaagttcatggttctgtcagtcctgaaaggagtaggaagcatcttatttcatgcagaagatgtgaagtctctgttttttgatcttctggaccgtcgtgatcagtaccagaatcgacataattgcaagcagatcctatccacccatgaaatgcataccttgtgcttgcttttggaggttttattctcaacgccagatcatgtgaatattggttttaacatgtttgaacctttgatgaaagctttaaaggttgatgcttcgtctccaggtgattctgttgttgtgatgccatgtcttactgtcctgcagaatcttcaaccagggttctttgataatttgaagactgatactaaggaaaaagttgttggacgccttatttccttggttcgaactgagagtttcgtagttcgaaatgctgcacgggatgctttactgcgtattaatgttcattcttccactttagtaaaatttattgaattaatttcaacacttggtgatgcaagaggacattcaaaaaggataaagagaaatgaagatcgggaccttaatgtgttctgcaattttgcggagatatttggagaaaattctgtagcttctattcttgtttctcttctagatatcttgtttcttaagaaagatgtgaagcaaaggtcgcgtttattacaacctcttttccagattctatcgaagctcctttctgatcaatgggtctcagttattgttagtcagtataacgaccaacaagatacctcatctgaaatccctgatttatctagttttgtaaaagaagttcaacacttggtactgctggccctcaaagatattacagatacactacaatcgggtcaccatgatgcaatggtcagcagttccgatgtaggtcttcttattgattgtgtacggtccatccaggacataggaactcggaatcatggcttttccttgatagcttctttgggaaaggcttgcccgcaactggtctcagagagtattgttgatttgtttgtcgctattggggatgctattaaacaggacgatagccactcgcaacgtgttttggaggatttattatctgtcttagtcccatgttggttatcaaggaccacaagcatagaaaagcttcttcagattcattaaagctttagcagatgtgcctgaacataggcgattgacgcttatggtttacctcttaaggaccatgggaaaagaaaataatttgagtactgtgatcatgcatctgttacactcggtggttgagcggatttcacactcgttttctgtacatcatggggacgattatagattggctatgtcacaggagtgggagtatggattggcagtaaatgtgcttgaccagttttcgtataaattgtggtttccttgtttgagtaagcttctaaaaaacatcagggtgcatgagaagcaagatctgcatcttatgctacatttggcaatgaggcttattctatttaagttgcaagatacagaacttaattttgaacttgaatctgaggaagctgctaattctatccagggttctcttggggcacttatggaggaagttatcttgtgtggtgtgtatgccagagataaaaaaagagatatttgtactgacattactaaagaagtcagagattttgcaaatacaatactcaaaactattacaggctggatgcgtgcttcgacatacttgatgggaattactctgctgttggatcattcagataatcatgtgaaaagaaagacacttcggattttgtctgaaacggccagaggaaacagtttggttcagaagaatcaaaggaaagcacgaaaactgaagcatatatctggtactactattaaagtagacaagagctctggtccttatttcagcaaattgtgcttaaagattctggagttgattgacagagttggtgattcggacactaaagtgaaagtagctgctatttcttcgcttgaaacactagcaaaagaatatccctctgataatcctgtttatagcaactgccttgcaacaatcattgatcaaattggctctgatgaggcagctgtgtcttctgcattaattcatactgtgggctctctggtaaatgtgatcggatcaaaagcattaccacaactcccattaatcatgaaaaacataatgctaatgtcacatcaaatttcatgttgccctagcggaaattatgctcatggttccactagaactgccgctgaactttctaaccaagacataactgtgttgctatctgcactgacaacaattgaggtgattgtggaaaagctgggtgaatttgttaatccatatttgaaagaaatacttgatctggtagtactgcatcctgaatgcagcactcaaatgcatgccaaattagatgcaaaagcagcacgtgttcgagagctattgactgtaaaagttccagtccggcttatcctctcacctttactgaatctgtactctcttactgcaaattgtggagatgcaagtcttacgttggcattcagcatgcttgctagtctagttggtacaatggaccggctggctgtaggaacttaccattcaaaaatatatgaacattgtttagcagctcttgatctccgtcgtcaacaccctgactctttgaagaatataaatatggtggaacaaagtattattcatgccataatctctcttaccatgaaacttacggagggcacttttaggccactttttcttcgtactttggaatgggctgaggctgaagttgatgaatcctcatcaaagaaaagtttggaccgtgcaattgttttctacaaattggttaacaaacttgctgaaaaacacaggtccttgttcacaccttacttcaaatatctactcgagggatctatacaatatctctctgaagacgatgctttgggtggttcgaagcataagaagaagaagaccaaacttgtagatgttcaagttgaacagaaggataaattattggggttaaaattgtggaatttaagagctctagttttgaaatccttacaccaatgtttcctctatgataatgaccagaagatccttgattcctctaatttccaggttcttttgaaacctattgtctcccagttcgttgtggaaccaccaaaatctgttgaatcagttcttgacgctccatcaattgaagaagtagatgaaactataattctgtgcttgggccaaatggcagtaactgcacggacagatgttctttggaagcctcttaaccatgaggtgctgatgcagactaggagtgatgaagttcgccccaaaatgctgggcctgaaggttatcaggtacatggtccaacatctgaaggaggagtatgtcgttctcgtaccagagaccataccgttcctaggcgaattgctcgaggatgtggagcttcctgtcaagaccctgtcgcaggagatcttgaaagagatggaaaccctcagtggcgaaagcctccagcagtacctatgaggcatcatctcctcgcggtagtaccgtttggctgatgaactgtagaacatctactcatttcctgtggattaccagttcaacagatcggcatacttgtcggatgtctggaaactgaaattacatgctgtccaattcatggaaggcaagtgcaattaacttaaccttcaaggaggcaaatgcagtttaaggaaaacttacacgttgaaagcacccatattatgttttcggatgagttcctatgtagctacgttgaaagagtacttttctacacaattgattgaggtgttctcgatttgatctctttttgagcttttggtgtcgttgggattttgcgctaaatattggaaattagaccaaggggctgtttgttcgttgtgaaggaattataatttacttaatatagtaggttatttggtttggaatttaatattccatcacatgttaaagtttagatataatcctatcctaaatttatagggtgagaatatggaaattggctatatattactagtttatgattctactttgtaatttatgacatgctataataaaaatgtagcatat

SEQ ID NO: 29382 - DNA, 3786 bp, Zea Mays
tcttctccctctggcaaggctgaggtagtatctgtagtggtaacattcccctccccttgaaaattcgcttgaccccaagcgggtgccattggaaaacattggcgcaaggcttcgcggtcttcccaagttgccagatcacgagaatgggtgccatggaaaccaacagcctgttttagctgagatacgtggacaactgggtggatacgactggtagaaggcagctgaagacggtatgctactgccccgacccgagcttgtaccatgtaggggccgaagtatttgtaactcaatttctgatgagcacgcggcatgacggaagactgaacagagggttgcagtttgaggtacacccaatccccaacagaaaaaatacgttctgaccttttcttatcagcttgacgtttcatgcgatcttgggcacgaagcaggtgctgacggaccaggttctgcatagtatggcgctcatgcaaccaatcagataaatcagatggtgttgtggcatcaactgtcaagccaagtgagcgtggtcgacgaccataaagaacctcaaagggtgaacaattgagtgctgaatgatgactggtattataccaaaactctgcagtaggcaaccaagacttccacttctttgggcaagcattcacgaaacagcgcagatatgtctcaaggcattggttaacgcgttctgtctggccgtccgtttgagggtggtaggaagagctgagcttcagatcagtgccagtcagtcggaacagatgacgccaaaactggcttgtaaagattggatcacgatctgaaatgattgctgatggaagtccatgtaagcgatatacctcagtcatgaagcattgagccaccgtcagtgctgtataggggtgggacaaaggaataaagtggccatactttgtgaatttgtccacaacaacgagaatacaatcagcagtactagacctcggcaagccttcaataaagtctaatgagatagtatcccaagctacttctggaactggtaatggttgtaattttccagggtatgctgttcggtccggtttagcctgaagacagatttggcactgctgaatgaaagtatgaatgaattgtttcatatttttccaagcgaacagttgtttgatgcggctgtaagtaaccgggatacctgaatgtccacccaccgccgaacagtgaagagcagttacaatacgagtatgaagctgtgcatcatcaccaatccacacacgtcctttgtaacgcaagagtccattgtccaaaacaaaatgagggactgcattagggtccacagacagcttagtgagcatagactgtgttgcagaatcactggcatagctggattgcacatcctgcaaccattggggaaccacaactgatatagcctggatagaagattgagcacatctggatagtgcatcagccactcgattttcagaaccggatctgtaatggattttatattgtagccccaagagtttcgtaaagaccttatgctgccagggtgtatgaaggcgttgttcgttaagttgggagagacttttgtgatcagtgacaataatgaattcagcgtgttgaagataagctctccaatgttgaaccgctacaatgagtgccatgtactctttttcataagtggataaaccacgcgacttggggcccaatgacttgctgagaaatgctaaggggtgtcctttttgcattaacacagcgccaatgccagaatcactagcatcagtttccaccacaaaggaagttgaaaaatctggtaatgcgaggacaggagcagcagcaagggcttgtttcagtgtttgaaaagtcgtggtatgtgcatcggtccaaacaaataataccccttttttaagcaaagctgtcaaaggttggcaaatgaccccaaagtgtttgataaacttcctataataaccggcaagcccaagaaaactgcgcaattctttgaccgaattgggcacaggccactgcgttatagcgttgattttcagtggatctgtggctaccccctcagcactgaccacatgacccaaataagctaccttgcgttgagcaaacgagcacttagagagttttaccttccactgttcacggtccagaagttggaatacttggtgcaggtggttcaagtggtcttccatggtaggactgtaaaccaaaatgtcatcgaagaaaactaatgcacacttgcgtagaaggggagccaaggtattgttcattgcgcactgaaaggtgccaggtgctccagtcaatccgaagggcatcactcgaaattcaaagtgacccacatgagtttggaaagctgttttatattcatcaccctctttcatcaagatctgatggaatccagcgcgaagatccaaaatagtgaaccaagcagcaccaaaatgttcatctagcaattcatcaatgatgggcaccggatatttagccttgaccgtgagagcattaagatgtcggtaatcaatacaaaatcgccaagaagcatctttctttttaactaaaagcactggggaagaaaatgaactagtgctatgctgaattaggccagtattcaacatttctgaaatttgggcttcgacctcatctttcattgcaggggacaaccgataaggtctgatgtttaccggtcgagcaccatccaccaatggaatagagtgatcacagaatctgcttggtggtaaggatgtaggtggatcaaagacggaagcatattgctgcaacagttgtaggactggtgctggtagggataattcttccaatgagcacaactgaggcatattagactgatgttctaacaccgggtagacttggacaatagatccagaaggcagtgatggaggcacaccttgcagcacaataggtctgtccccgtactgaattgtcagtcatttatgtttccaatcaacaaacatggggctgaattgctctaaccagtccatgcccaagatcatatcatagaagggaagtggcaccagcttgaatgtagaggtaaatgtaagtccgtgcatggtccacgatgcatcaggaagttgagtgttacaatagagcagctcgccattggccaccttgactgttaatgcttgttccatagcaacaactcctgatagcttagtactataagaattatccagaaaacagtgagtacttccacagtccaatagaattagcatgtcaacaccttgtatactgccacgaagccgaaaagctttagaattggcaggaacaactgtggcctccttagatattgccatgaggaattgctcagctgaatcttgaaactccccatcagactcatccttgtcagcacaaaactgacagaggccgcgtgcgcggcgatatgcacgaagagaggcgactttactctctgctgaagacgatgaaggagtagaaactttagcttgatctgctccaatccccggagaatttttgtcaggaaaagtggtggctgatgggtgcttcatgaatgaccggaaagaatgagaaccctccaagcgtgggtgatcacgccgacgcgatgactccgcctcttcctgcaataaggccagagcacaagcagtatccagatcgcgaggacgttgtacaagaataacagctttaatgccatcacgaagtccatctatgaatctcatagtataatacagggggtctgtggtgtgctcatatgtaactagcaaatcaatcagttcacaaaacctatcaacataatcctgaactgaggaagtttggcgaatgtgaaacagtttacgaataactaattcatgctgctct

SEQ ID NO: 29383 - DNA, 3778 bp, Zea Mays
tcttctccctctggcaaggctgaggtagtatctgtagtggtaacattcccctccccttgaaaattcgcttgaccccaagcgggtgccattggaaaacattggcgcaaggcttcgcggtcttcccaagttgccagatcacgagaatgggtgccatggaaaccaacagcctgttttagctgagatacgtggacaactgggtggatacgactggtagaaggcagctgaagacggtatgctactgccccgacccgagcttgtaccatgtaggggccgaagtatttgtaactcaatttctgatgagcacgcggcatgacggaagactgaacagagggttgcagtttgaggtacacccaatccccaacagaaaaaatacgttctgaccttttcttatcagcttgacgtttcatgcgatcttgggcacgaagcaggtgctgacggaccaggttctgcatagtatggcgctcatgcaaccaatcagataaatcagatggtgttgtggcatcaactgtcaagccaagtgagcgtggtcgacgaccataaagaacctcaaagggtgaacaattgagtgctgaatgatgactggtattataccaaaactctgcagtaggcaaccaagacttccacttctttgggcaagcattcacgaaacagcgcagatatgtctcaaggcattggttaacgcgttctgtctggccgtccgtttgagggtggtaggaagagctgagcttcagatcagtgccagtcagtcggaacagatgacgccaaaactggcttgtaaagattggatcacgatctgaaatgattgctgatggaagtccatgtaagcgatatacctcagtcatgaagcattgagccaccgtcagtgctgtataggggtgggacaaaggaataaagtggccatactttgtgaatttgtccacaacaacgagaatacaatcagcagtactagacctcggcaagccttcaataaagtctaatgagatagtatcccaagctacttctggaactggtaatggttgtaattttccagggtatgctgttcggtccggtttagcctgaagacagatttggcactgctgaatgaaagtatgaatgaattgtttcatatttttccaagcgaacagttgtttgatgcggctgtaagtaaccgggatacctgaatgtccacccaccgccgaacagtgaagagcagttacaatacgagtatgaagctgtgcatcatcaccaatccacacacgtcctttgtaacgcaagagtccattgtccaaaacaaaatgagggactgcattagggtccacagacagcttagtgagcatagactgtgttgcagaatcactggcatagctggattgcacatcctgcaaccattggggaaccacaactgatatagcctggatagaagattgagcacatctggatagtgcatcagccactcgattttcagaaccggatctgtaatggattttatattgtagccccaagagtttcgtaaagaccttatgctgccagggtgtatgaaggcgttgttcgttaagttgggagagacttttgtgatcagtgacaataatgaattcagcgtgttgaagataagctctccaatgttgaaccgctacaatgagtgccatgtactctttttcataagtggataaaccacgcgacttggggcccaatgacttgctgagaaatgctaaggggtgtcctttttgcattaacacagcgccaatgccagaatcactagcatcagtttccaccacaaaggaagttgaaaaatctggtaatgcgaggacaggagcagcagcaagggcttgtttcagtgtttgaaaagtcgtggtatgtgcatcggtccaaacaaataataccccttttttaagcaaagctgtcaaaggttggcaaatgaccccaaagtgtttgataaacttcctataataaccggcaagcccaagaaaactgcgcaattctttgaccgaattgggcacaggccactgcgttatagcgttgattttcagtggatctgtggctaccccctcagcactgaccacatgacccaaataagctaccttgcgttgagcaaacgagcacttagagagttttaccttccactgttcacggtccagaagttggaatacttggtgcaggtggttcaagtggtcttccatggtaggactgtaaaccaaaatgtcatcgaagaaaactaatgcacacttgcgtagaaggggagccaaggtattgttcattgcgcactgaaaggtgccaggtgctccagtcaatccgaagggcatcactcgaaattcaaagtgacccacatgagtttggaaagctgttttatattcatcaccctctttcatcaagatctgatggaatccagcgcgaagatccaaaatagtgaaccaagcagcaccaaaatgttcatctagcaattcatcaatgatgggcaccggatatttagccttgaccgtgagagcattaagatgtcggtaatcaatacaaaatcgccaagaagcatctttctttttaactaaaagcactggggaagaaaatgaactagtgctatgctgaattaggccagtattcaacatttctgaaatttgggcttcgacctcatctttcattgcaggggacaaccgataaggtctgatgtttaccggtcgagcaccatccaccaatggaatagagtgatcacagaatctgcttggtggtaaggatgtaggtggatcaaagacggaagcatattgctgcaacagttgtaggactggtgctggtagggataattcttccaatgagcacaactgaggcatattagactgatgttctaacaccgggtagacttggacaatagatccagaaggcagtgatggaggcacaccttgcagcacaataggtctgtccccgtactgaattgtcagtcatttatgtttccaatcaacaaacatggggctgaattgctctaaccagtccatgcccaagatcatatcatagaagggaagtggcaccagcttgaatgtagaggtaaatgtaagtccgtgcatggtccacgatgcatcaggaagttgagtgttacaatagagcagctcgccattggccaccttgactgttaatgcttgttccatagcaacaactcctgatagcttagtactataagaattatccagaaaacagtgagtacttccacagtccaatagaattagcatgtcaacaccttgtatactgccacgaagccgaaaagctttagaattggcaggaacaactgtggcctccttagatattgccatgaggaattgctcagctgaatcttgaaactccccatcagactcatccttgtcagtgacagaggccgcgtgcgcggcgatatgcacgaagagaggcgactttactctctgctgaagacgatgaaggagtagaaactttagcttgatctgctccaatccccggagaatttttgtcaggaaaagtggtggctgatgggtgcttcatgaatgaccggaaagaatgagaaccctccaagcgtgggtgatcacgccgacgcgatgactccgcctcttcctgcaataaggccagagcacaagcagtatccagatcgcgaggacgttgtacaagaataacagctttaatgccatcacgaagtccatctatgaatctcatagtataatacagggggtctgtggtgtgctcatatgtaactagcaaatcaatcagttcacaaaacctatcaacataatcctgaactgaggaagtttggcgaatgtgaaacagtttacgaataactaattcatgctgctct

SEQ ID NO: 29384 - DNA, 2250 bp, Zea Mays
cttccgtgtaatgccttccaaagaatttgtttcctccaattttctgacgccgtaatcctgccaaccaaagagcactgcagtgccgatttctataggaacaaaattcctattctttccctacaaacttcctacattcagggtcctcctcgtgtgcccatcccatattcaagattacgtccgctgactcctcaggcctcccactgcgtgtggggccgagccagcttgctccatcaagccgagagcagtctcccactcttctttctcacctcgcatcgcactgcctcaatctctcgtctctattgcttctctgccggagctcctacaacctcgcctcgcgcagcactccgctcaccctccctgactccctccctgccgctgggatggccggcaaacgagttacgggccgcgatgggcaagacgagggcggcgccaaggccgggctcccggcgatggacatctccctcgcgttcccgcaggccacgcctgcctccattttcccgccgtccgcttcggattattaccagtctgatgatttgctgaccagtgaagagcgctctatcaggatgaaggtcaggggtattatggaaaaagaaattgctcccattatgtcagcgtactgggaaaaggcagagtttccatttaatgccattcctaaacttgcaagccttggtgttgctggtggtacaataaagggttatgggtgcccaggactttccattactgccagtgctgttactatgtcagaaattgcacgggtagatgcaagctgttccacatttatactggtgcactcctctcttgcgatggtgacaatagaacagctctttgtggatccgaggctcagaagcagaagtacttgccatcccttgctcaacttactactgttggctgttgggctttgacagagccaaactatggaagtgatgcgagctccttgagaactatagcgaccaaggcacctggtgggtggcacatagatggtcaaaaacgctggatcggtaacagtactttcgccgatgtgctcgtcgtgttagccaggaatgcagacacacaacagctaaatgggttcattgtgcggaaaggagctcctggcctgaaagctacaaagatcgagaacaaaattggcctcaggatggttcagaacggtgacatagttttgaacaaggtgttcgtccctgacgaagaccggttgccaggcatcaactcgtttcaggacatcagcaaggtgctcgccatttcacgcattatggtggcatggcaaccggttggcatatcaatgggggtcttcgacatgtgccaccggtatctgaaagaaaggaagcagttcggagtccctctggcggcgtttcagctgaaccaagagaagctcgcccggatgctcggtaacgtccagtcgatggtcctcgtcggctggcgtctctgcaagctctacgagtcggggaaaatgacgccgggccacgctagcctagggaaggcttggaactccaggacggcccgcgaggtggtctcccttggccgagagctgctgggtgggaacgggattttggccgacttccttgtagccaaggcgttctgcgacctggagcccatctactcgtacgagggcacgtacgacatcaacagcctggtgaccggcagggaggtcaccgggatcgcgagcttcaggcccgccgcgccagcgaaagcccggctgtgacgtgataacctgtgtccccgtgttgcagggaactggaggcgaataaatcatgatcaggtcgtcgtcgtcgtcgccatcgaacaaactgagcacgttcctggaacccgcccggtcaacgttggctgctcacatggtgtaccgtagccgagtgcggatgggaacggattcctagatatatgtagtactatacgaagatatctgttgcgggtggattactgtaaaccgggtctaatctctgttgcggtgtttgccgtctttggtcagaaggtaaggggggaacgccaggcagatctggtgggtttggttgttgttgttgtcgtgttgggtgggtagcatgcgagtgtggaggcctcgaccaatgaataaaacatggtgccgtttgggcggtagtacgtacacaggcaggcgggtcgagaagagtccgtcgtctggaagttatggtaagtaacatctcggcggctaatcaggctggagagtgctaccagctagtttgggctcgacaggcgagagcgagagtgacctctcacacccacaggtcacactgcatatctggc

SEQ ID NO: 29385 - DNA, 4312 bp, Zea Mays
cgttgatccaatcggcctgcttgttgtttattagtacctatgtgggattgcaaattgcatgattaggggacgtttccttttttgcaaattgcatgattaggggacgtttcctttttttcttctggtaagccatcatgagctaccataattcgtttccggatagggtacaattaataggcaaagtttgcttcttttacagcccaacctgtgctttccgtttagtggatgcactccctttttatttgggatttttgaatctgaactaggggcacagatttaaaaatacacccccttttttttgccccccccataagcaatactgtcgtacctatacgaatcgtcgtaattgttcatcgaaggttaccatttatatgtcttctgcatcttctacttacctcagttcgtaagagtaactccaatagttatgtaaattttagctctctaaatcacatatttaagaagttgctaaatggcttttggagtaaaaagatgtgagttctgcaatagttctctaaatataggttgtaattttgttttgtatttatccacctaaaaactaagtcacaaaaactatataatgcagtcaacatttttgtttagggagttgttaaatagttgctaaatgtagagagaaaatgaggttagatgacaagttgttaaatttagaaagttaatttagagaactgttggagaatagttttgtgtgtgtcgactgtcgaatcaaattttatttttattttttaaaaatggcaaaaaaactttatttatattggaatgcctgtccaggatggtcctactgtttcaatccaagctaccccttgggtacgtcgtatctgcttttgacatcttaggttccatcgacggagaatgtgctataaaactccagatagatgggtctgatgggtgttcgcatttgccttacttgattaactactcaaataggatgcggagatgctaagtaggaattcttctcggacctccaccaagcacctgttatctgtgtatgcggagaagttaggtaggaattcttctctgacctccaccaagcacctgttatctgtgtactccatgcatcattggtgttatcctctcgctgtatttggatttgctggttgtgttttcgctacttgaggcatctgatttttttaatgatgttcactggaagcattgtttgtttgtcatttattcggttggttctgtgatgtgttgattaacccttcccctttaggatttagatttatattattatatttgctgccttatcaccttggttctaatccaggtttctgtttaattatagtgtaaacatgaattcgacattgtcatttgtacgatgatgttagactgcagcgaatattggtaaaccgtagtgcttatttagtgtatctttaacattttttttggttatgtgactgatcatgcatagggaaggtgttttctaacctctcagctatgtaaatttggaaagcaagaactgatacacgagaaaaactacttcagcttgtcctcagctttgcatgcttgctctgattaatatttgcaagacgaaccttatccgaaagaaatccaagctagttatctgttgaacttggtgtagggtggatttaccaatgaccagatgaagggcagaagctcacccgccagtaattttaggaatgtcatagtttggtccctctgggcatgtaccgtttgaagcctttcttctctcatttgcatctgccttttctttttatagtttgcttgtttgtgctatgtaaagcaaaactaattttgtttgatttcttactaagaatgtatacaaagtttggaaggaataatgtgatatacattgtgtttgtaaatctatttgatagagtgcctgtttataaaaaaatgttaattttctagtttttggggcctttatgctatatttgaaattctacttgacattatcatggatcattttcgctgtaaggttccatgtagctgagtttagataatttcctttgtcagtttgtatcttgtactatcattgtgggtgataaggacactttcaagtgctaaggtctgtattctgttgtctatttaccagctgtttacctgtcaagggatgtgaatgattcagcgtaaaaccttatagtgcatttgcttgtcaattacggaagaatgatttggactgcatatatttcacaatgcacatgtctcataaagggtgtttcttccatgtttttggtgtgatctttcagttgtatgaattgattgaaattctgaattcttgtgttgtatatccatgtactggaaatcaaacattgaagattgaacatggaatgaacttgaacgattttggtacttgttttgtgatatcttacacacaatatatgtagtgccatattttggaatgaactagtttgtgataaacttcgtggcaacacatgctttcatttgagtctggttacgtgataccaaattattgatatccattttgtttttcatctccagattattaagtgcagttgggcctgacttgttttatggctcgaaataatgagggccatctcgagctgccagagatggatcaaattcaacccaagaacatcccacacaatgaatcactgcctctaggccagaagcttctcctgcatcatggaagtgatgcgccccttagaattggtcattcaagtcatggaaatatgggacttagaataaatgatcttccatcttcaagtcgcactgtgcagactctaggttatagagttgggaacccaggaacctcgcatgctccctttgttcattttcatgctggaagttctggtagccatttaccagaccctgctgtgaattatccacataggtctgaggaaggcttcgctccagtgggttcccatatggacaacagaagggctgcaatgaagcgaaaaggtcccagtgtacaccctgcagggatcagtgctactggttattatgttggaagttcttccagtactcagccatctaactctgtgcagccaaatgcagctccacttgctgagccctttctccgtcaaatacctttaagcattgaccaaagtggttgggatatccaacacttgattcaccaagaagggtttcagaggaatgtgagagcacgccacagtagtattccattagtacccagatcagcttcaacatacccattaaacataaacagtgttcatgtgccgtcattcggttcaaccgcaagtgcttcctcaagtgcaccagtggaaatgaaccaagtgcctgtttctttgccaacaagaactctaccatcaggtgcaccaggtatgactagcagggtcccaacagggagggcttactatcctgtggttggaagcagcagcagcagctcaagtgttggtgctgtcccaactatccacggatcatctggcgctgcaatgtttgctaacgagccatgccccaccagatggtcattcagagtcatccagctgctacttccgcagcaacatctacatccatgcggaccgcccaaccatcattacctgccagaaccgcagcggcttccagacatgcaaggcatgtgtcagcagggcttgccaacaacggaaggtacagaagggccaggagctcttactacaggcttcatccattgatggtagaggcagagcggttcatgatggaccacttggtcttctacgaatcgagagcagcagctgctgacccccacagggacatgagactggacattgacaacatgagctacgaggacctgttggctctgggagaagctatgggcaatgtcaacacaggcctggccgatgaaaaagtttccgagtgcgtgaaagaagtggtctgctgcagttctgaccacacgcagatggaccaagacgacggaagctgcgccatttgcctggaggactacagagacaaggaggcgctgggaatactcaagtgcaggcacgacttccacgccggctgcatcaagaagtggctgcagacgaagaactcgtgcccggtgtgcaaagcggccgcggcctagtagggagggacacgccagatgaggaggaggaggagcaagcgactgttgcgctcgatccgattcatttttaggctcaggtcaagatgtatgccgtctcattcttttttttcccatcctcctagccagggcagccgtgtaaatagatgctcttatgggattaactattttctcttgggttacattggcccagattcttttgttgtatttaacaataacaacccagttgtggaagactggaaggtattgatcgtcaagtggttatacattagtctcatgtcggggttttcggatccgccgacacttgaaattagttgcgag

SEQ ID NO: 29386 - DNA, 2929 bp, Zea Mays
cgttgatccaatcggcctgcttgttgtttattagtacctatgtgggattgcaaattgcatgattaggggacgtttccttttttgcaaattgcatgattaggggacgtttcctttttttcttctggtaagccatcatgagctaccataattcgtttccggatagggtacaattaataggcaaagtttgcttcttttacagcccaacctgtgctttccgtttagtggatgcactccctttttatttgggatttttgaatctgaactaggggcacagatttaaaaatacacccccttttttttgccccccccataagcaatactgtcgtacctatacgaatcgtcgtaattgttcatcgaaggttaccatttatatgtcttctgcatcttctacttacctcagttcgtaagagtaactccaatagttatgtaaattttagctctctaaatcacatatttaagaagttgctaaatggcttttggagtaaaaagatgtgagttctgcaatagttctctaaatataggttgtaattttgttttgtatttatccacctaaaaactaagtcacaaaaactatataatgcagtcaacatttttgtttagggagttgttaaatagttgctaaatgtagagagaaaatgaggttagatgacaagttgttaaatttagaaagttaatttagagaactgttggagaatagttttgtgtgtgtcgactgtcgaatcaaattttatttttattttttaaaaatggcaaaaaaactttatttatattggaatgcctgtccaggatggtcctactgtttcaatccaagctaccccttgggtacgtcgtatctgcttttgacatcttaggttccatcgacggagaatgtgctataaaactccagatagatgggtctgatgggtgttcgcatttgccttacttgattaactactcaaataggatgcggagatgctaagtaggaattcttctcggacctccaccaagcacctgttatctgtgtatgcggagaagttagattattaagtgcagttgggcctgacttgttttatggctcgaaataatgagggccatctcgagctgccagagatggatcaaattcaacccaagaacatcccacacaatgaatcactgcctctagaagcttctcctgcatcatggaagtgatgcgccccttagaattggtcattcaagtcatggaaatatgggacttagaataaatgatcttccatcttcaagtcgcactgtgcagactctaggttatagagttgggaacccaggaacctcgcatgctccctttgttcattttcatgctggaagttctggtagccatttaccagaccctgctgtgaattatccacataggtctgaggaaggcttcgctccagtgggttcccatatggacaacagaagggctgcaatgaagcgaaaaggtcccagtgtacaccctgcagggatcagtgctactggttattatgttggaagttcttccagtactcagccatctaactctgtgcagccaaatgcagctccacttgctgagccctttctccgtcaaatacctttaagcattgaccaaagtggttgggatatccaacacttgattcaccaagaagggtttcagaggaatgtgagagcacgccacagtagtattccattagtacccagatcagcttcaacatacccattaaacataaacagtgttcatgtgccgtcattcggttcaaccgcaagtgcttcctcaagtgcaccagtggaaatgaaccaagtgcctgtttctttgccaacaagaactctaccatcaggtgcaccaggtatgactagcagggtcccaacagggagggcttactatcctgtggttggaagcagcagcagcagctcaagtgttggtgctgtcccaactatccacggatcatctggcgctgcaatgtttgctaacggtggctatgttcctagtagtgttcatgctggaactgttccgatcttccctaacccagcgcctgctacttcatctggctccagagccatgccccaccagatggtcattcagagtcatccagctgctacttccgcagcaacatctacatccatgcggaccgcccaaccatcattacctgccagaaccgcagcggcttccagacatgcaaggcatgtgtcagcagggcttgccaacaacggaaggtacagaagggccaggagctcttactacaggcttcatccattgatggtagaggcagagcggttcatgatggaccacttggtcttctacgaatcgagagcagcagctgctgacccccacagggacatgagactggacattgacaacatgagctacgaggacctgttggctctgggagaagctatgggcaatgtcaacacaggcctggccgatgaaaaagtttccgagtgcgtgaaagaagtggtctgctgcagttctgaccacacgcagatggaccaagacgacggaagctgcgccatttgcctggaggactacagagacaaggaggcgctgggaatactcaagtgcaggcacgacttccacgccggctgcatcaagaagtggctgcagacgaagaactcgtgcccggtgtgcaaagcggccgcggcctagtagggagggacacgccagatgaggaggaggaggagcaagcgactgttgcgctcgatccgattcatttttaggctcaggtcaagatgtatgccgtctcattcttttttttcccatcctcctagccagggcagccgtgtaaatagatgctcttatgggattaactattttctcttgggttacattggcccagattcttttgttgtatttaacaataacaacccagttgtggaagactggaaggtattgatcgtcaagtggttatacattagtctcatgtcggggttttcggatccgccgacacttgaaattagttgcgag

SEQ ID NO: 29387 - DNA, 1522 bp, Zea Mays
ctgcatcagcaagcgtgcaaactctaagggaatgcttggtcccctatttgggtccgtccctgcaacctgcttccaagaaccacaacaaatgcaggagggagcagggagatgggggtggattcacagaccgagaaaaagggcggtaccatggcgagagcggatcctggataggcgcgagcgagaagttgtagtttgcgtcgaggtcggcggagcaaggagttacaaatggcgagagcttgacgacgaagtgtcagtcggaatccgcgtccctgctctgccacctacgccctgcggtgctactgttgttgccctggcggctagggttgagggcggaggcggcatggtggcgccgtcgagagaaggggagaagagggggtagggtttgcttttttcaatagaagtgattttgatttggacgagttgctgagttgggcctgttcgggccaaatttttttagccaccaacagtcacatgtcaatcaatagcaaccaaccgccggatgtccacctgtctctatagcgaccaaccttgagtagttaaatttctagacttttagcgaccgatggcccgtcgctacaaatgcatttagcgaccaactgtcggtacataacttttagcgaccaaccgtctgtccctaataagggtcgctaaagatcaaccgtcgtatagtggtagtagtctcgccgtcgttgtctgacaacataattgagaacatgtgctcatttattttgaaagaagtcatttcgtgtgaaataaaatatcacgatgataccaatatcttaactaggacatagtttagagtactaaccgaaattagtatattaaatcttagccgagatagttattagaggttaggtgaaaactttgatgtatagaatgtttgatacatataagtgaatctttatagttgtaaacacaaaatttgatatataatgtatgatagaatttaattttgtattgttttcaatattaatataatatgtatatatatatagttgtgtgtaaatatataaaaattcagttttggtggaaaatttgaaaagggcgagaaactaccactgccggctaattttagaaaacccaaaaagtatttgcagtggcgattattcacgagaacgacaagtagaaataattttccactagcggttactttaaaagaaccgtaagtgataaatgacattgaaaacgtgttataaaccgtctggtgaaaaaaaaaatgaacagatgcagtaaagaactagacagatatctactccggccatataattcacctgtcttgttgtcaccagcagcgtacaggtcgtcggtggtgttggtgtaggagtagccaacgccggccggcgagtccaagaacagcacattcgccactgcaagcaaaccaatccatccgtcgtcgacactagacaccatgagtccatgacaaacatatatataacaagctagctttactgggtgaaaaaaaaagaggcatcgaaactggccgccggaccattgttccaggcgtagggattcaaggagagcg

SEQ ID NO: 29388 - DNA, 460 bp, Zea Mays
aaggcaagcggatttcattctagttctagcgctttgtcttgctggcggtcgtgctcgtgcacctagctaatggaccctgtgccattagccggttgggtctttgtggtagaggacttccgctttggcaggaggcccagcccgactagggttctgtccaccttccagagccctagctccggcgtctctagcgatccccaaaacccactccgccgcatttctgccgacttggccggattggtcgcttattgagatggctacgccacttatagcgggacttgcaattgcagcaactgcccttgctggccgatatggcgtccaagcttggcaagcttataaggcaaggcctatagttccaaggatgcggaaattctatgaaggtggctttcaacctacaatgaaccgaagggaagctgcattaatccttggtgtcagatattcaatcagttgttcttcattccag

SEQ ID NO: 29389 - DNA, 899 bp, Zea Mays
aaggcaagcggatttcattctagttctagcgctttgtcttgctggcggtcgtgctcgtgcacctagctaatggaccctgtgccattagccggttgggtctttgtggtagaggacttccgctttggcaggaggcccagcccgactagggttctgtccaccttccagagccctagctccggcgtctctagcgatccccaaaacccactccgccgcatttctgccgacttggccggattggtcgcttattgagatgcaactgcccttgctggccgatatggcgtccaagcttggcaagcttataaggcaaggcctatagttccaaggatgcggaaattctatgaaggtggctttcaacctacaatgaaccgaagggaagctgcattaatccttggtgtcagggaaactgccaacgcagagaaggtaaaagaggcgcacaagagggttatggtcgccaaccatccagatgctggtggaagtcattaccttgcgtcaaagattaatgaggcgaaggatgtgttgtcagggaaaacaaaaggaggtgggtcggccttctgattgtagaattaagaatgcactctctgctagaaggataattttgtgcctctaaatttagcattagaagatactgtagaccgcagtttagtcttggtattgcgaaaatttctgggcaaagcatattgggccttctgtgaagtagttatccagtgcttattatttattaatactctcagctgtgcctgcttctataaagatatacatgatgaaggttacatcacaacatgtttcttcacaactaagtctcatgtcgtgggatcttcattgctcttcgttagattctgctgctgttgaatctttttttcttcagcagtttttagagtaaatgttggcatatccatgtg

SEQ ID NO: 29390 - DNA, 701 bp, Zea Mays
gttcgttcatggttgcataaggctacgccacttatagcgggacttgcaattgcagcaactgcccttgctggccgatatggcgtccaagcttggcaagcttataaggcaaggcctatagttccaaggatgcggaaattctatgaaggtggctttcaacctacaatgaaccgaagggaagctgcattaatccttggtgtcagggaaactgccaacgcagagaaggtaaaagaggcgcacaagagggttatggtcgccaaccatccagatgctggtggaagtcattaccttgcgtcaaagattaatgaggcgaaggatgtgttgtcagggaaaacaaaaggaggtgggtcggccttctgattgtagaattaagaatgcactctctgctagaaggataattttgtgcctctaaatttagcattagaagatactgtagaccgcagtttagtcttggtattgcgaaaatttctgggcaaagcatattgggccttctgtgaagtagttatccagtgcttattatttattaatactctcagctgtgcctgcttctataaagatatacatgatgaaggttacatcacaacatgtttcttcacaactaagtctcatgtcgtgggatcttcattgctcttcgttagattctgctgctgttgaatctttttttcttcagcagtttttagagtaaatgttggcatatccatgtg

SEQ ID NO: 29391 - DNA, 688 bp, Zea Mays
catgaatagctacgccacttatagcgggacttgcaattgcagcaactgcccttgctggccgatatggcgtccaagcttggcaagcttataaggcaaggcctatagttccaaggatgcggaaattctatgaaggtggctttcaacctacaatgaaccgaagggaagctgcattaatccttggtgtcagggaaactgccaacgcagagaaggtaaaagaggcgcacaagagggttatggtcgccaaccatccagatgctggtggaagtcattaccttgcgtcaaagattaatgaggcgaaggatgtgttgtcagggaaaacaaaaggaggtgggtcggccttctgattgtagaattaagaatgcactctctgctagaaggataattttgtgcctctaaatttagcattagaagatactgtagaccgcagtttagtcttggtattgcgaaaatttctgggcaaagcatattgggccttctgtgaagtagttatccagtgcttattatttattaatactctcagctgtgcctgcttctataaagatatacatgatgaaggttacatcacaacatgtttcttcacaactaagtctcatgtcgtgggatcttcattgctcttcgttagattctgctgctgttgaatctttttttcttcagcagtttttagagtaaatgttggcatatccatgtg

SEQ ID NO: 29392 - DNA, 922 bp, Zea Mays
cgcccatttcgtgttatcttattctggccttagtctgcccgaggcaaggcttacccatgacgaggcatgtgaccagttaaagggtcctcggtcagcacgcctacatacgcgttaatccttaaccaacctgggtagaccatcacctgttcctaacccaagtctcaatttaagcatttccatccttaggattgtgtctgttccttaggatgaaagagcatcacggggaactttgcagtaagatcccactattgctccaaatgaaaatattcttgcaggtagaagtcctcctctccatggttaaattgaggacaacctctatccacaagatctaagcaaggctaagcatttttgtaaatcatattttgatacttcacagaagtatctataaaggtatggatatcaaggaaagcaatgcatcaaagggtttcaagtaactcctatgaacctaatgcacatttcactagacttaagtgtgcgaaaagtatttaaaacacaaggaaaggggttgcatgcaccggggcttgcctgggtaacactaggttagtgtttgttaggcgtcgatcacttgacgaccatcctttgtcctgatacttgtttcgtctgtccatctccagtttcgttcatcagcaccgtcttgtggtcggctcagttctgggttcttcgcatcgcgtggttaactcacgtacctgaatgaatgcattatgcacatgaatgcatatagatcggaatattccaaacctaaatagtgctacgcgctagcaaattaaacacctatagcaagacatcgcaaatctagtatgaaaatactggatgtcgatatcacattaaaactatagctatggcattctaacttaatcggactcaagtctaaccgcacacaacagtaaactatgtataagcattttcctctcctaaaacctac

SEQ ID NO: 29393 - DNA, 1738 bp, Zea Mays
cgcccatttcgtgttatcttattctggccttagtctgcccgaggcaaggcttacccatgacgaggcatgtgaccagttaaagggtcctcggtcagcacgcctacatacgcgttaatccttaaccaacctgggtagaccatcacctgttcctaacccaagtctcaatttaagcatttccatccttaggattgtgtctgttccttaggatgaaagagcatcacggggaactttgcagtaagatcccactattgctccaaatgaaaatattcttgcaggtagaagtcctcctctccatggttaaattgaggacaacctctatccacaagatctaagcaaggctaagcatttttgtaaatcatattttgatacttcacagaagtatctataaaggtatggatatcaaggaaagcaatgcatcaaagggtttcaagtaactcctatgaacctaatgcacatttcactagacttaagtgtgcgaaaagtatttaaaacacaaggaaaggggttgcatgcaccggggcttgcctgggtaacactaggttagtgtttgttaggcgtcgatcacttgacgaccatcctttgtcctgatacttgtttcgtctgtccatctccagtttcgttcatcagcaccgtcttgtggtcggctcagttctgggttcttcgcatcgcgtggttaactcacgtaccaagatcaaatcgatttgaaatcacaagaacgacggcggttgatggcacatattagcaaaagagccggagacgatgacgttgtaggcagcaaggcgaggctgagtccgccgcgaaggaacagcccgcagccagagcgctcgcgcgacgatcaggacaataccgatgaatcgacgacgagcaccataatcagcctgactcgaatccgcgagattggtaatgattttccaatacaaacaatttgtcgaacgcttggcaggtgccacacgaacatcatgctgctagctctgtcttcacggcttgggacttggcgtagacgagaacgacgatcgatgatatcaacgtgccagcgcgacgatttccatttgatgacggtgatggcagtacgacttgttcgagttgagacgagcgcgatccaggaaccacagcagtacgtcgataagtccatgacgacacaacgaggtgaacgcgacaacacacggctcaatgggtaaagagggcgcgacggctgaggagctccgtccaaacgagccttcggacagtgatgaaccagaccgcgagaaggtcatggtgcgggcgagtgagaacgacgttgtgccgaagttgcagagaacgacagcagtgatttggtggtgctggacacgaagaacaacggcacgaccgcggcttgagctggggcagggagggctagaggactgcggcgtgcagggctccacgacgttggaatttctggacgcgcgacgagctagagcagagggcaggggatggaagcagcggccaatttaaacggtgcttgagcggtgactgaggataggagcgtgcgggatttttccatgggtcttgagcggcgcacgctgggaattgcagaagcttggaggaggaagaagataggaacgcataggggataagaagcatgcgtgagatttttgttttcccttcaggctgagcggcaaccggacagataggaacgtgcgtgagagaaaaaaaatcagggtgcggcagtagatagagttgagaagattttttttttaatttctttctttattttttttcc

SEQ ID NO: 29394 - DNA, 2501 bp, Zea Mays
cgacagttgaggtgttgaactcggaaagcctgaagcgcgcagccctcggaagcgaccgccccgccgcgctaccaccgcacgccccacctactactcccctcgctgtccctcgccgtcgccgccctgatcccgcgatgtcctcgtggctgcggagcgcggtgagcaaggccgtcgaggccggcggccgcagcggcgtggcccgcacggtcctgggctacgccgacgccgtcgcacaccacgccggccaggccgtcgccgagggcgccaagattatcaacgagcgcagcactcagaacttcaaaagtgtgaagcaaacagtgaagcgattggaagaggttgcggtttcatcacgcagggatgagagagttcaagtgctaaggcgctggctcggagccctacaggaggttgaggctgaagttggaggttcgggtgggtctcagaggcagaatgtctcttcaagcgagccaaactcttcgaaaccatcattggccaaagttttgttttatgatgctgatattggagggcctcctatgaacttccgagatatattcctttatagccacgcacttgagggtattacgttgtccatgattcttgaagctcctaaagaagaagaggtttcccttcttctagaaattttcggaatatgtcttacagggggcaaagaagttaataatgctatagtgagcagtatacaggacctggcaaagtcattctcaaattaccatgatgaggtcctggtgaaacgtgaagagttacttcagttcacacaaagtgccatttcaggtctaaagaggaatgctgacattgtgaggatagattctgaagctctagatttgtggaagaaactacatgagaaggaggcatcacgagctcaatcaattggcgatcctgataaagttacagaaaagacttcaactattgagtctttcaaagaagcactcaacgaagtccgattttgctctagaatggaggaacttctattgaagaagaaaacaattaatactggggattccttagagatccactcccaaaaggttgagaaattaaaggtattggcgacttcccttgctaattcatcctccaaggcagagaagcgtattttggatcacagacgccagaaagaagaggctcttaactttcgtgctaaaaaggagaacgaagtgattgctgttgaaaaggatttgactgctgagatttctgaattggagaagcaaaaggatgaacttgaggctcagttaaagaaggtcaacatttcactgaatgctgctatttgtcgactaaagcagacaagagaagagagggaccagtttcatgaagcaaacaatcagatgatatttactttacaagcaaaggagaatgacctgtcaaaatctattgactcatgtaacatggaggccagtgtagtcaagacttgggtaaatttcctcgaggatacatggcaacttcagttgtcatacaatgaacagaaggaaactaaaacgaatgacgagctggagagatgcacaagcagttttctgaagttgaccaagcatcatctttcctatttcaaggaagttcttagcccgtcaattgagcggatacgcacatacgtggataatttggcagtcttaaactctagggaggagtcaatagaacatgaaggggatgatgagatttctgtgcagacaagtccacaaaagtcccttgaggaggaatatttggaaactgaaaagaagatcgtgattgccttcagcattgtagatcgcatgaagaagatgttttattctgagcaagcggctaattctaggcaagatgatgcagaggtcaggaccttattttctgagattgagaaactgaaggaagtgtttgagtcggtagaaaggccgacactagacattgaagtccgcaaggcaaaggatccaatgaaggacaagtctggatcgaatcgttcagccaaagacaaatctgaatcgagccattcacctgttcaggtgccctcttcacctaaagatgtgcccgtggagtctccgaaatctccagtgaaacctgagcagacgatggacccagattcagagtttgcaaagttagagctagaattcggaaaagttaacagagaccatgaggagataggcggttgggatttcgacgagcttgaagaggagctgcgagctgacctatctaaatcaaccaatccaaaataaccacgctcaacccgacatctctgaacgcgcattccacctaactttccttgtgctggcttcttctgaaaatttgtagactttgaattgttgaatgtacatagtattgttgtttcattgtgtccatggacgttctatagattatactcactacatgggaggtggagattgttacactgtagactgacatttcattagcttatttgtttggtcttgtcatgtgcattcatacatgaatgaatgaatgataaacattatgtagcattccacattttggacattggaacatatattaactataacgataaaatgctcttggtc

SEQ ID NO: 29395 - DNA, 2246 bp, Zea Mays
ctctccgtcccccgcgtcctgtccccagaagcactcagaacttcaaaagtgtgaagcaaacagtgaagcgattggaagaggttgcggtttcatcacgcagggatgagagagttcaagtgctaaggcgctggctcggagccctacaggaggttgaggctgaagttggaggttcgggtgggtctcagaggcagaatgtctcttcaagcgagccaaactcttcgaaaccatcattggccaaagttttgttttatgatgctgatattggagggcctcctatgaacttccgagatatattcctttatagccacgcacttgagggtattacgttgtccatgattcttgaagctcctaaagaagaagaggtttcccttcttctagaaattttcggaatatgtcttacagggggcaaagaagttaataatgctatagtgagcagtatacaggacctggcaaagtcattctcaaattaccatgatgaggtcctggtgaaacgtgaagagttacttcagttcacacaaagtgccatttcaggtctaaagaggaatgctgacattgtgaggatagattctgaagctctagatttgtggaagaaactacatgagaaggaggcatcacgagctcaatcaattggcgatcctgataaagttacagaaaagacttcaactattgagtctttcaaagaagcactcaacgaagtccgattttgctctagaatggaggaacttctattgaagaagaaaacaattaatactggggattccttagagatccactcccaaaaggttgagaaattaaaggtattggcgacttcccttgctaattcatcctccaaggcagagaagcgtattttggatcacagacgccagaaagaagaggctcttaactttcgtgctaaaaaggagaacgaagtgattgctgttgaaaaggatttgactgctgagatttctgaattggagaagcaaaaggatgaacttgaggctcagttaaagaaggtcaacatttcactgaatgctgctatttgtcgactaaagcagacaagagaagagagggaccagtttcatgaagcaaacaatcagatgatatttactttacaagcaaaggagaatgacctgtcaaaatctattgactcatgtaacatggaggccagtgtagtcaagacttgggtaaatttcctcgaggatacatggcaacttcagttgtcatacaatgaacagaaggaaactaaaacgaatgacgagctggagagatgcacaagcagttttctgaagttgaccaagcatcatctttcctatttcaaggaagttcttagcccgtcaattgagcggatacgcacatacgtggataatttggcagtcttaaactctagggaggagtcaatagaacatgaaggggatgatgagatttctgtgcagacaagtccacaaaagtcccttgaggaggaatatttggaaactgaaaagaagatcgtgattgccttcagcattgtagatcgcatgaagaagatgttttattctgagcaagcggctaattctaggcaagatgatgcagaggtcaggaccttattttctgagattgagaaactgaaggaagtgtttgagtcggtagaaaggccgacactagacattgaagtccgcaaggcaaaggatccaatgaaggacaagtctggatcgaatcgttcagccaaagacaaatctgaatcgagccattcacctgttcaggtgccctcttcacctaaagatgtgcccgtggagtctccgaaatctccagtgaaacctgagcagacgatggacccagattcagagtttgcaaagttagagctagaattcggaaaagttaacagagaccatgaggagataggcggttgggatttcgacgagcttgaagaggagctgcgagctgacctatctaaatcaaccaatccaaaataaccacgctcaacccgacatctctgaacgcgcattccacctaactttccttgtgctggcttcttctgaaaatttgtagactttgaattgttgaatgtacatagtattgttgtttcattgtgtccatggacgttctatagattatactcactacatgggaggtggagattgttacactgtagactgacatttcattagcttatttgtttggtcttgtcatgtgcattcatacatgaatgaatgaatgataaacattatgtagcattccacattttggacattggaacatatattaactataacgataaaatgctcttggtc

SEQ ID NO: 29396 - DNA, 2203 bp, Zea Mays
agcactcagaacttcaaaagtgtgaagcaaacagtgaagcgattggaagaggttgcggtttcatcacgcagggatgagagagttcaagtgctaaggcgctggctcggagccctacaggaggttgaggctgaagttggaggttcgggtgggtctcagaggcagaatgtctcttcaagcgagccaaactcttcgaaaccatcattggccaaagttttgttttatgatgctgatattggagggcctcctatgaacttccgagatatattcctttatagccacgcacttgagggtattacgttgtccatgattcttgaagctcctaaagaagaagaggtttcccttcttctagaaattttcggggggcaaagaagttaataatgctatagtgagcagtatacaggacctggcaaagtcattctcaaattaccatgatgaggtcctggtgaaacgtgaagagttacttcagttcacacaaagtgccatttcaggtctaaagaggaatgctgacattgtgaggatagattctgaagctctagatttgtggaagaaactacatgagaaggaggcatcacgagctcaatcaattggcgatcctgataaagttacagaaaagacttcaactattgagtctttcaaagaagcactcaacgaagtccgattttgctctagaatggaggaacttctattgaagaagaaaacaattaatactggggattccttagagatccactcccaaaaggttgagaaattaaaggtattggcgacttcccttgctaattcatcctccaaggcagagaagcgtattttggatcacagacgccagaaagaagaggctcttaactttcgtgctaaaaaggagaacgaagtgattgctgttgaaaaggatttgactgctgagatttctgaattggagaagcaaaaggatgaacttgaggctcagttaaagaaggtcaacatttcactgaatgctgctatttgtcgactaaagcagacaagagaagagagggaccagtttcatgaagcaaacaatcagatgatatttactttacaagcaaaggagaatgacctgtcaaaatctattgactcatgtaacatggaggccagtgtagtcaagacttgggtaaatttcctcgaggatacatggcaacttcagttgtcatacaatgaacagaaggaaactaaaacgaatgacgagctggagagatgcacaagcagttttctgaagttgaccaagcatcatctttcctatttcaaggaagttcttagcccgtcaattgagcggatacgcacatacgtggataatttggcagtcttaaactctagggaggagtcaatagaacatgaaggggatgatgagatttctgtgcagacaagtccacaaaagtcccttgaggaggaatatttggaaactgaaaagaagatcgtgattgccttcagcattgtagatcgcatgaagaagatgttttattctgagcaagcggctaattctaggcaagatgatgcagaggtcaggaccttattttctgagattgagaaactgaaggaagtgtttgagtcggtagaaaggccgacactagacattgaagtccgcaaggcaaaggatccaatgaaggacaagtctggatcgaatcgttcagccaaagacaaatctgaatcgagccattcacctgttcaggtgccctcttcacctaaagatgtgcccgtggagtctccgaaatctccagtgaaacctgagcagacgatggacccagattcagagtttgcaaagttagagctagaattcggaaaagttaacagagaccatgaggagataggcggttgggatttcgacgagcttgaagaggagctgcgagctgacctatctaaatcaaccaatccaaaataaccacgctcaacccgacatctctgaacgcgcattccacctaactttccttgtgctggcttcttctgaaaatttgtagactttgaattgttgaatgtacatagtattgttgtttcattgtgtccatggacgttctatagattatactcactacatgggaggtggagattgttacactgtagactgacatttcattagcttatttgtttggtcttgtcatgtgcattcatacatgaatgaatgaatgataaacattatgtagcattccacattttggacattggaacatatattaactataacgataaaatgctcttggtc

SEQ ID NO: 29397 - DNA, 2210 bp, Zea Mays
ctcagaacttcaaaagtgtgaagcaaacagtgaagcgattggaagaggttgcggtttcatcacgcagggatgagagagttcaagtgctaaggcgctggctcggagccctacaggaggttgaggctgaagttggaggttcgggtgggtctcagaggcagaatgtctcttcaagcgagccaaactcttcgaaaccatcattggccaaagttttgttttatgatgctgatattggagggcctcctatgaacttccgagatatattcctttatagccacgcacttgagggtattacgttgtccatgattcttgaagctcctaaagaagaagaggtttcccttcttctagaaattttcggaatatgtcttacagggggcaaagaagttaataatgctatagtgagcagtatacaggacctggcaaagtcattctcaaattaccatgatgaggtcctggtgaaacgtgaagagttacttcagttcacacaaagtgccatttcaggtctaaagaggaatgctgacattgtgaggatagattctgaagctctagatttgtggaagaaactacatgagaaggaggcatcacgagctcaatcaattggcgatcctgataaagttacagaaaagacttcaactattgagtctttcaaagaagcactcaacgaagtccgattttgctctagaatggaggaacttctattgaagaagaaaacaattaatactggggattccttagagatccactcccaaaaggttgagaaattaaaggtattggcgacttcccttgctaattcatcctccaaggcagagaagcgtattttggatcacagacgccagaaagaagaggctcttaactttcgtgctaaaaaggagaacgaagtgattgctgttgaaaaggatttgactgctgagatttctgaattggagaagcaaaaggatgaacttgaggctcagttaaagaaggtcaacatttcactgaatgctgctatttgtcgactaaagcagacaagagaagagagggaccagtttcatgaagcaaacaatcagatgatatttactttacaagcaaagaatgacctgtcaaaatctattgactcatgtaacatggaggccagtgtagtcaagacttgggtaaatttcctcgaggatacatggcaacttcagttgtcatacaatgaacagaaggaaactaaaacgaatgacgagctggagagatgcacaagcagttttctgaagttgaccaagcatcatctttcctatttcaaggaagttcttagcccgtcaattgagcggatacgcacatacgtggataatttggcagtcttaaactctagggaggagtcaatagaacatgaaggggatgatgagatttctgtgcagacaagtccacaaaagtcccttgaggaggaatatttggaaactgaaaagaagatcgtgattgccttcagcattgtagatcgcatgaagaagatgttttattctgagcaagcggctaattctaggcaagatgatgcagaggtcaggaccttattttctgagattgagaaactgaaggaagtgtttgagtcggtagaaaggccgacactagacattgaagtccgcaaggcaaaggatccaatgaaggacaagtctggatcgaatcgttcagccaaagacaaatctgaatcgagccattcacctgttcaggtgccctcttcacctaaagatgtgcccgtggagtctccgaaatctccagtgaaacctgagcagacgatggacccagattcagagtttgcaaagttagagctagaattcggaaaagttaacagagaccatgaggagataggcggttgggatttcgacgagcttgaagaggagctgcgagctgacctatctaaatcaaccaatccaaaataaccacgctcaacccgacatctctgaacgcgcattccacctaactttccttgtgctggcttcttctgaaaatttgtagactttgaattgttgaatgtacatagtattgttgtttcattgtgtccatggacgttctatagattatactcactacatgggaggtggagattgttacactgtagactgacatttcattagcttatttgtttggtcttgtcatgtgcattcatacatgaatgaatgaatgataaacattatgtagcattccacattttggacattggaacatatattaactataacgataaaatgctcttggtc

SEQ ID NO: 29398 - DNA, 2289 bp, Zea Mays
ctcagaacttcaaaagtgtgaagcaaacagtgaagcgattggaagaggttgcggtttcatcacgcagggatgagagagttcaagtgctaaggcgctggctcggagccctacaggaggttgaggctgaagttggaggttcgggtgggtctcagaggcagaatgtctcttcaagcgagccaaactcttcgaaaccatcattggccaaagttttgttttatgatgctgatattggagggcctcctatgaacttccgagatatattcctttatagccacgcacttgagggtattacgttgtccatgattcttgaagctcctaaagaagaagaggtttcccttcttctagaaattttcggaatatgtcttacagggggcaaagaagttaataatgctatagtgagcagtatacaggacctggcaaagtcattctcaaattaccatgatgaggtcctggtgaaacgtgaagagttacttcagttcacacaaagtgccatttcaggtctaaagaggaatgctgacattgtgaggtgaccactattctactgatttgctcatgaagtctaatttttcatgcgtgtgtgagcaaggatggaccagcctgatacaatattctgaagctctagatttgtggaagaaactacatgagaaggaggcatcacgagctcaatcaattggcgatcctgataaagttacagaaaagacttcaactattgagtctttcaaagaagcactcaacgaagtccgattttgctctagaatggaggaacttctattgaagaagaaaacaattaatactggggattccttagagatccactcccaaaaggttgagaaattaaaggtattggcgacttcccttgctaattcatcctccaaggcagagaagcgtattttggatcacagacgccagaaagaagaggctcttaactttcgtgctaaaaaggagaacgaagtgattgctgttgaaaaggatttgactgctgagatttctgaattggagaagcaaaaggatgaacttgaggctcagttaaagaaggtcaacatttcactgaatgctgctatttgtcgactaaagcagacaagagaagagagggaccagtttcatgaagcaaacaatcagatgatatttactttacaagcaaaggagaatgacctgtcaaaatctattgactcatgtaacatggaggccagtgtagtcaagacttgggtaaatttcctcgaggatacatggcaacttcagttgtcatacaatgaacagaaggaaactaaaacgaatgacgagctggagagatgcacaagcagttttctgaagttgaccaagcatcatctttcctatttcaaggaagttcttagcccgtcaattgagcggatacgcacatacgtggataatttggcagtcttaaactctagggaggagtcaatagaacatgaaggggatgatgagatttctgtgcagacaagtccacaaaagtcccttgaggaggaatatttggaaactgaaaagaagatcgtgattgccttcagcattgtagatcgcatgaagaagatgttttattctgagcaagcggctaattctaggcaagatgatgcagaggtcaggaccttattttctgagattgagaaactgaaggaagtgtttgagtcggtagaaaggccgacactagacattgaagtccgcaaggcaaaggatccaatgaaggacaagtctggatcgaatcgttcagccaaagacaaatctgaatcgagccattcacctgttcaggtgccctcttcacctaaagatgtgcccgtggagtctccgaaatctccagtgaaacctgagcagacgatggacccagattcagagtttgcaaagttagagctagaattcggaaaagttaacagagaccatgaggagataggcggttgggatttcgacgagcttgaagaggagctgcgagctgacctatctaaatcaaccaatccaaaataaccacgctcaacccgacatctctgaacgcgcattccacctaactttccttgtgctggcttcttctgaaaatttgtagactttgaattgttgaatgtacatagtattgttgtttcattgtgtccatggacgttctatagattatactcactacatgggaggtggagattgttacactgtagactgacatttcattagcttatttgtttggtcttgtcatgtgcattcatacatgaatgaatgaatgataaacattatgtagcattccacattttggacattggaacatatattaactataacgataaaatgctcttggtc

SEQ ID NO: 29399 - DNA, 2208 bp, Zea Mays
ctcagaacttcaaaagtgtgaagcaaacagtgaagcgattggaagaggttgcggtttcatcacgcagggatgagagagttcaagtgctaaggcgctggctcggagccctacaggaggttgaggctgaagttggaggttcgggtgggtctcagaggcagaatgtctcttcaagcgagccaaactcttcgaaaccatcattggccaaagttttgttttatgatgctgatattggagggcctcctatgaacttccgagatatattcctttatagccacgcacttgagggtattacgttgtccatgattcttgaagctcctaaagaagaagaggtttcccttcttctagaaattttcggaatatgtcttacagggggcaaagaagttaataatgctatagtgagcagtatacaggacctggcaaagtcattctcaaattaccatgatgaggtcctggtgaaacgtgaagagttacttcagttcacacaaagtgccatttcaggtctaaagaggaatgctgacattgtgagattctgaagctctagatttgtggaagaaactacatgagaaggaggcatcacgagctcaatcaattggcgatcctgataaagttacagaaaagacttcaactattgagtctttcaaagaagcactcaacgaagtccgattttgctctagaatggaggaacttctattgaagaagaaaacaattaatactggggattccttagagatccactcccaaaaggttgagaaattaaaggtattggcgacttcccttgctaattcatcctccaaggcagagaagcgtattttggatcacagacgccagaaagaagaggctcttaactttcgtgctaaaaaggagaacgaagtgattgctgttgaaaaggatttgactgctgagatttctgaattggagaagcaaaaggatgaacttgaggctcagttaaagaaggtcaacatttcactgaatgctgctatttgtcgactaaagcagacaagagaagagagggaccagtttcatgaagcaaacaatcagatgatatttactttacaagcaaaggagaatgacctgtcaaaatctattgactcatgtaacatggaggccagtgtagtcaagacttgggtaaatttcctcgaggatacatggcaacttcagttgtcatacaatgaacagaaggaaactaaaacgaatgacgagctggagagatgcacaagcagttttctgaagttgaccaagcatcatctttcctatttcaaggaagttcttagcccgtcaattgagcggatacgcacatacgtggataatttggcagtcttaaactctagggaggagtcaatagaacatgaaggggatgatgagatttctgtgcagacaagtccacaaaagtcccttgaggaggaatatttggaaactgaaaagaagatcgtgattgccttcagcattgtagatcgcatgaagaagatgttttattctgagcaagcggctaattctaggcaagatgatgcagaggtcaggaccttattttctgagattgagaaactgaaggaagtgtttgagtcggtagaaaggccgacactagacattgaagtccgcaaggcaaaggatccaatgaaggacaagtctggatcgaatcgttcagccaaagacaaatctgaatcgagccattcacctgttcaggtgccctcttcacctaaagatgtgcccgtggagtctccgaaatctccagtgaaacctgagcagacgatggacccagattcagagtttgcaaagttagagctagaattcggaaaagttaacagagaccatgaggagataggcggttgggatttcgacgagcttgaagaggagctgcgagctgacctatctaaatcaaccaatccaaaataaccacgctcaacccgacatctctgaacgcgcattccacctaactttccttgtgctggcttcttctgaaaatttgtagactttgaattgttgaatgtacatagtattgttgtttcattgtgtccatggacgttctatagattatactcactacatgggaggtggagattgttacactgtagactgacatttcattagcttatttgtttggtcttgtcatgtgcattcatacatgaatgaatgaatgataaacattatgtagcattccacattttggacattggaacatatattaactataacgataaaatgctcttggtc

SEQ ID NO: 29400 - DNA, 2166 bp, Zea Mays
gatatttcatattcttagtgaatgtgcaattaagattttactttggcctcctatgaaggctcatatggttatacatgttaccttcctaagaaaacaaattttcagcccatcattttctaatcattagtttggctgtggctgtttgacatgattctacttgaacttgagtctcagtatttgttttcttcatgagcatcctctccattttaaatgacagttatttgctacagaatatgtcttacagggggcaaagaagttaataatgctatagtgagcagtatacaggacctggcaaagtcattctcaaattaccatgatgaggtcctggtgaaacgtgaagagttacttcagttcacacaaagtgccatttcaggtctaaagaggaatgctgacattgtgaggtgaccactattctactgatttgctcatgaagtctaatttttcatgcgtgtgtgagcaaggatggaccagcctgatacaatgatagattctgaagctctagatttgtggaagaaactacatgagaaggaggcatcacgagctcaatcaattggcgatcctgataaagttacagaaaagacttcaactattgagtctttcaaagaagcactcaacgaagtccgattttgctctagaatggaggaacttctattgaagaagaaaacaattaatactggggattccttagagatccactcccaaaaggttgagaaattaaaggtattggcgacttcccttgctaattcatcctccaaggcagagaagcgtattttggatcacagacgccagaaagaagaggctcttaactttcgtgctaaaaaggagaacgaagtgattgctgttgaaaaggatttgactgctgagatttctgaattggagaagcaaaaggatgaacttgaggctcagttaaagaaggtcaacatttcactgaatgctgctatttgtcgactaaagcagacaagagaagagagggaccagtttcatgaagcaaacaatcagatgatatttactttacaagcaaagaatgacctgtcaaaatctattgactcatgtaacatggaggccagtgtagtcaagacttgggtaaatttcctcgaggatacatggcaacttcagttgtcatacaatgaacagaaggaaactaaaacgaatgacgagctggagagatgcacaagcagttttctgaagttgaccaagcatcatctttcctatttcaaggaagttcttagcccgtcaattgagcggatacgcacatacgtggataatttggcagtcttaaactctagggaggagtcaatagaacatgaaggggatgatgagatttctgtgcagacaagtccacaaaagtcccttgaggaggaatatttggaaactgaaaagaagatcgtgattgccttcagcattgtagatcgcatgaagaagatgttttattctgagcaagcggctaattctaggcaagatgatgcagaggtcaggaccttattttctgagattgagaaactgaaggaagtgtttgagtcggtagaaaggccgacactagacattgaagtccgcaaggcaaaggatccaatgaaggacaagtctggatcgaatcgttcagccaaagacaaatctgaatcgagccattcacctgttcaggtgccctcttcacctaaagatgtgcccgtggagtctccgaaatctccagtgaaacctgagcagacgatggacccagattcagagtttgcaaagttagagctagaattcggaaaagttaacagagaccatgaggagataggcggttgggatttcgacgagcttgaagaggagctgcgagctgacctatctaaatcaaccaatccaaaataaccacgctcaacccgacatctctgaacgcgcattccacctaactttccttgtgctggcttcttctgaaaatttgtagactttgaattgttgaatgtacatagtattgttgtttcattgtgtccatggacgttctatagattatactcactacatgggaggtggagattgttacactgtagactgacatttcattagcttatttgtttggtcttgtcatgtgcattcatacatgaatgaatgaatgataaacattatgtagcattccacattttggacattggaacatatattaactataacgataaaatgctcttggtc

SEQ ID NO: 29401 - DNA, 1490 bp, Zea Mays
tttgataggcatattgtcagtatccgagggttgagaaattaaaggtattggcgacttcccttgctaattcatcctccaaggcagagaagcgtattttggatcacagacgccagaaagaagaggctcttaactttcgtgctaaaaaggagaacgaagtgattgctgttgaaaaggatttgactgctgagatttctgaattggagaagcaaaaggatgaacttgaggctcagttaaagaaggtcaacatttcactgaatgctgctatttgtcgactaaagcagacaagagaagagagggaccagtttcatgaagcaaacaatcagatgatatttactttacaagcaaagaatgacctgtcaaaatctattgactcatgtaacatggaggccagtgtagtcaagacttgggtaaatttcctcgaggatacatggcaacttcagttgtcatacaatgaacagaaggaaactaaaacgaatgacgagctggagagatgcacaagcagttttctgaagttgaccaagcatcatctttcctatttcaaggaagttcttagcccgtcaattgagcggatacgcacatacgtggataatttggcagtcttaaactctagggaggagtcaatagaacatgaaggggatgatgagatttctgtgcagacaagtccacaaaagtcccttgaggaggaatatttggaaactgaaaagaagatcgtgattgccttcagcattgtagatcgcatgaagaagatgttttattctgagcaagcggctaattctaggcaagatgatgcagaggtcaggaccttattttctgagattgagaaactgaaggaagtgtttgagtcggtagaaaggccgacactagacattgaagtccgcaaggcaaaggatccaatgaaggacaagtctggatcgaatcgttcagccaaagacaaatctgaatcgagccattcacctgttcaggtgccctcttcacctaaagatgtgcccgtggagtctccgaaatctccagtgaaacctgagcagacgatggacccagattcagagtttgcaaagttagagctagaattcggaaaagttaacagagaccatgaggagataggcggttgggatttcgacgagcttgaagaggagctgcgagctgacctatctaaatcaaccaatccaaaataaccacgctcaacccgacatctctgaacgcgcattccacctaactttccttgtgctggcttcttctgaaaatttgtagactttgaattgttgaatgtacatagtattgttgtttcattgtgtccatggacgttctatagattatactcactacatgggaggtggagattgttacactgtagactgacatttcattagcttatttgtttggtcttgtcatgtgcattcatacatgaatgaatgaatgataaacattatgtagcattccacattttggacattggaacatatattaactataacgataaaatgctcttggtc

SEQ ID NO: 29402 - DNA, 1396 bp, Zea Mays
tcgaggcaatactgaaaatatgcttgtcatcaacctccggctgtagctcgatgccagatatcaaatcccaaagctgaaggatttgactgctgagatttctgaattggagaagcaaaaggatgaacttgaggctcagttaaagaaggtcaacatttcactgaatgctgctatttgtcgactaaagcagacaagagaagagagggaccagtttcatgaagcaaacaatcagatgatatttactttacaagcaaagaatgacctgtcaaaatctattgactcatgtaacatggaggccagtgtagtcaagacttgggtaaatttcctcgaggatacatggcaacttcagttgtcatacaatgaacagaaggaaactaaaacgaatgacgagctggagagatgcacaagcagttttctgaagttgaccaagcatcatctttcctatttcaaggaagttcttagcccgtcaattgagcggatacgcacatacgtggataatttggcagtcttaaactctagggaggagtcaatagaacatgaaggggatgatgagatttctgtgcagacaagtccacaaaagtcccttgaggaggaatatttggaaactgaaaagaagatcgtgattgccttcagcattgtagatcgcatgaagaagatgttttattctgagcaagcggctaattctaggcaagatgatgcagaggtcaggaccttattttctgagattgagaaactgaaggaagtgtttgagtcggtagaaaggccgacactagacattgaagtccgcaaggcaaaggatccaatgaaggacaagtctggatcgaatcgttcagccaaagacaaatctgaatcgagccattcacctgttcaggtgccctcttcacctaaagatgtgcccgtggagtctccgaaatctccagtgaaacctgagcagacgatggacccagattcagagtttgcaaagttagagctagaattcggaaaagttaacagagaccatgaggagataggcggttgggatttcgacgagcttgaagaggagctgcgagctgacctatctaaatcaaccaatccaaaataaccacgctcaacccgacatctctgaacgcgcattccacctaactttccttgtgctggcttcttctgaaaatttgtagactttgaattgttgaatgtacatagtattgttgtttcattgtgtccatggacgttctatagattatactcactacatgggaggtggagattgttacactgtagactgacatttcattagcttatttgtttggtcttgtcatgtgcattcatacatgaatgaatgaatgataaacattatgtagcattccacattttggacattggaacatatattaactataacgataaaatgctcttggtc

SEQ ID NO: 29403 - DNA, 1361 bp, Zea Mays
ggctgtagctcgatgccagatatcaaatcccaaagctgaaggatttgactgctgagatttctgaattggagaagcaaaaggatgaacttgaggctcagttaaagaaggtcaacatttcactgaatgctgctatttgtcgactaaagcagacaagagaagagagggaccagtttcatgaagcaaacaatcagatgatatttactttacaagcaaaggagaatgacctgtcaaaatctattgactcatgtaacatggaggccagtgtagtcaagacttgggtaaatttcctcgaggatacatggcaacttcagttgtcatacaatgaacagaaggaaactaaaacgaatgacgagctggagagatgcacaagcagttttctgaagttgaccaagcatcatctttcctatttcaaggaagttcttagcccgtcaattgagcggatacgcacatacgtggataatttggcagtcttaaactctagggaggagtcaatagaacatgaaggggatgatgagatttctgtgcagacaagtccacaaaagtcccttgaggaggaatatttggaaactgaaaagaagatcgtgattgccttcagcattgtagatcgcatgaagaagatgttttattctgagcaagcggctaattctaggcaagatgatgcagaggtcaggaccttattttctgagattgagaaactgaaggaagtgtttgagtcggtagaaaggccgacactagacattgaagtccgcaaggcaaaggatccaatgaaggacaagtctggatcgaatcgttcagccaaagacaaatctgaatcgagccattcacctgttcaggtgccctcttcacctaaagatgtgcccgtggagtctccgaaatctccagtgaaacctgagcagacgatggacccagattcagagtttgcaaagttagagctagaattcggaaaagttaacagagaccatgaggagataggcggttgggatttcgacgagcttgaagaggagctgcgagctgacctatctaaatcaaccaatccaaaataaccacgctcaacccgacatctctgaacgcgcattccacctaactttccttgtgctggcttcttctgaaaatttgtagactttgaattgttgaatgtacatagtattgttgtttcattgtgtccatggacgttctatagattatactcactacatgggaggtggagattgttacactgtagactgacatttcattagcttatttgtttggtcttgtcatgtgcattcatacatgaatgaatgaatgataaacattatgtagcattccacattttggacattggaacatatattaactataacgataaaatgctcttggtc

SEQ ID NO: 29404 - DNA, 1662 bp, Zea Mays
cttggctgcgttacgagagtctggctggcttgatacacgcatccaaacgcacccctgtgatttgtggaactacaatccactattacacgacccatgttggcccaatgtattttgtatttggtttcctttctcgcttcatctcatagctggcgcatgcagactcctccttctacactgcttgtccttcttcgttgcagccacgctcacagctctccgtccagtaccacctcgcgcccgagcaccgcctcccccaccatcgaggaggccgccccaagcgtcgtcgccgccgccgagtcgtggctcaccgaattggccaagccactttatccaattagatgtagcaaatttttgtgttaaaaggttgtcgacgatctgagaaattaaaatcttcagttcttgaaagatttggtgtctgttttttttctttgatgcgttgctgtccctgtttgaacctgtagttggaaataatgacaggcggtttttaaaagataataaaaaatcaagcaagcagaaaaggaagtaatcgaaatgtttagtataactggttttcatatttaatttctatattcaagaagcatatagatgagtgcattgtcttatggtagtagatgaagtccttttaaaatgagttttgtagtagatggaagagtgtgagcaccatgtaatagctaggaataaacttgttaaaatttgttgtgtcgatgttcagagtattatagaggaaaacaggaaaaataaaggcatctccacataaaacagcagtttcatcacaaagtatttttattttttcagtttgaatgcattgccgatacctttctcgtatttgtgtgtatatgtgtacctaaatttatgtgtctgtgtgaggatttgtgtatacagagacatgtacacagcaggatacgtagatgcataattgttgtgtaataaaatataagcggcggattgcatatatttttcaatgaatagcatatttaggaagcctgaagctttgtatatattcactatccgagtagtaatacctggtcctttaggggatgtaacgtttcaaaagcaagctacgattgttccaagtgcttcagcgacctgtttcatttgggccaaatcaaattataaattgttatatgtacgttaaataatttttagaagaaaggataaccaatttatatgttggtatatgtagtacgtaaacatattaggcaaaagtattttgtttatgatttgctgggtgtacgaacctgatcttgatagaaaaagcaggatgtaaaaatatatcctcgatggttcaaagcaacgaaacgacctggcgagagggcctgcaacatgtggaattaacagatcaaatcttgttgtgtacattaatggcaatgaaaaataggactatgatggtgcttactaaacaaatcaagtttagctaagaactaagagggagtcgccaaagtgaaatcaaatcttctctggtgaacataagattctagcatttgcttatcctatacagattaacgtaaggagaacggtgagagtggctacttctgcttttcatgtcagacgactaggctccttttcgatctctcatttttcacctacatgttctttttcccctcgagcgagcagcgacaataggccagcagctgggaccgaatcgaaccggaaggtgaagagctg

SEQ ID NO: 29405 - DNA, 1231 bp, Zea Mays
ggtgcggtggccatagcatatggggaaaatatggtataacaaggagcctcagctctgcaaatcgcgaactcaagcccaagctgccagtctgtggcatcctgatcggtaggcgattctcaatccaccgccaacatgtccggcagcacggcgccgccgcacgtcgtggaggacttcttaggcgtcatccagatcttcagcgatggctccatcgtccgcggcgacgagtcgaccatcaggccgtcagggccgtgctcggacgtccccggcgtccagtggaaggacgccgtgtacgaggcgactcgcggcctcaaggtccgcgtgtacaagccgccgccgacccccggcggcggcaaccagggcaagctcccggtgctggtgtacttccacggagggggctactgcggcggcgcctacgaccaccccttgttgcactcctgctgccagcgcttcgccgccgagctccccgccgtcgtgctctcagtccagtaccgcctcgccccggagcaccgcctccccgcggcggtagaagacggcgccgcgttcttctcctggctgcgctcgcaggcgcaggcgcagcctgctgcaccgggcgccgccgccgccgacccgtggctcgccgaatcggccgacttctcccggacgttcgtgtccggcgggtcggccggcgccaacctggcccaccacatcgtggtccggatcgcctctgggcagatcgcgctcggcgccgcggtgcgcgtcgccggctctggcgcatggcgctgccggtgggggccacccgggaccacccgctggcgaacccgttcggcccgggcagcccgagcctggaaccgctgccgctgccgccggcgctcgtcgtggcgcccgagcgcgacgtgctgcacggccacgtgcggcgctacgccgccaggctcagggagatggggaagcccgtggagctcgccgagttcgcgggggaagggcatgccttctttgtcggaccgtggagcgaagcgagggatgagctgatgcgaatcttgaagcgcttcgtgaaccagagcgctgctctcggctgaggtgaatgtgaatctgtcgctattgccgtagtccaggtcgcagttgacacgtcgcaataagaacctgtacctggaatggacagtgatgttcacatttatcggttttttctccctcatacataatcgatgaaactttcgtttaggaggttgtaaaaaatcaaatttcttgtaggacggag

SEQ ID NO: 29406 - DNA, 2772 bp, Zea Mays
atggaaattttggagcattggtttgtattttcttggatacatcaaaaacacaattgggcatggaagcttagaggaaagcgaatgagtggacacatccacaagagcttcaggttaactggtcaaaattgtaagttgggcatcgtagcaaacctgttagcatgtaatgcatggatcgatagattgggcaaggatggaagatatagggaggcagaaaagctcttcagagggatggcagacagaggtctagatccaaatgaggtgacctatgctatactgatacattccttgtgcaagaggggtatgatggaagatgcactttgcatgtttgataggatgagggagaagggaatcagaatgactgtttatccatacaactctttaattaatggttactgcaaacacaacaattttcatcaggcaagaggtcttttgaatgagatggttgcgaagggattgacaccaagtccagcatcatattcccctcttatagctggtttatgtaggaaaggggatctggccagtgcaatggagctccacagggagatgaccaggaatgctgtttcagggaatgtatatacatttacagctcttatcagtggtttctgcaaggatggaaatatggatgaagcaactaggttgtttcataaaatgatggagagttccctagtgccaaatgaagtgacttttaatgttatgatagaagggtattgccgtgtaggcaatattaggaaggcattccagttatatgatcagatgctagatagaggcctaacacctgacaattacacttacaggtcactgataagtgtagtttgtttgacgctaggtgccatgaaagctaaggaatttgttgctgatctagaaaacaactgtgctgtgctaaatagttttagccttacagcacttatgcatggattctgcaaagaaggaagcgcagagatcctctgtaaagaaatgttagctggacacttccttcctaatagctatacttataattgctttcttgattatctggcaaatgaaggagagctcgaaaaggctaaagttctacacgcagccatgcttgaaggctgtttagctaacacagtgacatttaacacattgatcaaagggttctgtatggctgggcagatccaaggggcaattgaccttatgcagaagaatactgagagtggtttctttcctgattgcatcagctattctacaataataaatgagctctgtaaggttggtgacaccaataaagcatttgagctttggaatgaaatgttatacaaaggactgaaacctgatattgtggcatacactattttgattcgctggtgcaacattcatggtgaatttgataagggcttaggaatttacagtgatatggttaaaaatggtgtgcgaccaaactgggacacatatagagctcttttcttaggagcttctttgatgaccacaaatggaagaactttactattgaccacctgatgttagggcaatatctgttctcatctactggaataggctgaatcaagacggatgcaagatgcaaaaatcaatctgaccctgaactgttgcttcatatgcaagtggctataagcctaaaacatacgcatgcatatctgcatattggcttttttctatgcttgagaagatggattccagtctgaggtcaatttaaagtatgaatattatacaatcacaaagggtcaggaagaaaagtgatcgaaaacttcatcaaatttatgctgctgaacttgcaaatatagattttgcatatggtggtggctggtgacagtgttgccagagtacccagaggtttacaacatagtaaacaagctgagggtggagtcagtggttgctgttgaaggtgtgatccagccacgcccggtggatgccatcaatgcagatatgaggaccgggactatagaggttgtggcacatcatgttctagtgctgaactcagtaacccggtcactgccgtttccagttacaatttctgatactgtaaaagagaagtttccagaagaaattagattgaggtttagaatgttgggacttgtgtcgtccacaaatgcagtcaaatttgcggttgcgccataatgttgttaaactcatacgccgctacttggaggatgaacatgaatttgttgaggtagattgagactcctgttttgtccaagtctacacctgaaggtgctcgggagtcgggactatcttgtaccatcgagagttcaggaggcattgcctatggattggatcggttggtgatgcttttggcgggtgagagctcgatccgagatgtgattgctttccccaagaccacgactgctcagtgtgcactcaccgaagcaccatcagctgtagaaccacagcaactgaaggatctcgccttccccaaacctacttcgtgagacgctgttcatgtgttcatgacaaaaattccgtgctctcaaggacagctatagtttgcttcttctagtttttgagtgtattggcctattctatttttgcatagtatagaatgcacagtttttggaccgtgaatccgtgataaatttgtagaagatgcttaacatgccaaagttctggaagagtattgttttaatagcggtgcttatgtgtttgtgcttgtgcacaaacttacctggcatattattcaacagaatccattttccaaggctagctagctgagtcgctagctactccttttccgtatatatgaggccttgcaaacgcgactcaacgccttagatgtagagatggcaatgagtaccggatgtt

SEQ ID NO: 29407 - DNA, 2792 bp, Zea Mays
atggaaattttggagcattggtttgtattttcttggatacatcaaaaacacaattgggcatggaagcttagaggaaagcgaatgagtggacacatccacaagagcttcaggttaactggtcaaaattgtaagttgggcatcgtagcaaacctgttagcatgtaatgcatggatcgatagattgggcaaggatggaagatatagggaggcagaaaagctcttcagagggatggcagacagaggtctagatccaaatgaggtgacctatgctatactgatacattccttgtgcaagaggggtatgatggaagatgcactttgcatgtttgataggatgagggagaagggaatcagaatgactgtttatccatacaactctttaattaatggttactgcaaacacaacaattttcatcaggcaagaggtcttttgaatgagatggttgcgaagggattgacaccaagtccagcatcatattcccctcttatagctggtttatgtaggaaaggggatctggccagtgcaatggagctccacagggagatgaccaggaatgctgtttcagggaatgtatatacatttacagctcttatcagtggtttctgcaaggatggaaatatggatgaagcaactaggttgtttcataaaatgatggagagttccctagtgccaaatgaagtgacttttaatgttatgatagaagggtattgccgtgtaggcaatattaggaaggcattccagttatatgatcagatgctagatagaggcctaacacctgacaattacacttacaggtcactgataagtgtagtttgtttgacgctaggtgccatgaaagctaaggaatttgttgctgatctagaaaacaactgtgctgtgctaaatagttttagccttacagcacttatgcatggattctgcaaagaaggaagcgcagagatcctctgtaaagaaatgttagctggacacttccttcctaatagctatacttataattgctttcttgattatctggcaaatgaaggagagctcgaaaaggctaaagttctacacgcagccatgcttgaaggctgtttagctaacacagtgacatttaacacattgatcaaagggttctgtatggctgggcagatccaaggggcaattgaccttatgcagaagaatactgagagtggtttctttcctgattgcatcagctattctacaataataaatgagctctgtaaggttggtgacaccaataaagcatttgagctttggaatgaaatgttatacaaaggactgaaacctgatattgtggcatacactattttgattcgctggtgcaacattcatggtgaatttgataagggcttaggaatttacagtgatatggttaaaaatggtgtgcgaccaaactgggacacatatagagctcttttcttaggagcttctttgatgaccacaaatggaagaactttactattgaccacctgatgttagggcaatatctgttctcatctactggaataggctgaatcaagacggatgcaagatgcaaaaatcaatctgaccctgaactgttgcttcatatgcaagtggctataagcctaaaacatacgcatgcatatctgcatattggcttttttctatgcttgagaagatggattccagtctgaggtcaatttaaagtatgaatattatacaatcacaaagggtcaggaagaaaagtgatcgaaaacttcatcaaatttatgctgctgaacttgcaaatatagattttgcatatggtggtggctgtgtaggtgacagtgttgccagagtacccagaggtttacaacatagtaaacaagctgagggtggagtcagtggttgctgttgaaggtgtgatccagccacgcccggtggatgccatcaatgcagatatgaggaccgggactatagaggttgtggcacatcatgttctagtgctgaactcagtaacccggtcactgccgtttccagttacaatttctgatactgtaaaagagaagtttccagaagaaattagattgaggtttagaatgttgggacttgtgtcgtccacaaatgcagtcaaatttgcggttgcgccataatgttgttaaactcatacgccgctacttggaggatgaacatgaatttgttgaggttacatgttccaaggtagattgagactcctgttttgtccaagtctacacctgaaggtgctcgggagtcgggactatcttgtaccatcgagagttcaggaggcattgcctatggattggatcggttggtgatgcttttggcgggtgagagctcgatccgagatgtgattgctttccccaagaccacgactgctcagtgtgcactcaccgaagcaccatcagctgtagaaccacagcaactgaaggatctcgccttccccaaacctacttcgtgagacgctgttcatgtgttcatgacaaaaattccgtgctctcaaggacagctatagtttgcttcttctagtttttgagtgtattggcctattctatttttgcatagtatagaatgcacagtttttggaccgtgaatccgtgataaatttgtagaagatgcttaacatgccaaagttctggaagagtattgttttaatagcggtgcttatgtgtttgtgcttgtgcacaaacttacctggcatattattcaacagaatccattttccaaggctagctagctgagtcgctagctactccttttccgtatatatgaggccttgcaaacgcgactcaacgccttagatgtagagatggcaatgagtaccggatgtt

SEQ ID NO: 29408 - DNA, 2800 bp, Zea Mays
atggaaattttggagcattggtttgtattttcttggatacatcaaaaacacaattgggcatggaagcttagaggaaagcgaatgagtggacacatccacaagagcttcaggttaactggtcaaaattgtaagttgggcatcgtagcaaacctgttagcatgtaatgcatggatcgatagattgggcaaggatggaagatatagggaggcagaaaagctcttcagagggatggcagacagaggtctagatccaaatgaggtgacctatgctatactgatacattccttgtgcaagaggggtatgatggaagatgcactttgcatgtttgataggatgagggagaagggaatcagaatgactgtttatccatacaactctttaattaatggttactgcaaacacaacaattttcatcaggcaagaggtcttttgaatgagatggttgcgaagggattgacaccaagtccagcatcatattcccctcttatagctggtttatgtaggaaaggggatctggccagtgcaatggagctccacagggagatgaccaggaatgctgtttcagggaatgtatatacatttacagctcttatcagtggtttctgcaaggatggaaatatggatgaagcaactaggttgtttcataaaatgatggagagttccctagtgccaaatgaagtgacttttaatgttatgatagaagggtattgccgtgtaggcaatattaggaaggcattccagttatatgatcagatgctagatagaggcctaacacctgacaattacacttacaggtcactgataagtgtagtttgtttgacgctaggtgccatgaaagctaaggaatttgttgctgatctagaaaacaactgtgctgtgctaaatagttttagccttacagcacttatgcatggattctgcaaagaaggaagcgcagagatcctctgtaaagaaatgttagctggacacttccttcctaatagctatacttataattgctttcttgattatctggcaaatgaaggagagctcgaaaaggctaaagttctacacgcagccatgcttgaaggctgtttagctaacacagtgacatttaacacattgatcaaagggttctgtatggctgggcagatccaaggggcaattgaccttatgcagaagaatactgagagtggtttctttcctgattgcatcagctattctacaataataaatgagctctgtaaggttggtgacaccaataaagcatttgagctttggaatgaaatgttatacaaaggactgaaacctgatattgtggcatacactattttgattcgctggtgcaacattcatggtgaatttgataagggcttaggaatttacagtgatatggttaaaaatggtgtgcgaccaaactgggacacatatagagctcttttcttaggagcttctttgatgaccacaaatggaagaactttactattgaccacctgatgttagggcaatatctgttctcatctactggaataggctgaatcaagacggatgcaagatgcaaaaatcaatctgaccctgaactgttgcttcatatgcaagtggctataagcctaaaacatacgcatgcatatctgcatattggcttttttctatgcttgagaagatggattccagtctgaggtcaatttaaagtatgaatattatacaatcacaaagggtcaggaagaaaagtgatcgaaaacttcatcaaatttatgctgctgaacttgcaaatatagattttgcatatggtggtggctggtgacagtgttgccagagtacccagaggtttacaacatagtaaacaagctgagggtggagtcagtggttgctgttgaaggtgtgatccagccacgcccggtggatgccatcaatgcagatatgaggaccgggactatagaggttgtggcacatcatgttctagtgctgaactcagtaacccggtcactgccgtttccagttacaatttctgatactgtaaaagagaagtttccagaagaaattagattgagttgaatactgtaggtttagaatgttgggacttgtgtcgtccacaaatgcagtcaaatttgcggttgcgccataatgttgttaaactcatacgccgctacttggaggatgaacatgaatttgttgaggttacatgttccaaggtagattgagactcctgttttgtccaagtctacacctgaaggtgctcgggagtcgggactatcttgtaccatcgagagttcaggaggcattgcctatggattggatcggttggtgatgcttttggcgggtgagagctcgatccgagatgtgattgctttccccaagaccacgactgctcagtgtgcactcaccgaagcaccatcagctgtagaaccacagcaactgaaggatctcgccttccccaaacctacttcgtgagacgctgttcatgtgttcatgacaaaaattccgtgctctcaaggacagctatagtttgcttcttctagtttttgagtgtattggcctattctatttttgcatagtatagaatgcacagtttttggaccgtgaatccgtgataaatttgtagaagatgcttaacatgccaaagttctggaagagtattgttttaatagcggtgcttatgtgtttgtgcttgtgcacaaacttacctggcatattattcaacagaatccattttccaaggctagctagctgagtcgctagctactccttttccgtatatatgaggccttgcaaacgcgactcaacgccttagatgtagagatggcaatgagtaccggatgtt

SEQ ID NO: 29409 - DNA, 2787 bp, Zea Mays
atggaaattttggagcattggtttgtattttcttggatacatcaaaaacacaattgggcatggaagcttagaggaaagcgaatgagtggacacatccacaagagcttcaggttaactggtcaaaattgtaagttgggcatcgtagcaaacctgttagcatgtaatgcatggatcgatagattgggcaaggatggaagatatagggaggcagaaaagctcttcagagggatggcagacagaggtctagatccaaatgaggtgacctatgctatactgatacattccttgtgcaagaggggtatgatggaagatgcactttgcatgtttgataggatgagggagaagggaatcagaatgactgtttatccatacaactctttaattaatggttactgcaaacacaacaattttcatcaggcaagaggtcttttgaatgagatggttgcgaagggattgacaccaagtccagcatcatattcccctcttatagctggtttatgtaggaaaggggatctggccagtgcaatggagctccacagggagatgaccaggaatgctgtttcagggaatgtatatacatttacagctcttatcagtggtttctgcaaggatggaaatatggatgaagcaactaggttgtttcataaaatgatggagagttccctagtgccaaatgaagtgacttttaatgttatgatagaagggtattgccgtgtaggcaatattaggaaggcattccagttatatgatcagatgctagatagaggcctaacacctgacaattacacttacaggtcactgataagtgtagtttgtttgacgctaggtgccatgaaagctaaggaatttgttgctgatctagaaaacaactgtgctgtgctaaatagttttagccttacagcacttatgcatggattctgcaaagaaggaagcgcagagatcctctgtaaagaaatgttagctggacacttccttcctaatagctatacttataattgctttcttgattatctggcaaatgaaggagagctcgaaaaggctaaagttctacacgcagccatgcttgaaggctgtttagctaacacagtgacatttaacacattgatcaaagggttctgtatggctgggcagatccaaggggcaattgaccttatgcagaagaatactgagagtggtttctttcctgattgcatcagctattctacaataataaatgagctctgtaaggttggtgacaccaataaagcatttgagctttggaatgaaatgttatacaaaggactgaaacctgatattgtggcatacactattttgattcgctggtgcaacattcatggtgaatttgataagggcttaggaatttacagtgatatggttaaaaatggtgtgcgaccaaactgggacacatatagagctcttttcttaggagcttctttgatgaccacaaatggaagaactttactattgaccacctgatgttagggcaatatctgttctcatctactggaataggctgaatcaagacggatgcaagatgcaaaaatcaatctgaccctgaactgttgcttcatatgcaagtggctataagcctaaaacatacgcatgcatatctgcatattggcttttttctatgcttgagaagatggattccagtctgaggtcaatttaaagtatgaatattatacaatcacaaagggtcaggaagaaaagtgatcgaaaacttcatcaaatttatgctgctgaacttgcaaatatagattttgcatatggtggtggctggtgacagtgttgccagagtacccagaggtttacaacatagtaaacaagctgagggtggagtcagtggttgctgttgaaggtgtgatccagccacgcccggtggatgccatcaatgcagatatgaggaccgggactatagaggttgtggcacatcatgttctagtgctgaactcagtaacccggtcactgccgtttccagttacaatttctgatactgtaaaagagaagtttccagaagaaattagattgaggtttagaatgttgggacttgtgtcgtccacaaatgcagtcaaatttgcggttgcgccataatgttgttaaactcatacgccgctacttggaggatgaacatgaatttgttgaggttacatgttccaaggtagattgagactcctgttttgtccaagtctacacctgaaggtgctcgggagtcgggactatcttgtaccatcgagagttcaggaggcattgcctatggattggatcggttggtgatgcttttggcgggtgagagctcgatccgagatgtgattgctttccccaagaccacgactgctcagtgtgcactcaccgaagcaccatcagctgtagaaccacagcaactgaaggatctcgccttccccaaacctacttcgtgagacgctgttcatgtgttcatgacaaaaattccgtgctctcaaggacagctatagtttgcttcttctagtttttgagtgtattggcctattctatttttgcatagtatagaatgcacagtttttggaccgtgaatccgtgataaatttgtagaagatgcttaacatgccaaagttctggaagagtattgttttaatagcggtgcttatgtgtttgtgcttgtgcacaaacttacctggcatattattcaacagaatccattttccaaggctagctagctgagtcgctagctactccttttccgtatatatgaggccttgcaaacgcgactcaacgccttagatgtagagatggcaatgagtaccggatgtt

SEQ ID NO: 29410 - DNA, 2805 bp, Zea Mays
atggaaattttggagcattggtttgtattttcttggatacatcaaaaacacaattgggcatggaagcttagaggaaagcgaatgagtggacacatccacaagagcttcaggttaactggtcaaaattgtaagttgggcatcgtagcaaacctgttagcatgtaatgcatggatcgatagattgggcaaggatggaagatatagggaggcagaaaagctcttcagagggatggcagacagaggtctagatccaaatgaggtgacctatgctatactgatacattccttgtgcaagaggggtatgatggaagatgcactttgcatgtttgataggatgagggagaagggaatcagaatgactgtttatccatacaactctttaattaatggttactgcaaacacaacaattttcatcaggcaagaggtcttttgaatgagatggttgcgaagggattgacaccaagtccagcatcatattcccctcttatagctggtttatgtaggaaaggggatctggccagtgcaatggagctccacagggagatgaccaggaatgctgtttcagggaatgtatatacatttacagctcttatcagtggtttctgcaaggatggaaatatggatgaagcaactaggttgtttcataaaatgatggagagttccctagtgccaaatgaagtgacttttaatgttatgatagaagggtattgccgtgtaggcaatattaggaaggcattccagttatatgatcagatgctagatagaggcctaacacctgacaattacacttacaggtcactgataagtgtagtttgtttgacgctaggtgccatgaaagctaaggaatttgttgctgatctagaaaacaactgtgctgtgctaaatagttttagccttacagcacttatgcatggattctgcaaagaaggaagcgcagagatcctctgtaaagaaatgttagctggacacttccttcctaatagctatacttataattgctttcttgattatctggcaaatgaaggagagctcgaaaaggctaaagttctacacgcagccatgcttgaaggctgtttagctaacacagtgacatttaacacattgatcaaagggttctgtatggctgggcagatccaaggggcaattgaccttatgcagaagaatactgagagtggtttctttcctgattgcatcagctattctacaataataaatgagctctgtaaggttggtgacaccaataaagcatttgagctttggaatgaaatgttatacaaaggactgaaacctgatattgtggcatacactattttgattcgctggtgcaacattcatggtgaatttgataagggcttaggaatttacagtgatatggttaaaaatggtgtgcgaccaaactgggacacatatagagctcttttcttaggagcttctttgatgaccacaaatggaagaactttactattgaccacctgatgttagggcaatatctgttctcatctactggaataggctgaatcaagacggatgcaagatgcaaaaatcaatctgaccctgaactgttgcttcatatgcaagtggctataagcctaaaacatacgcatgcatatctgcatattggcttttttctatgcttgagaagatggattccagtctgaggtcaatttaaagtatgaatattatacaatcacaaagggtcaggaagaaaagtgatcgaaaacttcatcaaatttatgctgctgaacttgcaaatatagattttgcatatggtggtggctgtgtaggtgacagtgttgccagagtacccagaggtttacaacatagtaaacaagctgagggtggagtcagtggttgctgttgaaggtgtgatccagccacgcccggtggatgccatcaatgcagatatgaggaccgggactatagaggttgtggcacatcatgttctagtgctgaactcagtaacccggtcactgccgtttccagttacaatttctgatactgtaaaagagaagtttccagaagaaattagattgagttgaatactgtaggtttagaatgttgggacttgtgtcgtccacaaatgcagtcaaatttgcggttgcgccataatgttgttaaactcatacgccgctacttggaggatgaacatgaatttgttgaggttacatgttccaaggtagattgagactcctgttttgtccaagtctacacctgaaggtgctcgggagtcgggactatcttgtaccatcgagagttcaggaggcattgcctatggattggatcggttggtgatgcttttggcgggtgagagctcgatccgagatgtgattgctttccccaagaccacgactgctcagtgtgcactcaccgaagcaccatcagctgtagaaccacagcaactgaaggatctcgccttccccaaacctacttcgtgagacgctgttcatgtgttcatgacaaaaattccgtgctctcaaggacagctatagtttgcttcttctagtttttgagtgtattggcctattctatttttgcatagtatagaatgcacagtttttggaccgtgaatccgtgataaatttgtagaagatgcttaacatgccaaagttctggaagagtattgttttaatagcggtgcttatgtgtttgtgcttgtgcacaaacttacctggcatattattcaacagaatccattttccaaggctagctagctgagtcgctagctactccttttccgtatatatgaggccttgcaaacgcgactcaacgccttagatgtagagatggcaatgagtaccggatgtt

SEQ ID NO: 29411 - DNA, 3108 bp, Zea Mays
atggaaattttggagcattggtttgtattttcttggatacatcaaaaacacaattgggcatggaagcttagaggaaagcgaatgagtggacacatccacaagagcttcaggttaactggtcaaaattgtaagttgggcatcgtagcaaacctgttagcatgtaatgcatggatcgatagattgggcaaggatggaagatatagggaggcagaaaagctcttcagagggatggcagacagaggtctagatccaaatgaggtgacctatgctatactgatacattccttgtgcaagaggggtatgatggaagatgcactttgcatgtttgataggatgagggagaagggaatcagaatgactgtttatccatacaactctttaattaatggttactgcaaacacaacaattttcatcaggcaagaggtcttttgaatgagatggttgcgaagggattgacaccaagtccagcatcatattcccctcttatagctggtttatgtaggaaaggggatctggccagtgcaatggagctccacagggagatgaccaggaatgctgtttcagggaatgtatatacatttacagctcttatcagtggtttctgcaaggatggaaatatggatgaagcaactaggttgtttcataaaatgatggagagttccctagtgccaaatgaagtgacttttaatgttatgatagaagggtattgccgtgtaggcaatattaggaaggcattccagttatatgatcagatgctagatagaggcctaacacctgacaattacacttacaggtcactgataagtgtagtttgtttgacgctaggtgccatgaaagctaaggaatttgttgctgatctagaaaacaactgtgctgtgctaaatagttttagccttacagcacttatgcatggattctgcaaagaaggaaggttaactgaaacgtaccaagtttgggatgatatgagagctcggggagtctagcttgatcttatcagtttaagtaattgcataagcagctcagaactgcatgacagggagaaaatactcttgttatttggggaaatgaaagcaaaaggtgtcaagccagacaatgtgtttcatacatgcatgattcatgtgcactcaaaggaagaaaatatagttcaagctttaaactgctgggataagatgatagatgacggatgctctccaaatgttatcacatatacagttttaattaatcatctatgtaagtctggatatttgagcagcgcagagatcctctgtaaagaaatgttagctggacacttccttcctaatagctatacttataattgctttcttgattatctggcaaatgaaggagagctcgaaaaggctaaagttctacacgcagccatgcttgaaggctgtttagctaacacagtgacatttaacacattgatcaaagggttctgtatggctgggcagatccaaggggcaattgaccttatgcagaagaatactgagagtggtttctttcctgattgcatcagctattctacaataataaatgagctctgtaaggttggtgacaccaataaagcatttgagctttggaatgaaatgttatacaaaggactgaaacctgatattgtggcatacactattttgattcgctggtgcaacattcatggtgaatttgataagggcttaggaatttacagtgatatggttaaaaatggtgtgcgaccaaactgggacacatatagagctcttttcttaggagcttctttgatgaccacaaatggaagaactttactattgaccacctgatgttagggcaatatctgttctcatctactggaataggctgaatcaagacggatgcaagatgcaaaaatcaatctgaccctgaactgttgcttcatatgcaagtggctataagcctaaaacatacgcatgcatatctgcatattggcttttttctatgcttgagaagatggattccagtctgaggtcaatttaaagtatgaatattatacaatcacaaagggtcaggaagaaaagtgatcgaaaacttcatcaaatttatgctgctgaacttgcaaatatagattttgcatatggtggtggctggtgacagtgttgccagagtacccagaggtttacaacatagtaaacaagctgagggtggagtcagtggttgctgttgaaggtgtgatccagccacgcccggtggatgccatcaatgcagatatgaggaccgggactatagaggttgtggcacatcatgttctagtgctgaactcagtaacccggtcactgccgtttccagttacaatttctgatactgtaaaagagaagtttccagaagaaattagattgaggtttagaatgttgggacttgtgtcgtccacaaatgcagtcaaatttgcggttgcgccataatgttgttaaactcatacgccgctacttggaggatgaacatgaatttgttgaggttacatgttccaaggtagattgagactcctgttttgtccaagtctacacctgaaggtgctcgggagtcgggactatcttgtaccatcgagagttcaggaggcattgcctatggattggatcggttggtgatgcttttggcgggtgagagctcgatccgagatgtgattgctttccccaagaccacgactgctcagtgtgcactcaccgaagcaccatcagctgtagaaccacagcaactgaaggatctcgccttccccaaacctacttcgtgagacgctgttcatgtgttcatgacaaaaattccgtgctctcaaggacagctatagtttgcttcttctagtttttgagtgtattggcctattctatttttgcatagtatagaatgcacagtttttggaccgtgaatccgtgataaatttgtagaagatgcttaacatgccaaagttctggaagagtattgttttaatagcggtgcttatgtgtttgtgcttgtgcacaaacttacctggcatattattcaacagaatccattttccaaggctagctagctgagtcgctagctactccttttccgtatatatgaggccttgcaaacgcgactcaacgccttagatgtagagatggcaatgagtaccggatgtt

SEQ ID NO: 29412 - DNA, 3121 bp, Zea Mays
atggaaattttggagcattggtttgtattttcttggatacatcaaaaacacaattgggcatggaagcttagaggaaagcgaatgagtggacacatccacaagagcttcaggttaactggtcaaaattgtaagttgggcatcgtagcaaacctgttagcatgtaatgcatggatcgatagattgggcaaggatggaagatatagggaggcagaaaagctcttcagagggatggcagacagaggtctagatccaaatgaggtgacctatgctatactgatacattccttgtgcaagaggggtatgatggaagatgcactttgcatgtttgataggatgagggagaagggaatcagaatgactgtttatccatacaactctttaattaatggttactgcaaacacaacaattttcatcaggcaagaggtcttttgaatgagatggttgcgaagggattgacaccaagtccagcatcatattcccctcttatagctggtttatgtaggaaaggggatctggccagtgcaatggagctccacagggagatgaccaggaatgctgtttcagggaatgtatatacatttacagctcttatcagtggtttctgcaaggatggaaatatggatgaagcaactaggttgtttcataaaatgatggagagttccctagtgccaaatgaagtgacttttaatgttatgatagaagggtattgccgtgtaggcaatattaggaaggcattccagttatatgatcagatgctagatagaggcctaacacctgacaattacacttacaggtcactgataagtgtagtttgtttgacgctaggtgccatgaaagctaaggaatttgttgctgatctagaaaacaactgtgctgtgctaaatagttttagccttacagcacttatgcatggattctgcaaagaaggaaggttaactgaaacgtaccaagtttgggatgatatgagagctcggggagtctagcttgatcttatcagtttaagtaattgcataagcagctcagaactgcatgacagggagaaaatactcttgttatttggggaaatgaaagcaaaaggtgtcaagccagacaatgtgtttcatacatgcatgattcatgtgcactcaaaggaagaaaatatagttcaagctttaaactgctgggataagatgatagatgacggatgctctccaaatgttatcacatatacagttttaattaatcatctatgtaagtctggatatttgagcagcgcagagatcctctgtaaagaaatgttagctggacacttccttcctaatagctatacttataattgctttcttgattatctggcaaatgaaggagagctcgaaaaggctaaagttctacacgcagccatgcttgaaggctgtttagctaacacagtgacatttaacacattgatcaaagggttctgtatggctgggcagatccaaggggcaattgaccttatgcagaagaatactgagagtggtttctttcctgattgcatcagctattctacaataataaatgagctctgtaaggttggtgacaccaataaagcatttgagctttggaatgaaatgttatacaaaggactgaaacctgatattgtggcatacactattttgattcgctggtgcaacattcatggtgaatttgataagggcttaggaatttacagtgatatggttaaaaatggtgtgcgaccaaactgggacacatatagagctcttttcttaggagcttctttgatgaccacaaatggaagaactttactattgaccacctgatgttagggcaatatctgttctcatctactggaataggctgaatcaagacggatgcaagatgcaaaaatcaatctgaccctgaactgttgcttcatatgcaagtggctataagcctaaaacatacgcatgcatatctgcatattggcttttttctatgcttgagaagatggattccagtctgaggtcaatttaaagtatgaatattatacaatcacaaagggtcaggaagaaaagtgatcgaaaacttcatcaaatttatgctgctgaacttgcaaatatagattttgcatatggtggtggctggtgacagtgttgccagagtacccagaggtttacaacatagtaaacaagctgagggtggagtcagtggttgctgttgaaggtgtgatccagccacgcccggtggatgccatcaatgcagatatgaggaccgggactatagaggttgtggcacatcatgttctagtgctgaactcagtaacccggtcactgccgtttccagttacaatttctgatactgtaaaagagaagtttccagaagaaattagattgagttgaatactgtaggtttagaatgttgggacttgtgtcgtccacaaatgcagtcaaatttgcggttgcgccataatgttgttaaactcatacgccgctacttggaggatgaacatgaatttgttgaggttacatgttccaaggtagattgagactcctgttttgtccaagtctacacctgaaggtgctcgggagtcgggactatcttgtaccatcgagagttcaggaggcattgcctatggattggatcggttggtgatgcttttggcgggtgagagctcgatccgagatgtgattgctttccccaagaccacgactgctcagtgtgcactcaccgaagcaccatcagctgtagaaccacagcaactgaaggatctcgccttccccaaacctacttcgtgagacgctgttcatgtgttcatgacaaaaattccgtgctctcaaggacagctatagtttgcttcttctagtttttgagtgtattggcctattctatttttgcatagtatagaatgcacagtttttggaccgtgaatccgtgataaatttgtagaagatgcttaacatgccaaagttctggaagagtattgttttaatagcggtgcttatgtgtttgtgcttgtgcacaaacttacctggcatattattcaacagaatccattttccaaggctagctagctgagtcgctagctactccttttccgtatatatgaggccttgcaaacgcgactcaacgccttagatgtagagatggcaatgagtaccggatgtt

SEQ ID NO: 29413 - DNA, 2703 bp, Zea Mays
atggaaattttggagcattggtttgtattttcttggatacatcaaaaacacaattgggcatggaagcttagaggaaagcgaatgagtggacacatccacaagagcttcaggttaactggtcaaaattgtaagttgggcatcgtagcaaacctgttagcatgtaatgcatggatcgatagattgggcaaggatggaagatatagggaggcagaaaagctcttcagagggatggcagacagaggtctagatccaaatgaggtgacctatgctatactgatacattccttgtgcaagaggggtatgatggaagatgcactttgcatgtttgataggatgagggagaagggaatcagaatgactgtttatccatacaactctttaattaatggttactgcaaacacaacaattttcatcaggcaagaggtcttttgaatgagatggttgcgaagggattgacaccaagtccagcatcatattcccctcttatagctggtttatgtaggaaaggggatctggccagtgcaatggagctccacagggagatgaccaggaatgctgtttcagggaatgtatatacatttacagctcttatcagtggtttctgcaaggatggaaatatggatgaagcaactaggttgtttcataaaatgatggagagttccctagtgccaaatgaagtgacttttaatgttatgatagaagggtattgccgtgtaggcaatattaggaaggcattccagttatatgatcagatgctagatagaggcctaacacctgacaattacacttacaggtcactgataagtgtagtttgtttgacgctaggtgccatgaaagctaaggaatttgttgctgatctagaaaacaactgtgctgtgctaaatagttttagccttacagcacttatgcatggattctgcaaagaaggaaggttaactgaaacgtaccaagtttgggatgatatgagagctcggggagtctagcttgatcttatcagtttaagtaattgcataagcagctcagaactgcatgacagggagaaaatactcttgttatttggggaaatgaaagcaaaaggtgtcaagccagacaatgtgtttcatacatgcatgattcatgtgcactcaaaggaagaaaatatagttcaagctttaaactgctgggataagatgatagatgacggatgctctccaaatgttatcacatatacagttttaattaatcatctatgtaagtctggatatttgagcagcgcagagatcctctgtaaagaaatgttagctggacacttccttcctaatagctatacttataattgctttcttgattatctggcaaatgaaggagagctcgaaaaggctaaagttctacacgcagccatgcttgaaggctgtttagctaacacagtgacatttaacacattgatcaaagggttctgtatggctgggcagatccaaggggcaattgaccttatgcagaagaatactgagagtggtttctttcctgattgcatcagctattctacaataataaatgagctctgtaaggttggtgacaccaataaagcatttgagctttggaatgaaatgttatacaaaggactgaaacctgatattgtggcatacactattttgattcgctggtgcaacattcatggtgaatttgataagggcttaggaatttacagtgatatggtgacagtgttgccagagtacccagaggtttacaacatagtaaacaagctgagggtggagtcagtggttgctgttgaaggtgtgatccagccacgcccggtggatgccatcaatgcagatatgaggaccgggactatagaggttgtggcacatcatgttctagtgctgaactcagtaacccggtcactgccgtttccagttacaatttctgatactgtaaaagagaagtttccagaagaaattagattgaggtttagaatgttgggacttgtgtcgtccacaaatgcagtcaaatttgcggttgcgccataatgttgttaaactcatacgccgctacttggaggatgaacatgaatttgttgaggttacatgttccaaggtagattgagactcctgttttgtccaagtctacacctgaaggtgctcgggagtcgggactatcttgtaccatcgagagttcaggaggcattgcctatggattggatcggttggtgatgcttttggcgggtgagagctcgatccgagatgtgattgctttccccaagaccacgactgctcagtgtgcactcaccgaagcaccatcagctgtagaaccacagcaactgaaggatctcgccttccccaaacctacttcgtgagacgctgttcatgtgttcatgacaaaaattccgtgctctcaaggacagctatagtttgcttcttctagtttttgagtgtattggcctattctatttttgcatagtatagaatgcacagtttttggaccgtgaatccgtgataaatttgtagaagatgcttaacatgccaaagttctggaagagtattgttttaatagcggtgcttatgtgtttgtgcttgtgcacaaacttacctggcatattattcaacagaatccattttccaaggctagctagctgagtcgctagctactccttttccgtatatatgaggccttgcaaacgcgactcaacgccttagatgtagagatggcaatgagtaccggatgtt

SEQ ID NO: 29414 - DNA, 1688 bp, Zea Mays
  misc_feature (1687)..(1688): n is a, c, g, or t
gaggttgcagccgctgcagtggccgcccagggatgcgctgtgcagcgagctgggcgccggggacgctgggcgcagggtaaggctatgcggctgggttgcgctacgccgcgcgcacgccgggctcaccttcgtcacccttcgagaccgctccggcatggtgcaggtgacagtgttgccagagtacccagaggtttacaacatagtaaacaagctgagggtggagtcagtggttgctgttgaaggcgtgatccggccacgcccggtggatgccatcaatgcagatatgaggactgggactatagaggttgtggcacatcatgttctagtgctgaactcagtaactcggtcactgccgtttccagttacaacttctgatactgtaaaagagaagtttccagaagaaattagattgaggtttagagtgttggacttgcgtcgtccacaaatgcagtcaaacttgcggttgcgccataatgttgttaaactcatacgccgctacttggaggatgaacatgaatttgttgagattgagactcctgttttgtccaagtctacacctgaaggtgctcgggactatcttgtaccatcgagagttcagccaggaacattctacgctctccctcaaagccctcagctgttcaagcaaatgttgatggtttctggttttgaaaaatattatcagattgcaaggtgcttccgagatgaagatctgcgtgcggacaggcaaccagagtttacacaacttgatatggaggttgcttttacatctatggaggatatgttgaagttgaatgaagatttaatgagacatgtttttcaagcggtaggagatatcaagctgccaaacccttttccaaggttaacatatgcagaggcaatggatcgctatgggacagataggcctgatctccggttcgattgggagctgaaagatgttagtgatgtatttttggggagtagcttcaaggtttttgctgatacattggaaagtggaggcgtaataaaggcactgtgtgttcctggtggtgccactgttttttcaaacactgacctgaagaaaggaactgtttacactgaagcttccaaagctggagccaagggcttgcctttcctcaaagttatggagaatggggagcttgaaggaatcggtccactgttatcgagtctgaaacctgaaaagaaagaccagctcatggaacttctggacacaaagacgggtgaccttatcctgtttgcactgggtgaacaatcatcagctaatcagattcttggacggttaagattatttattgctcataagctagaggtgatagacacgtctgcacattcagttctttgggtgacagattttccaatgtttcaatggaacagtgatgagcaaagatacgagctttttcaccaccctagcgcgcgctcagcgcgtagcgctttcttgaaccttggtttatgatcacattgttttagagatgtttacacttgctatttttaatgactgctattttactgtgttgacactttgcattacaccataaacagaacttggaagagttgattatcacattcaaccaccagaatacccaatattattggatttagtattcggaatctgtaaatgatatgaaaatggaaactgtgtagctttgctagaaattagagggaaattatggccaatacactgagaatttgnn

SEQ ID NO: 29415 - DNA, 1627 bp, Zea Mays
  misc_feature (1626)..(1627): n is a, c, g, or t
cggggacgctgggcgcagggtaaggctatgcggctgggttgcgctacgccgcgcgcacgccgggctcaccttcgtcacccttcgagaccgctccggcatggtgcaggtgacagtgttgccagagtacccagaggtttacaacatagtaaacaagctgagggtggagtcagtggttgctgttgaaggcgtgatccggccacgcccggtggatgccatcaatgcagatatgaggactgggactatagaggttgtggcacatcatgttctagtgctgaactcagtaactcggtcactgccgtttccagttacaacttctgatactgtaaaagagaagtttccagaagaaattagattgaggtttagagtgttggacttgcgtcgtccacaaatgcagtcaaacttgcggttgcgccataatgttgttaaactcatacgccgctacttggaggatgaacatgaatttgttgagattgagactcctgttttgtccaagtctacacctgaaggtgctcgggactatcttgtaccatcgagagttcaggaacattctacgctctccctcaaagccctcagctgttcaagcaaatgttgatggtttctggttttgaaaaatattatcagattgcaaggtgcttccgagatgaagatctgcgtgcggacaggcaaccagagtttacacaacttgatatggaggttgcttttacatctatggaggatatgttgaagttgaatgaagatttaatgagacatgtttttcaagcggtaggagatatcaagctgccaaacccttttccaaggttaacatatgcagaggcaatggatcgctatgggacagataggcctgatctccggttcgattgggagctgaaagatgttagtgatgtatttttggggagtagcttcaaggtttttgctgatacattggaaagtggaggcgtaataaaggcactgtgtgttcctggtggtgccactgttttttcaaacactgacctgaagaaaggaactgtttacactgaagcttccaaagctggagccaagggcttgcctttcctcaaagttatggagaatggggagcttgaaggaatcggtccactgttatcgagtctgaaacctgaaaagaaagaccagctcatggaacttctggacacaaagacgggtgaccttatcctgtttgcactgggtgaacaatcatcagctaatcagattcttggacggttaagattatttattgctcataagctagaggtgatagacacgtctgcacattcagttctttgggtgacagattttccaatgtttcaatggaacagtgatgagcaaagatacgagctttttcaccaccctagcgcgcgctcagcgcgtagcgctttcttgaaccttggtttatgatcacattgttttagagatgtttacacttgctatttttaatgactgctattttactgtgttgacactttgcattacaccataaacagaacttggaagagttgattatcacattcaaccaccagaatacccaatattattggatttagtattcggaatctgtaaatgatatgaaaatggaaactgtgtagctttgctagaaattagagggaaattatggccaatacactgagaatttgnn

SEQ ID NO: 29416 - DNA, 1656 bp, Zea Mays
ggggacgctgggcgcagggtaaggctatgcggctgggttgcgctacgccgcgcgcacgccgggctcaccttcgtcacccttcgagaccgctccggcatggtgcaggtgacagtgttgccagagtacccagaggtttacaacatagtaaacaagctgagggtggagtcagtggttgctgttgaaggcgtgatccggccacgcccggtggatgccatcaatgcagatatgaggactgggactatagaggttgtggcacatcatgttctagtgctgaactcagtaactcggtcactgccgtttccagttacaacttctgatactgtaaaagagaagtttccagaagaaattagattgaggtttagagtgttggacttgcgtcgtccacaaatgcagtcaaacttgcggttgcgccataatgttgttaaactcatacgccgctacttggaggatgaacatgaatttgttgagttacatgttccaaggtagattgagactcctgttttgtccaagtctacacctgaaggtgctcgggactatcttgtaccatcgagagttcagccaggaacattctacgctctccctcaaagccctcagctgttcaagcaaatgttgatggtttctggttttgaaaaatattatcagattgcaaggtgcttccgagatgaagatctgcgtgcggacaggcaaccagagtttacacaacttgatatggaggttgcttttacatctatggaggatatgttgaagttgaatgaagatttaatgagacatgtttttcaagcggtaggagatatcaagctgccaaacccttttccaaggttaacatatgcagaggcaatggatcgctatgggacagataggcctgatctccggttcgattgggagctgaaagatgttagtgatgtatttttggggagtagcttcaaggtttttgctgatacattggaaagtggaggcgtaataaaggcactgtgtgttcctggtggtgccactgttttttcaaacactgacctgaagaaaggaactgtttacactgaagcttccaaagctggagccaagggcttgcctttcctcaaagttatggagaatggggagcttgaaggaatcggtccactgttatcgagtctgaaacctgaaaagaaagaccagctcatggaacttctggacacaaagacgggtgaccttatcctgtttgcactgggtgaacaatcatcagctaatcagattcttggacggttaagattatttattgctcataagctagaggtgatagacacgtctgcacattcagttctttgggtgacagattttccaatgtttcaatggaacagtgatgagcaaagatacgaggttcaagaaaacacgattaggcgtgcgattaagcgctgagcagagggtcagcgcaccgcttacctactaagcgggcaattaagcgctggccctgcttaatcgtgcctatccggcatgtttaagggagaagaggagggagaggaagaggaggaacacctccggcatcaatccagcaggcagcaaatcgacgagagagaagaggagagactttgagagagaggtagagagagagcgcggacggagcggcgatggctgcaggcagcggattggtgtgagagagaggcggagcggcttcgcggtagaaag

SEQ ID NO: 29417 - DNA, 1634 bp, Zea Mays
  misc_feature (1633)..(1634): n is a, c, g, or t
ggggacgctgggcgcagggtaaggctatgcggctgggttgcgctacgccgcgcgcacgccgggctcaccttcgtcacccttcgagaccgctccggcatggtgcaggtgacagtgttgccagagtacccagaggtttacaacatagtaaacaagctgagggtggagtcagtggttgctgttgaaggcgtgatccggccacgcccggtggatgccatcaatgcagatatgaggactgggactatagaggttgtggcacatcatgttctagtgctgaactcagtaactcggtcactgccgtttccagttacaacttctgatactgtaaaagagaagtttccagaagaaattagattgaggtttagagtgttggacttgcgtcgtccacaaatgcagtcaaacttgcggttgcgccataatgttgttaaactcatacgccgctacttggaggatgaacatgaatttgttgaggtagattgagactcctgttttgtccaagtctacacctgaaggtgctcgggactatcttgtaccatcgagagttcagccaggaacattctacgctctccctcaaagccctcagctgttcaagcaaatgttgatggtttctggttttgaaaaatattatcagattgcaaggtgcttccgagatgaagatctgcgtgcggacaggcaaccagagtttacacaacttgatatggaggttgcttttacatctatggaggatatgttgaagttgaatgaagatttaatgagacatgtttttcaagcggtaggagatatcaagctgccaaacccttttccaaggttaacatatgcagaggcaatggatcgctatgggacagataggcctgatctccggttcgattgggagctgaaagatgttagtgatgtatttttggggagtagcttcaaggtttttgctgatacattggaaagtggaggcgtaataaaggcactgtgtgttcctggtggtgccactgttttttcaaacactgacctgaagaaaggaactgtttacactgaagcttccaaagctggagccaagggcttgcctttcctcaaagttatggagaatggggagcttgaaggaatcggtccactgttatcgagtctgaaacctgaaaagaaagaccagctcatggaacttctggacacaaagacgggtgaccttatcctgtttgcactgggtgaacaatcatcagctaatcagattcttggacggttaagattatttattgctcataagctagaggtgatagacacgtctgcacattcagttctttgggtgacagattttccaatgtttcaatggaacagtgatgagcaaagatacgagctttttcaccaccctagcgcgcgctcagcgcgtagcgctttcttgaaccttggtttatgatcacattgttttagagatgtttacacttgctatttttaatgactgctattttactgtgttgacactttgcattacaccataaacagaacttggaagagttgattatcacattcaaccaccagaatacccaatattattggatttagtattcggaatctgtaaatgatatgaaaatggaaactgtgtagctttgctagaaattagagggaaattatggccaatacactgagaatttgnn

SEQ ID NO: 29418 - DNA, 1489 bp, Zea Mays
  misc_feature (1488)..(1489): n is a, c, g, or t
ggggacgctgggcgcagggtaaggctatgcggctgggttgcgctacgccgcgcgcacgccgggctcaccttcgtcacccttcgagaccgctccggcatggtgcaggttgtggcacatcatgttctagtgctgaactcagtaactcggtcactgccgtttccagttacaacttctgatactgtaaaagagaagtttccagaagaaattagattgaggtttagagtgttggacttgcgtcgtccacaaatgcagtcaaacttgcggttgcgccataatgttgttaaactcatacgccgctacttggaggatgaacatgaatttgttgagattgagactcctgttttgtccaagtctacacctgaaggtgctcgggactatcttgtaccatcgagagttcagccaggaacattctacgctctccctcaaagccctcagctgttcaagcaaatgttgatggtttctggttttgaaaaatattatcagattgcaaggtgcttccgagatgaagatctgcgtgcggacaggcaaccagagtttacacaacttgatatggaggttgcttttacatctatggaggatatgttgaagttgaatgaagatttaatgagacatgtttttcaagcggtaggagatatcaagctgccaaacccttttccaaggttaacatatgcagaggcaatggatcgctatgggacagataggcctgatctccggttcgattgggagctgaaagatgttagtgatgtatttttggggagtagcttcaaggtttttgctgatacattggaaagtggaggcgtaataaaggcactgtgtgttcctggtggtgccactgttttttcaaacactgacctgaagaaaggaactgtttacactgaagcttccaaagctggagccaagggcttgcctttcctcaaagttatggagaatggggagcttgaaggaatcggtccactgttatcgagtctgaaacctgaaaagaaagaccagctcatggaacttctggacacaaagacgggtgaccttatcctgtttgcactgggtgaacaatcatcagctaatcagattcttggacggttaagattatttattgctcataagctagaggtgatagacacgtctgcacattcagttctttgggtgacagattttccaatgtttcaatggaacagtgatgagcaaagatacgagctttttcaccaccctagcgcgcgctcagcgcgtagcgctttcttgaaccttggtttatgatcacattgttttagagatgtttacacttgctatttttaatgactgctattttactgtgttgacactttgcattacaccataaacagaacttggaagagttgattatcacattcaaccaccagaatacccaatattattggatttagtattcggaatctgtaaatgatatgaaaatggaaactgtgtagctttgctagaaattagagggaaattatggccaatacactgagaatttgnn

SEQ ID NO: 29419 - DNA, 1617 bp, Zea Mays
ggtaaggctatgcggctgggttgcgctacgccgcgcgcacgccgggctcaccttcgtcacccttcgagaccgctccggcatggtgcaggtgacagtgttgccagagtacccagaggtttacaacatagtaaacaagctgagggtggagtcagtggttgctgttgaaggcgtgatccggccacgcccggtggatgccatcaatgcagatatgaggactgggactatagaggttgtggcacatcatgttctagtgctgaactcagtaactcggtcactgccgtttccagttacaacttctgatactgtaaaagagaagtttccagaagaaattagattgaggtttagagtgttggacttgcgtcgtccacaaatgcagtcaaacttgcggttgcgccataatgttgttaaactcatacgccgctacttggaggatgaacatgaatttgttgagattgagactcctgttttgtccaagtctacacctgaaggtgctcgggactatcttgtaccatcgagagttcaggaacattctacgctctccctcaaagccctcagctgttcaagcaaatgttgatggtttctggttttgaaaaatattatcagattgcaaggtgcttccgagatgaagatctgcgtgcggacaggcaaccagagtttacacaacttgatatggaggttgcttttacatctatggaggatatgttgaagttgaatgaagatttaatgagacatgtttttcaagcggtaggagatatcaagctgccaaacccttttccaaggttaacatatgcagaggcaatggatcgctatgggacagataggcctgatctccggttcgattgggagctgaaagatgttagtgatgtatttttggggagtagcttcaaggtttttgctgatacattggaaagtggaggcgtaataaaggcactgtgtgttcctggtggtgccactgttttttcaaacactgacctgaagaaaggaactgtttacactgaagcttccaaagctggagccaagggcttgcctttcctcaaagttatggagaatggggagcttgaaggaatcggtccactgttatcgagtctgaaacctgaaaagaaagaccagctcatggaacttctggacacaaagacgggtgaccttatcctgtttgcactgggtgaacaatcatcagctaatcagattcttggacggttaagattatttattgctcataagctagaggtgatagacacgtctgcacattcagttctttgggtgacagattttccaatgtttcaatggaacagtgatgagcaaagatacgaggttcaagaaaacacgattaggcgtgcgattaagcgctgagcagagggtcagcgcaccgcttacctactaagcgggcaattaagcgctggccctgcttaatcgtgcctatccggcatgtttaagggagaagaggagggagaggaagaggaggaacacctccggcatcaatccagcaggcagcaaatcgacgagagagaagaggagagactttgagagagaggtagagagagagcgcggacggagcggcgatggctgcaggcagcggattggtgtgagagagaggcggagcggcttcgcggtagaaag

SEQ ID NO: 29420 - DNA, 1618 bp, Zea Mays
  misc_feature (1617)..(1618): n is a, c, g, or t
ggctgggttgcgctacgccgcgcgcacgccgggctcaccttcgtcacccttcgagaccgctccggcatggtgcaggtgacagtgttgccagagtacccagaggtttacaacatagtaaacaagctgagggtggagtcagtggttgctgttgaaggcgtgatccggccacgcccggtggatgccatcaatgcagatatgaggactgggactatagaggttgtggcacatcatgttctagtgctgaactcagtaactcggtcactgccgtttccagttacaacttctgatactgtaaaagagaagtttccagaagaaattagattgaggtttagagtgttggacttgcgtcgtccacaaatgcagtcaaacttgcggttgcgccataatgttgttaaactcatacgccgctacttggaggatgaacatgaatttgttgagttacatgttccaaggtagattgagactcctgttttgtccaagtctacacctgaaggtgctcgggactatcttgtaccatcgagagttcagccaggaacattctacgctctccctcaaagccctcagctgttcaagcaaatgttgatggtttctggttttgaaaaatattatcagattgcaaggtgcttccgagatgaagatctgcgtgcggacaggcaaccagagtttacacaacttgatatggaggttgcttttacatctatggaggatatgttgaagttgaatgaagatttaatgagacatgtttttcaagcggtaggagatatcaagctgccaaacccttttccaaggttaacatatgcagaggcaatggatcgctatgggacagataggcctgatctccggttcgattgggagctgaaagatgttagtgatgtatttttggggagtagcttcaaggtttttgctgatacattggaaagtggaggcgtaataaaggcactgtgtgttcctggtggtgccactgttttttcaaacactgacctgaagaaaggaactgtttacactgaagcttccaaagctggagccaagggcttgcctttcctcaaagttatggagaatggggagcttgaaggaatcggtccactgttatcgagtctgaaacctgaaaagaaagaccagctcatggaacttctggacacaaagacgggtgaccttatcctgtttgcactgggtgaacaatcatcagctaatcagattcttggacggttaagattatttattgctcataagctagaggtgatagacacgtctgcacattcagttctttgggtgacagattttccaatgtttcaatggaacagtgatgagcaaagatacgagctttttcaccaccctagcgcgcgctcagcgcgtagcgctttcttgaaccttggtttatgatcacattgttttagagatgtttacacttgctatttttaatgactgctattttactgtgttgacactttgcattacaccataaacagaacttggaagagttgattatcacattcaaccaccagaatacccaatattattggatttagtattcggaatctgtaaatgatatgaaaatggaaactgtgtagctttgctagaaattagagggaaattatggccaatacactgagaatttgnn

SEQ ID NO: 29421 - DNA, 1578 bp, Zea Mays
  misc_feature (1577)..(1578): n is a, c, g, or t
cgcacgccgggctcaccttcgtcacccttcgagaccgctccggcatggtgcaggtgacagtgttgccagagtacccagaggtttacaacatagtaaacaagctgagggtggagtcagtggttgctgttgaaggcgtgatccggccacgcccggtggatgccatcaatgcagatatgaggactgggactatagaggttgtggcacatcatgttctagtgctgaactcagtaactcggtcactgccgtttccagttacaacttctgatactgtaaaagagaagtttccagaagaaattagattgaggtttagagtgttggacttgcgtcgtccacaaatgcagtcaaacttgcggttgcgccataatgttgttaaactcatacgccgctacttggaggatgaacatgaatttgttgaggtagattgagactcctgttttgtccaagtctacacctgaaggtgctcgggactatcttgtaccatcgagagttcaggaacattctacgctctccctcaaagccctcagctgttcaagcaaatgttgatggtttctggttttgaaaaatattatcagattgcaaggtgcttccgagatgaagatctgcgtgcggacaggcaaccagagtttacacaacttgatatggaggttgcttttacatctatggaggatatgttgaagttgaatgaagatttaatgagacatgtttttcaagcggtaggagatatcaagctgccaaacccttttccaaggttaacatatgcagaggcaatggatcgctatgggacagataggcctgatctccggttcgattgggagctgaaagatgttagtgatgtatttttggggagtagcttcaaggtttttgctgatacattggaaagtggaggcgtaataaaggcactgtgtgttcctggtggtgccactgttttttcaaacactgacctgaagaaaggaactgtttacactgaagcttccaaagctggagccaagggcttgcctttcctcaaagttatggagaatggggagcttgaaggaatcggtccactgttatcgagtctgaaacctgaaaagaaagaccagctcatggaacttctggacacaaagacgggtgaccttatcctgtttgcactgggtgaacaatcatcagctaatcagattcttggacggttaagattatttattgctcataagctagaggtgatagacacgtctgcacattcagttctttgggtgacagattttccaatgtttcaatggaacagtgatgagcaaagatacgagctttttcaccaccctagcgcgcgctcagcgcgtagcgctttcttgaaccttggtttatgatcacattgttttagagatgtttacacttgctatttttaatgactgctattttactgtgttgacactttgcattacaccataaacagaacttggaagagttgattatcacattcaaccaccagaatacccaatattattggatttagtattcggaatctgtaaatgatatgaaaatggaaactgtgtagctttgctagaaattagagggaaattatggccaatacactgagaatttgnn

SEQ ID NO: 29422 - DNA, 1584 bp, Zea Mays
cacgccgggctcaccttcgtcacccttcgagaccgctccggcatggtgcaggtgacagtgttgccagagtacccagaggtttacaacatagtaaacaagctgagggtggagtcagtggttgctgttgaaggcgtgatccggccacgcccggtggatgccatcaatgcagatatgaggactgggactatagaggttgtggcacatcatgttctagtgctgaactcagtaactcggtcactgccgtttccagttacaacttctgatactgtaaaagagaagtttccagaagaaattagattgaggtttagagtgttggacttgcgtcgtccacaaatgcagtcaaacttgcggttgcgccataatgttgttaaactcatacgccgctacttggaggatgaacatgaatttgttgagattgagactcctgttttgtccaagtctacacctgaaggtgctcgggactatcttgtaccatcgagagttcagccaggaacattctacgctctccctcaaagccctcagctgttcaagcaaatgttgatggtttctggttttgaaaaatattatcagattgcaaggtgcttccgagatgaagatctgcgtgcggacaggcaaccagagtttacacaacttgatatggaggttgcttttacatctatggaggatatgttgaagttgaatgaagatttaatgagacatgtttttcaagcggtaggagatatcaagctgccaaacccttttccaaggttaacatatgcagaggcaatggatcgctatgggacagataggcctgatctccggttcgattgggagctgaaagatgttagtgatgtatttttggggagtagcttcaaggtttttgctgatacattggaaagtggaggcgtaataaaggcactgtgtgttcctggtggtgccactgttttttcaaacactgacctgaagaaaggaactgtttacactgaagcttccaaagctggagccaagggcttgcctttcctcaaagttatggagaatggggagcttgaaggaatcggtccactgttatcgagtctgaaacctgaaaagaaagaccagctcatggaacttctggacacaaagacgggtgaccttatcctgtttgcactgggtgaacaatcatcagctaatcagattcttggacggttaagattatttattgctcataagctagaggtgatagacacgtctgcacattcagttctttgggtgacagattttccaatgtttcaatggaacagtgatgagcaaagatacgaggttcaagaaaacacgattaggcgtgcgattaagcgctgagcagagggtcagcgcaccgcttacctactaagcgggcaattaagcgctggccctgcttaatcgtgcctatccggcatgtttaagggagaagaggagggagaggaagaggaggaacacctccggcatcaatccagcaggcagcaaatcgacgagagagaagaggagagactttgagagagaggtagagagagagcgcggacggagcggcgatggctgcaggcagcggattggtgtgagagagaggcggagcggcttcgcggtagaaag

SEQ ID NO: 29423 - DNA, 1565 bp, Zea Mays
  misc_feature (1564)..(1565): n is a, c, g, or t
ctcaccttcgtcacccttcgagaccgctccggcatggtgcaggtgacagtgttgccagagtacccagaggtttacaacatagtaaacaagctgagggtggagtcagtggttgctgttgaaggcgtgatccggccacgcccggtggatgccatcaatgcagatatgaggactgggactatagaggttgtggcacatcatgttctagtgctgaactcagtaactcggtcactgccgtttccagttacaacttctgatactgtaaaagagaagtttccagaagaaattagattgaggtttagagtgttggacttgcgtcgtccacaaatgcagtcaaacttgcggttgcgccataatgttgttaaactcatacgccgctacttggaggatgaacatgaatttgttgagattgagactcctgttttgtccaagtctacacctgaaggtgctcgggactatcttgtaccatcgagagttcagaggaacattctacgctctccctcaaagccctcagctgttcaagcaaatgttgatggtttctggttttgaaaaatattatcagattgcaaggtgcttccgagatgaagatctgcgtgcggacaggcaaccagagtttacacaacttgatatggaggttgcttttacatctatggaggatatgttgaagttgaatgaagatttaatgagacatgtttttcaagcggtaggagatatcaagctgccaaacccttttccaaggttaacatatgcagaggcaatggatcgctatgggacagataggcctgatctccggttcgattgggagctgaaagatgttagtgatgtatttttggggagtagcttcaaggtttttgctgatacattggaaagtggaggcgtaataaaggcactgtgtgttcctggtggtgccactgttttttcaaacactgacctgaagaaaggaactgtttacactgaagcttccaaagctggagccaagggcttgcctttcctcaaagttatggagaatggggagcttgaaggaatcggtccactgttatcgagtctgaaacctgaaaagaaagaccagctcatggaacttctggacacaaagacgggtgaccttatcctgtttgcactgggtgaacaatcatcagctaatcagattcttggacggttaagattatttattgctcataagctagaggtgatagacacgtctgcacattcagttctttgggtgacagattttccaatgtttcaatggaacagtgatgagcaaagatacgagctttttcaccaccctagcgcgcgctcagcgcgtagcgctttcttgaaccttggtttatgatcacattgttttagagatgtttacacttgctatttttaatgactgctattttactgtgttgacactttgcattacaccataaacagaacttggaagagttgattatcacattcaaccaccagaatacccaatattattggatttagtattcggaatctgtaaatgatatgaaaatggaaactgtgtagctttgctagaaattagagggaaattatggccaatacactgagaatttgnn

SEQ ID NO: 29424 - DNA, 2293 bp, Zea Mays
tgttgatccaattggcggtgctgagtcctaatgagcatgggttttctctgcatcaagggttgattaggagaggtgaccagatttgagtgggtcagaattctgctctcaggactaaactcattgctgtgttacatgacagtgtgctgggaggtcattctggtattctagctacttatcagagagttaaaagggccttctattggaaagggttgaaattggatgttacaaattttgtgaagcagtgtgctatctgtcagaaagctaaaagtgagcatgttcatccgggtgggctgctacaacccttaccaattcctaaaggggtatggcaaggtatatcaatggattttgtggaaggtttacctaaatctgagggttatactacaattttggtggtggtggatcgtttctctaaatatgctcacttctttcctctgaaacatccattttctgcacaacaagtggctcaagtgatagtagacaacatttgtaagttacatggcatgccattgtcttttgtctctgatagggacaaagtgtttacgagtgccttttggaaacagttgtttactttgatgcaaaccaagcttttgatgtctactgcctaccacccccaaacagatgggcaaacggaaagagtcaaccagtgtttggagatgttcttgagatgttccgtgcatgcttcaccctctaagtggaaagcctggttgcctttagctgagtactggtataatacttcctaccatacatcattgggttgttctccttttaaggtggtgtatggttatgagcctccagtggctgctgccccagctttagacacttccagtgagactcaggtgtctgaatttctggagactcgactacgtcacatggagatgctgaaagtgcaactggctaaagcccagaacaggatgaaacaacaagctgataaattgaggactaatcgaaagtttcaagtgggagagttggtgttgctcaagttacagccatatgtgcagcattcagttgtgtttcgatcatgtcctaaattgtcttttcggtattttggtcccttcaagatcgtgaaggttattgggtccgtggcttatgaattggaattgcctgatggggctgcgattcatccagtttttcatgtattgcagttaaaaccgtttacccctaattaccaaccagtcttctctgaattgcctactacattgaatttggagcaaggagagttgaagcccgttaagattctggacaggcgtcttgtgaagaaggggaatcaggccattgttcaggttctgattcagtggactaccaagaaagatgaagctacttcctggcaagactggaatgtggtggccaaaatgtttcctgagcttaatgcatggggacatgcacaatctgaagagggggcaggtgtggcaatccctggtgataactgagtcgattggagggggaagtttgagaatctacaaaagtgatgtacaacaaagaatttttgagatcattggtatctcgcctgaacaggcagaggagaaatttggctaccttttagaatgcttcgatatgggtgctcctccacatggaggcattgcctatggattggatcggttggtgatgcttttggcgggtgagagctcgatccgagatgtgattgctttccccaagaccacgactgctcagtgtgcactcaccaaagcaccatcagctgtagaaccacagcaactgaaggatctcgccttccccaaacctacttcgtgagacgctgttcaagtgttcatgacaaaaattccgtgctctcaaggacagctatagtttgcttctagttttcgagtgtattggcctattctatttttgcatagtatagaatgcgcagtttttggaccgtaataaatttatagaagatgtttaacacgccaaagttctggaagagcattgttttaattttgccgtagcgaaaatcataagtagtgctcagaagattgggaaggagtaggcccggtttatcttgttcattcatgattccccttgtggagtgaagtggaatgctaaagatagaaaagtgttccgtaggatctcgtcttagcccattgacaaaactagtccaagaaacccagattgctaagtctcgagtatgtcaatcaagccctaatgtttccattccgtcggaccaactagcctaactgcctaacctttcatagaatttatcatttatgcccaagggacaagaggttttgaactctctagtagttccaagaagtatgctcatttccttggatgtgtattcactaatgttgtgactggaagg

SEQ ID NO: 29425 - DNA, 870 bp, Zea Mays
ctcgttgttcacagtttatatgatctggactgccctcattatgatagcaatcatgctttcagttctcaactcatatatcgtgttattaggcagaggagaaatttggctaccttttagaatgcttcgatatgggtgctcctccacatggaggcattgcctatggattggatcggttggtgatgcttttggcgggtgagagctcgatccgagatgtgattgctttccccaagaccacgactgctcagtgtgcactcaccaaagcaccatcagctgtagaaccacagcaactgaaggatctcgccttccccaaacctacttcgtgagacgctgttcaagtgttcatgacaaaaattccgtgctctcaaggacagctatagtttgcttctagttttcgagtgtattggcctattctatttttgcatagtatagaatgcgcagtttttggaccgtaataaatttatagaagatgtttaacacgccaaagttctggaagagcattgttttaattttgccgtagcgaaaatcataagtagtgctcagaagattgggaaggagtaggcccggtttatcttgttcattcatgattccccttgtggagtgaagtggaatgctaaagatagaaaagtgttccgtaggatctcgtcttagcccattgacaaaactagtccaagaaacccagattgctaagtctcgagtatgtcaatcaagccctaatgtttccattccgtcggaccaactagcctaactgcctaacctttcatagaatttatcatttatgcccaagggacaagaggttttgaactctctagtagttccaagaagtatgctcatttccttggatgtgtattcactaatgttgtgactggaagg

SEQ ID NO: 29426 - DNA, 1293 bp, Zea Mays
acaaaattttatatccgtcatggatatgagttttttagcgggcgtattttttattcgcgggtacgagtttgggcaggtaatacccagcgggtttttacccattgccacgctccagtgcagccgggcgaagcatcctcctccacccttcacccgttttcaagaaagtagcgaagcccgacgcctacgacgagatggcaaccaccacagccgccgccgcgttgagcatgaagctcctcatcaacaagaaggcgcagcgggtgctgttcgcggaggcgagcaaggaggtggtggacttcctcttctccctcctcgcgctgcccgtcgccaaggccgtgaagctggtcgggaaggatgccatggtcggctgcgtcggcaacctctatgccagcgtcgacaagcttgactccacctacctgcaggccggcgccgccaaggacgcgctcctctgccccacagttgtctcgccggcggcgaacacccgcagctccctcctccgtctgccggagccgtcgtcggtgcagccagagaatctgtatagatgcaccggcaatagctacatcacggacgagtatgacaaggagtgcccgcaatgtggctactccatgtccatggagaccgtagtgcacaactaccggccgtcggcgagggccgctagaggccaaacggtggcgcagagcgcggtgggagggttcgtgcagggcatcgtgacgtacacggtgctggacgacctgacggtgacgcccatgtccgccatctccagcatcaccctgctgaacaccttcgccgtggcggacctcggcgacctggaggagaagaagggcttggcggtcctcaaggcctccctgcagtccaagacggtgctcacggatgtcttcatccacggcaaggctgcgtcgtctagtgctcgcgcttgaaggccaccgtgctagcgggcgcgactggctcctggcgtgaacgaaataagtaaggtttggtttgctcttttgtgatgggatggatcaacttgctgcgacgacgtcgtccggccgttttagccttttggtttgggtttgtactgaactgatatcatctggtagcttttggttggcggatcgcatggggtcttatttggttgcgatgtcggtgccggcgtgccgcaaagggactgaactttgtacacacatgccctgttcaacgtccatggattgcttgctgtgtcatctctgcgttcgcacgccgcaatgtgtgacagctagtacgtacgtgtagcatctaatgacatgcgattacgctgtcaatgcgtgtggttatgct

SEQ ID NO: 29427 - DNA, 746 bp, Zea Mays
acacatcacttctatccacgtcagcgatccgtggcactagcccttccaccaatcagcccaagttgcccctttcctttaaattcgccgcacccattgctcttctcacggccatagaaatcgaccgagcgaatccctcgcatcgcattcgcagcctttgctgcatcacaccaccgcgaaaccccagcagccgcatcgatggcgcccaaggcggagaagaagccggctgcgaagaagccagcggaggaggagcccgctgccgcgaaggccccggcggggaagaagcccaaggccgagaagcgcctcccggcggccaagtcgtccggcaaagaaggcggcgacaagaagggtaagaagaaggcgaagaagtcggtggagacctacaagatctacatcttcaaggtgctgaagcaggtccaccccgacatcggcatctcttccaaggccatgtccatcatgaactccttcatcaacgacatcttcgagaagctcgccggcgaggctgccaagcttgcgcgctacaacaagaagcccaccatcacctctcgggagattcaaacctctgtccgccttgtccttcccggcgagctcgccaagcacgcggtctccgagggcaccaaggccgtcactaagttcacatcatcttagatttgaggtccattgtttgatgccaagctagcagcaaaacatgtggtatgtatctctgatggcgtgcatctctgctgctgcatcgctcatcactgttcgat

SEQ ID NO: 29428 - DNA, 618 bp, Zea Mays
ccacgtcagcgatccgtggcactagcccttccaccaatcagcccaagttgcccctttcctttaaattcgccgcacccattgctcttctcacggccatagaaatcgaccgagcgaatccctcgcatcgcattcgcagcctttgctgcatcacaccaccgcgaaaccccagcagccgcatcgatggcgcccaaggcggagaagaagccggcggcgacaagaagggtaagaagaaggcgaagaagtcggtggagacctacaagatctacatcttcaaggtgctgaagcaggtccaccccgacatcggcatctcttccaaggccatgtccatcatgaactccttcatcaacgacatcttcgagaagctcgccggcgaggctgccaagcttgcgcgctacaacaagaagcccaccatcacctctcgggagattcaaacctctgtccgccttgtccttcccggcgagctcgccaagcacgcggtctccgagggcaccaaggccgtcactaagttcacatcatcttagatttgaggtagtagctattggtgggtggtcgtgccttttgaactgtgtattctctattttactttgttcctgattgcattgtggcttcactgccttg

SEQ ID NO: 29429 - DNA, 587 bp, Zea Mays
atgtggaaattccgtggaagaaagaaaggaaccatgtggcgctttcttctcgtagatgccacagaactcgcgcacaaagcaaacacgcgtttccagttttacgtctcctacgtcaaagacttcgggaagcaagtgacggaggtcgccaagttggtcccacagcaggaagcccaccaaatccagcgagatccaggccgtcttggcctcgccctctcggcggacatcaccaagcacaccggttgtctcctcgggcaccaccaagccacctggccttcaccaagttcacctcatcttaggatttggactcacatcttattaccaattattcataaaaaaacatactgacaaccagtgagactctccattgttgatctgtttgacatatttacaaaacatcctttagacttgcatgcacctatttacagaaatatgagttgttgacaatggaaggagaggatattgactaatacatctcaatgacaatcctcaagaaaaggaggcacattgacgttgaggacactctggaccttatctggtgtcaataaatgcaggttgtttatttagacagaaaatgatagagatgcagc

SEQ ID NO: 29430 - DNA, 1007 bp, Zea Mays
atgtggaaattccgtggaagaaagaaaggaaccatgtggcgctttcttctcgtagatgccacagaactcgcgcacaaagcaaacacgcgtttccagttttacgtctcctacgtcaaagacttcgggaagcaagtgacggaggtcgccaagttggtcccacagcaggaagcccaccaaatccagcgagatccaggccgtcttggcctcgccctctcggcggacatcaccaagcacaccggttgtctcctcgggcaccaccaagccacctggccttcaccaagttcacctcatcttaggttagcctctaggactggaaatagtagcagtggtattggtagtcgtgcctcagttcatctcattacctgctattccctactggtagccgtgctgccgtggtaatacactaataccagtaatgagttggaatggattatatggatgtaatcagtttggacttggggttgcaatgtggatcatgatgacgctaatgaggatttggactcacatcttattaccaattattcataaaaaaacatactgacaaccagtgagactctccattgttgatctgtttgacatatttacaaaacatcctttagacttgcatgcacctatttacagaaatatgagttgttgacaatggaaggagaggatattgactaatacatctcaatgacaatcctcaagaaaaggaggcacattgacgttgaggacactctggaccttatctggtgtcaataaatgcaggttgtttatttagacagaaaatgatagagatgcagcatcatatacatatccggttatgtataccaaggaccatatggagtcttatggcccattttcagttttactacttaattatcgttgcaaattactgcagagttgtccactccacattccaccataggcgatctgctaatatggagggctttacttgcactttctggaagtattcttgatatgctaaagtctccgactcgggcactcatgtcttctgcaagaagaat

SEQ ID NO: 29431 - DNA, 2047 bp, Zea Mays
ggcttctcggctcttgtcgcccaccaccaagcgcgtggcccgctgtttccgcgaaagaacgctgctagctcccacccggacacggcagccgcgggcggcggctctcgacgagcacaccccgtcccgaatcatcaccatggctattagccagtgcccgtcccagaacagccacacggagacggctggtcaaccctgatgagccttgtccaaggcacaagtgggatggcgatcgaaaaggtccaaagcagcgctcacctcatgtgatcgcgacccgcccccacaccagacgccatcttctccttccctcgtcgtcgtcgtcgtcgtcgtcgtcgacacactcaattccttccaactccctcatcccaccaggccaccacgcacctagctactcagtacctcctcctgacttcactaccctcccactcccaacctccgccctccacacccaccaacgatcgacccacctcgcgatctccgccccccgcctcctccgccccgacgatgatgcggggcgatgacgagtaccggtaccagcagcagcacggccccggcggcggcgcgccgcacggcctgatcatggcggtggtggtggggctggtggtggcgggcccgctgttcctgggcgacggcggcgaggcggtcacgtccgccgtggcggacctgctcggccccacgggcctgctcctgctccccgtcggcctcgtcctcgtcatccgcgtcctctcctccgaccgcggcgccgccgcgctcgccggcgccctctccctcggcggctccccggactccgtgcaccgcgtcggcggctcgcccgtcggggtcgcgctcgcgctcgcgctcatcgccgccctcctctactacaggtcggcgctattcggcggcggcggcggcgacgacgagtagacagcggctgcctggcttggcttctgtgctgtgctgtgctacctcctgcgctacctacctaccttccttgctggaatgtttcagtagtttaggcaagattttctatttaattttgttaattaatgccaacaccgctgaacaagacactcgcatgtttgtgaaactggcttcgaacccctggaagaacaccagagcttacttaatttgtgctctccgttgtctccatagaccgacccatatgttacattctgcaaacggctgcctcgatgcgattttaaaatctgagctggatgctctgctcccgtttggaaacgcgaagcttctgcggttggtggctccgtcggcgaccggtggccatattcgatttgttcctttttttaaaaaaaaaaactgttgctctataataagcgctacataggaggcggtatgcagatccaccgtgcataattcaggcagtttcttggccagcacttcatggtaacttcaaagacacgaagggcctgggcctgggcctggccgagcccgtgggttgcgattgcgagacaacgtgtatttgacttttctggatccaacaatgagctttactttgtccagttcggtgcaaaatcctcattgcactacgcctgatactgcgcttgtagtgagcttgcttgctcgacaaatcttgctcgtgccaccggatgggttgatcaaggaggagtgcactaatattttttacggtgaaatcatttcactttttttaatctaattctgttagatggatatgtggctagtcaaacctcctcctcacgctggaagctaatttactatttccctatctcctttattttacatgcagttactcgcaacaaaattaaacaacacagaacacatacacaggacacactccacacgctgcacatatttatacacagcgcgctatcactgggcctgtgggctggctgctgcctgtaatcgctaacggggtaacatggatttgcgctgcggccgctcgatcaccaccttcatcatcatcagcaggctgtcaatttttttttcttttttgttttcatttggattttgttggctgcttgactatcatgacggagcagtgcgcgtggtgcgcgcagtagtcgctgacgctcccgagcagcgccctcttgacggc

SEQ ID NO: 29432 - DNA, 421 bp, Zea Mays
ctcacccgcgtgttctcctcccccgcctcgttcgcccctaccgcaccatcaacgtgcctccccgccgcccttgtcctccacatgcccgccactcccacccgagatggttagcgcccctcctccttccggtcccttcccctgcctccgctctcaacccggattcaccaagcgggctctggtggcggccggcgccgccgtcgtgtccgccattctcgtcaaccccctcgacgtcgccaagatatgtttaccagaggaattgatatctaggctgtttatgtggtcactaattttgactcccctaagacatctaagacatatttacacagggttggccgttctgggagatatggacaccttggtttggcagtgaacttgaccacttacaaagattgtttcaacttatatagtattgataaaaaaa

SEQ ID NO: 29433 - DNA, 3333 bp, Zea Mays
cccatgtgtgccacactgccagcccccaggcccctttccaatctggcaatcttccatgcattgccttattctctttattaccatacaaaagacacacacacacaccaccggagccggccgatccgccgagcaacaagcagctggggcatcatcagtgtggtagcctgatacgacgcggcgcctactctttacccgagtttaatagctcgtccagttacagctcctcgtgctactgcttgcttcacaatgtgcgctatcatggggaaacaaaagaggggtaggtgacggtggtgtgtcctcaagcgtgtcatcgaatgcctttttttttctgttggtcctctcgtcttgcaaccgaagcaactctgatagatggatggatggatggatggatggatggatggatgtgtgggagttgcacagggtcgtccatatcttgattccgaagcaaaggactccgcgcttgtcatcttcactgtcacagtacctgaggagaacgtcaaggtggacaggccgaccagaattcgaaagcccaatagtaaagttagcgagccggattggacccagtaattttctcatttttcttttttgtggttgttctgggattgagtgaggtattcgaggtggagttcggagtctgtgcaaaagtgacttggagaagaaggctggctagcagcgtccggaggagaggcggctcgccgtcgtgtaagaattccagatattttttttcataccataaagatcttcgtgagaggagacagtgccgagagcggtgctcaactcatccacaaatcagcagtgatcttataattggtatcggattcatctccgaccctggcggatcctccagagtacactgatcgggttcggagtctgttgtattcattcatcacccgttggatttggatactgccgtctctctcactttgttgcaggaggaattgctgacaccaaatatcatgaccaattcccaaaggagctcttatcaaacgacaactaagcaacacaaccgtttccagcagggtgtgcctaaacagtctaaacaacactctgatcaaagtaaagcggcaactctaatggcttatcgtcgtgctaaaggcctgtgttacaaatgtggtttacgatggagccaaactcacaagtgtagcaccacggtaccccttcacatggtggaggaattgtggcaattggttgattcagtggatgaacaacaatctctgcaagatgagtcgaatcaagaccttatggttctgtcggtaaatgcagttcttggtactgaagccctggaaacagtaatacttctagccacaattttcacaaaaaagatactacgccaatcctgaaattgttggcagctcagactccttccaatcactactgcttgcacgatggattaattatgtacaaggacagagttgtgctccctgcacaatctgaatttccccagaaaatattctaaaatttccacgacacaccaattggaggtcattctggattcttggtaacctatcaaaaggtcaagaggttatttagctggactggtatgaaacaaatgatcaaaacttagtgcagtcattgtccagtctgtcagcaagctaaagttgaaagagtaaaataccccggacttctccaacctctgccaatacgtgatggtgcttggaaaatgatcacaatggatttcatcgagggttcaccaacatctgatcactcaaattgcattatggtagtggttgacaaattctataagtatagtcactttgttccgcttcgtcacccttttacaacattcggagtggctcatcacttcatggacaacatttttaaacttcatggattcctttcaagtataattactgatcgtgatcggattttcaccagtgcattgtggaaagaaatgttcaagattgcaggtgtggaattacgcttcacaacagcatatcatccccagtctgacggtcaaacagaatgcgtcaatcaatgcctagaaacttacctccgctgttttgctcaagcgtgtcctactaggtggaagaaatgactttctctagctgagtattggtacaataccagctatcactcatctttgcaactcacaccatttgaagtcttgtatggctatcctcctagacacttgggagtggacttcagagcagcctgcgatgttccttctctgaaagcttgactcgacgaaaggaaagtagtagttcaattggtccagcagcagctagctcgtgcacagcttcgtcagaaaacacaagctaacaaacatcgtactgaaagaacctttcagataggggattgggtctatttaaaactacaaccgtatgtgcaggcatccttggttcacagagcaaatcacaaactggcattcaagttctttggtccttagcaagtcattgcaaagatcggctatgttgcctacaagttaaatcttccagactcttgtcacatccacccggttttccatgtatcactgctcaagaaagctgtcgactggagacgttcctcaactgctgatccaatggtcctcatggccagttgaactgacgacatgggaagatgagctcacaatcaagcaaaggtttccggatgccacggcttggggacaagccgaaattcaaggggaggagaatgtcacagtacctgaggacaacgtcaaggtggacaggctgactagaattcggaagcccaatagtaaagttagcgggtcggattggacccagtaattgtctcgtttttctttttgtggctgttctgggattgagtgaggtatttgaggtggggttcggagtctgtggaaaagtgacttggagaagaaggttggccggctgcgttcggaggagaggcggctcgccgtcgtataagaattccagatatttttcaataccctaaagaccttggtgagagaagatgagtgccgggagcggtgctcaacttatccacaaatcagcagtgatcttacattcacactctcgtaacctgctgctgctgcatggaatccaacgccaatgagaccagttttactttattttagtagagaatgctgtgacatcttttgttaaaactgtggtattagcttttgcgttgatataactatctcagcaagtttatctagataaataaaaaactttctctatctatcttcttcctgaataagttgtaaatttagtatatttattattgatacgacacatcattaacgaattaaaaaaactcgttttctaagatgatagcctcagtccatcgtcacttcacccacttggaattcgaggacaatctggctgcgccggaggagctggagagaagcagaagctgagcccaaaaaaaaaaaaaaaa

SEQ ID NO: 29434 - DNA, 2444 bp, Zea Mays
cccacctacacccctcgccagaggaccgtccccttgatgtcggacggccaacggattcacctcccacgccctccacgagcctgataaatcgtcggcgcaaattttttcggccgttcgttgcctcatcaacgtccaggcgttcagcgaagcatcctattcttttctgttctttctgcgacgcccacgaaggttccagactgtagaagcccccaaccccgcttggagctccatttgccccaccacggtgccagcaactccaccccctgcccccccgccggcagatcccccaccccgccaggagctctgcccaggcctaccacggtgccagcaactccaccaccccctccctcgccattggcggttcccccaccccgctaggagcaccgcccaggcggatgacttcaccttcgaagcccctgccacgcagccagtgtcaagattacccccacctacacccctcgccagaggaccgtccccttgatgtcggacggccaacggattcacctcccacgccctccacgagcctgataaatcaagaatttactagaatttctacacgcccatgaatgattttattgttgctactgaatgatgtaatagattgagtatactgttgtgtttgcagggatgctaaaggtcgcggcaagtggctctactgccactccactctgaggcggtgccagcgttgatgaccacctctcggcctactacttcttctccagcatgggtctagtccaagtcgcgatacggggtttggacattttgggctaggttgttcagcatgggtctagtgaatgaaggcatcgacatggaggagggaaacctggagataggcatagcaattcttttgcatgattattagttttattttattaatctatgctagatctcaaatacacgcaatccaatcttgaagatctggttaaaaaagtatgctgcttgtaccataaactgtgtgcgacgcaaatttcagtaagtgcaatttgttgatgtattgtgatggtagaccgaccttccttctgcagagtggaaccaaaggtatttgttgagttctttggcattgccatatagtagatttgaccgggaagcttgcaggtctactatatgtcctggttttcgtatctgcatgtcttcatgttcaaaatggtgattcggtttatatgagagtattgtcttagtgctagtgtggataacatcaagatggtgtaccatgtacggtgatgactttgctgaacttagtactttcaaatgtgtgacaaggaaggaaagtagcaagctgaaaaggaagaaccaagataaaatgtttgatgcatatatcctgcatgggtctgcaatacaatctacaacacactagattatatgtgaaggggagaaaggatcaaccgtcatcgtctccgtcggcaacatcggccctgttgacagcccgcgctctgtgtgccctcctccccacgtgtttgatggcctctgttttctcttctccctcgcactgcagagcttagtggcgtggtccaacaacttactacataatggcgatcagcaccggcaaagcttaagtgtgaagtgagacataacatgcaacatctgattagaattttcatatttagatatactcacgaatcactaagacagattatatgcttgtggtccctttttcagaaacataaatgttccctgtaaggaatgtccacagcatagcacaatataaattgttgaaggaaaaatactaggcaaaacatcccccacatagttaatacctcataaatcttctgattttaggttgccatcccttgcattttaaaacaactgcttcacctcatcagaaataatatatgatgatcaatgatgacccaatttgatattagcaacacaactcaccctaattaccggaacaaacaagccatgatctgttttagtaaaagtatatgcgttgcaacttatatttatatttggatgataaacaacttagaaatagtatcaagattatatatatcatcatatcttgtatttgttcctgtaaaaaagaagcatcaatattatgttatatcaatacctttatatatatataatatctcttctttttatataggcatctttagtagaattgtataaaaaacgcgcgcagggcgcgcgttaagacactagtgcatatactatgcaataagccgagaactgtatctcagttgtgcgatggcaaaaaggggcatgcgcgggtgctgattgaggacggagaagagggaggagcgtaggcaggatggagtttcgactctagcagactagcacatgcatcttgaaatccattgttttcgttttcttctcacatacatgacaccgacagaattggccactgaaccaacaatatttaatggaccaacaatctaatctagcagactagcttatggtcctcccatactttcatatctatactactccctccgttctcaaat

SEQ ID NO: 29435 - DNA, 2681 bp, Zea Mays
cacctacacccctcgccagaggaccgtccccttgatgtcggacggccaacggattcacctcccacgccctccacgagcctgataaatcgtcggcgcaaattttttcggccgttcgttgcctcatcaacgtccaggcgttcagcgaagcatcctattcttttctgttctttctgcgacgcccacgaaggttccagactgtagaagcccccaaccccgcttggagctccatttgccccaccacggtgccagcaactccaccccctgcccccccgccggcagatcccccaccccgccaggagctctgcccaggcctaccacggtgccagcaactccaccaccccctccctcgccattggcggttcccccaccccgctaggagcaccgcccaggcggatgacttcaccttcgaagcccctgccacgcagccagtgtcaagattacccccacctacacccctcgccagaggaccgtccccttgatgtcggacggccaacggattcacctcccacgccctccacgagcctgataaatcaagaatttactagaatttctacacgcccatgaatgattttattgttgctactgaatgatgtaatagattgagtatactgttgtgtttgcagggatgctaaaggtcgcggcaagtggctctactgccactccactctgaggcggtgccagcgttgatgaccacctctcggcctactacttcttctccagcatgggtctagtccaagtcgcgatacggggtttggacattttgggctaggttgttcagcatgggtctagtgaatgaaggcatcgacatggaggagggaaacctggagataggcatagcaattcttttgcatgattattagttttattttattaatctatgctagatctcaaatacacgcaatccaatcttgaagatctggttaaaaaaagtggaaccaaaggtatttgttgagttctttggcattgccatatagtagatttgaccgggaagcttgcaggtctactatatgtcctggttttcgtatctgcatgtcttcatgttcaaaatggtgattcggtttatatgagagtattgtcttagtgctagtgtggataacatcaagatggtgtaccatgtacggtgatgactttgctgaacttagtactttcaaatgtgtgacaaggaaggaaagtagcaagctgaaaaggaagaaccaagataaaatgtttgatgcatatatcctgcatgggtctgcaatacaatctacaacacactagattatatgtgaaggtcagatttttatcatctcagatttgttggtttcaatattttctagagtccctatgggtttccaacttcactaacgatggaattgattaaaatcctttctgagaaatgaatagccaataaagttctcatgggaagagggtaagcaatggccaatgttcagggattggatacatagttgcatttacatgtcaatgtcatcttcacatagtagatagaattgtacacattttttcagtaatattggcactgtagacatggtctgtatttaacgtttttgctgacttcttagtgatttgctgaaataatgacgcataactatgcttatatcgagaaggggagaaaggatcaaccgtcatcgtctccgtcggcaacatcggccctgttgacagcccgcgctctgtgtgccctcctccccacgtgtttgatggcctctgttttctcttctccctcgcactgcagagcttagtggcgtggtccaacaacttactacataatggcgatcagcaccggcaaagcttaagtgtgaagtgagacataacatgcaacatctgattagaattttcatatttagatatactcacgaatcactaagacagattatatgcttgtggtccctttttcagaaacataaatgttccctgtaaggaatgtccacagcatagcacaatataaattgttgaaggaaaaatactaggcaaaacatcccccacatagttaatacctcataaatcttctgattttaggttgccatcccttgcattttaaaacaactgcttcacctcatcagaaataatatatgatgatcaatgatgacccaatttgatattagcaacacaactcaccctaattaccggaacaaacaagccatgatctgttttagtaaaagtatatgcgttgcaacttatatttatatttggatgataaacaacttagaaatagtatcaagattatatatatcatcatatcttgtatttgttcctgtaaaaaagaagcatcaatattatgttatatcaatacctttatatatatataatatctcttctttttatataggcatctttagtagaattgtataaaaaacgcgcgcagggcgcgcgttaagacactagtgcatatactatgcaataagccgagaactgtatctcagttgtgcgatggcaaaaaggggcatgcgcgggtgctgattgaggacggagaagagggaggagcgtaggcaggatggagtttcgactctagcagactagcacatgcatcttgaaatccattgttttcgttttcttctcacatacatgacaccgacagaattggccactgaaccaacaatatttaatggaccaacaatctaatctagcagactagcttatggtcctcccatactttcatatctatactactccctccgttctcaaat

SEQ ID NO: 29436 - DNA, 2619 bp, Zea Mays
ctcgccagaggaccgtccccttgatgtcggacggccaacggattcacctcccacgccctccacgagcctgataaatcgtcggcgcaaattttttcggccgttcgttgcctcatcaacgtccaggcgttcagcgaagcatcctattcttttctgttctttctgcgacgcccacgaaggttccagactgtagaagcccccaaccccgcttggagctccatttgccccaccacggtgccagcaactccaccccctgcccccccgccggcagatcccccaccccgccaggagctctgcccaggcctaccacggtgccagcaactccaccaccccctccctcgccattggcggttcccccaccccgctaggagcaccgcccaggcggatgacttcaccttcgaagcccctgccacgcagccagtgtcaagattacccccacctacacccctcgccagaggaccgtccccttgatgtcggacggccaacggattcacctcccacgccctccacgagcctgataaatcaagaatttactagaatttctacacgcccatgaatgattttattgttgctactgaatgatgtaatagattgagtatactgttgtgtttgcagggatgctaaaggtcgcggcaagtggctctactgccactccactctgaggcggtgccagcgttgatgaccacctctcggcctactacttcttctccagcatgggtctagtccaagtcgcgatacggggtttggacattttgggctaggttccttcccaactctgtagtgtagcctctccgcggcatggtccagctctgctcctttcccttggttctgatggcgtggctggctgttgccctttgcaggttgttcagcatgggtctagtgaatgaaggcatcgacatggaggagggaaacctggagataggcatagcaattcttttgcatgattattagttttattttattaatctatgctagatctcaaatacacgcaatccaatcttgaagatctggttaaaaaagtatgctgcttgtaccataaactgtgtgcgacgcaaatttcagtaagtgcaatttgttgatgtattgtgatggtagaccgaccttccttctgcagagtggaaccaaaggtatttgttgagttctttggcattgccatatagtagatttgaccgggaagcttgcaggtctactatatgtcctggttttcgtatctgcatgtcttcatgttcaaaatggtgattcggtttatatgagagtattgtcttagtgctagtgtggataacatcaagatggtgtaccatgtacggtgatgactttgctgaacttagtactttcaaatgtgtgacaaggaaggaaagtagcaagctgaaaaggaagaaccaagataaaatgtttgatgcatatatcctgcatgggtctgcaatacaatctacaacacactagattatatgtgaagaaggggagaaaggatcaaccgtcatcgtctccgtcggcaacatcggccctgttgacagcccgcgctctgtgtgccctcctccccacgtgtttgatggcctctgttttctcttctccctcgcactgcagagcttagtggcgtggtccaacaacttactacataatggcgatcagcaccggcaaagcttaagtgtgaagtgagacataacatgcaacatctgattagaattttcatatttagatatactcacgaatcactaagacagattatatgcttgtggtccctttttcagaaacataaatgttccctgtaaggtaagcttagttgtttaatttcttaaattcaggtatcctttctatgtatgaataataaactaacaattactccataataactgcaggaatgtccacagcatagcacaatataaattgttgaaggaaaaatactaggcaaaacatcccccacatagttaatacctcataaatcttctgattttaggttgccatcccttgcattttaaaacaactgcttcacctcatcagaaataatatatgatgatcaatgatgacccaatttgatattagcaacacaactcaccctaattaccggaacaaacaagccatgatctgttttagtaaaagtatatgcgttgcaacttatatttatatttggatgataaacaacttagaaatagtatcaagattatatatatcatcatatcttgtatttgttcctgtaaaaaagaagcatcaatattatgttatatcaatacctttatatatatataatatctcttctttttatataggcatctttagtagaattgtataaaaaacgcgcgcagggcgcgcgttaagacactagtgcatatactatgcaataagccgagaactgtatctcagttgtgcgatggcaaaaaggggcatgcgcgggtgctgattgaggacggagaagagggaggagcgtaggcaggatggagtttcgactctagcagactagcacatgcatcttgaaatccattgttttcgttttcttctcacatacatgacaccgacagaattggccactgaaccaacaatatttaatggaccaacaatctaatctagcagactagcttatggtcctcccatactttcatatctatactactccctccgttctcaaat

SEQ ID NO: 29437 - DNA, 2688 bp, Zea Mays
acggccaacggattcacctcccacgccctccacgagcctgataaatcgtcggcgcaaattttttcggccgttcgttgcctcatcaacgtccaggcgttcagcgaagcatcctattcttttctgttctttctgcgacgcccacgaaggttccagactgtagaagcccccaaccccgcttggagctccatttgccccaccacggtgccagcaactccaccccctgcccccccgccggcagatcccccaccccgccaggagctctgcccaggcctaccacggtgccagcaactccaccaccccctccctcgccattggcggttcccccaccccgctaggagcaccgcccaggcggatgacttcaccttcgaagcccctgccacgcagccagtgtcaagattacccccacctacacccctcgccagaggaccgtccccttgatgtcggacggccaacggattcacctcccacgccctccacgagcctgataaatcaagaatttactagaatttctacacgcccatgaatgattttattgttgctactgaatgatgtaatagattgagtatactgttgtgtttgcagggatgctaaaggtcgcggcaagtggctctactgccactccactctgaggcggtgccagcgttgatgaccacctctcggcctactacttcttctccagcatgggtctagtccaagtcgcgatacggggttgttcagcatgggtctagtgaatgaaggcatcgacatggaggagggaaacctggagataggcatagcaattcttttgcatgattattagttttattttattaatctatgctagatctcaaatacacgcaatccaatcttgaagatctggttaaaaaagtatgctgcttgtaccataaactgtgtgcgacgcaaatttcagtaagtgcaatttgttgatgtattgtgatggtagaccgaccttccttctgcagagtggaaccaaaggtatttgttgagttctttggcattgccatatagtagatttgaccgggaagcttgcaggtctactatatgtcctggttttcgtatctgcatgtcttcatgttcaaaatggtgattcggtttatatgagagtattgtcttagtgctagtgtggataacatcaagatggtgtaccatgtacggtgatgactttgctgaacttagtactttcaaatgtgtgacaaggaaggaaagtagcaagctgaaaaggaagaaccaagataaaatgtttgatgcatatatcctgcatgggtctgcaatacaatctacaacacactagattatatgtgaagtgatttgctgaaataatgacgcataactatgcttatatcgagaaggggagaaaggatcaaccgtcatcgtctccgtcggcaacatcggccctgttgacagcccgcgctctgtgtgccctcctccccacgtgtttgatggcctctgttttctcttctccctcgcactgcaggtacctacactcttagacctgtgtcttcttggtgttagggttttcttctatcctcccgcttcgtgcactccccccacagacccacaccattcctactcattgacgagtaagacccatgtgttcccatcaccccgttcgaccgtcacccaaatacaaagattgttttactgttgcagagcttagtggcgtggtccaacaacttactacataatggcgatcagcaccggcaaagcttaagtgtgaagtgagacataacatgcaacatctgattagaattttcatatttagatatactcacgaatcactaagacagattatatgcttgtggtccctttttcagaaacataaatgttccctgtaaggtaagcttagttgtttaatttcttaaattcaggtatcctttctatgtatgaataataaactaacaattactccataataactgcaggaatgtccacagcatagcacaatataaattgttgaaggaaaaatactaggcaaaacatcccccacatagttaatacctcataaatcttctgattttaggttgccatcccttgcattttaaaacaactgcttcacctcatcagaaataatatatgatgatcaatgatgacccaatttgatattagcaacacaactcaccctaattaccggaacaaacaagccatgatctgttttagtaaaagtatatgcgttgcaacttatatttatatttggatgataaacaacttagaaatagtatcaagattatatatatcatcatatcttgtatttgttcctgtaaaaaagaagcatcaatattatgttatatcaatacctttatatatatataatatctcttctttttatataggcatctttagtagaattgtataaaaaacgcgcgcagggcgcgcgttaagacactagtgcatatactatgcaataagccgagaactgtatctcagttgtgcgatggcaaaaaggggcatgcgcgggtgctgattgaggacggagaagagggaggagcgtaggcaggatggagtttcgactctagcagactagcacatgcatcttgaaatccattgttttcgttttcttctcacatacatgacaccgacagaattggccactgaaccaacaatatttaatggaccaacaatctaatctagcagactagcttatggtcctcccatactttcatatctatactactccctccgttctcaaat

SEQ ID NO: 29438 - DNA, 469 bp, Zea Mays
tttgaactcatcaagtctctgttcaatcagtctaaaagagagtgggtgggatttctgggcccaatccatatatggcagaagatgttttcgtttaggttgcgaacacgcatctgcagagataaaaaaggagtgccatcaatgacagccacaaattggggcatgaagtgggacataactcctccaacaaggattaggcaggctatggagatgcaggctgaagtagaaaggagaaaatgcgctcaagtccttgaatcagaagggaagaaacaagcccaaatccttgaattagaagggaagaaaactgcccagatctttgaatctgaagctcaatcaggaggttcacagtgccaggacaatcaacatgaggcatcatctcagaagatagcttataataagcatggaaaaagcatggattcttatgttgaagtagtcgaggttgagtgagctctacgacataaagcaaaattgg

SEQ ID NO: 29439 - DNA, 1334 bp, Zea Mays
tttgaactcatcaagtctctgttcaatcagtctaaaagagagtgggtgggatttctgggcccaatccatatatggcagaagatgttttcgtttaggttgcgaacacgcatctgcagagataaaaaaggagtgccatcaatgacagccacaaattggggcatgaagtgggacataactcctccaacaaggattaggcaggctatggagatgcaggctgaagtagaaaggagaaaatgcgctcaagtccttgaatcagaagggaagaaacaagcccaaatccttgaattagaagggaagaaaactgcccagatctttgaatctgaagctcaatcaggaggttcacagtgccaggtcttcatttgagcaagctcatttcaatctgtgcaaggcacctaatcaggacaatcaacatgaggcatcatctcagaagatagcttataataagcatggaaaaagcatggattcttatgttgaagtagtcgaggttgagtgagctctacgacataaagcaaaattggaaaggcaccaacgcacagctgagcgagcggcgaaagcccttgctgaaaagaacatgcgggatatgctggtgcagagggagcatgctgagaaacatactggctgaatttcttgatcctgaagtcaagagatggtcaaatggaaaagaaggaaatctgtgagcattgctgtccacattgcaatatgaggagcataaggtgatcgaggcgcagatcaggatgtggcagcaggaggacgatgcagagatgatgaagaacaagcgaactgcaactttgggtgacgtagtagcatcagcacgagttgattcgtggaatacccatggtgcatcaataggagtcagtgctacgctgaaagaacttaagccgtatgggttcagtgtggggctgttcgaatgggtgatcaagaggggtagacaactttggtggcgcataagtgaccaagaactacataaagaatggggacaaatggaagaacttttgaagggcataaaccatttgaatgatgctgatcattttgctctcatgaatgaacggttattttccatcgttgaagcctttgtgaactttgttcataagttccattccctagccaccttgtgcaaagcttcaacttcgttcatatcagaaggcctgcatcaaaatgaccgcttcagagcgcattcaaaatacaaacaaaatccaagctatgtgcaagatcatgggaagcttcaatgttcccattctcgagcactagcaagtgtgaccttaacaatttcttccatttgccaacaacaagggtcttacattgagcaaggtgctcaaagtgcaaagggatcttga

SEQ ID NO: 29440 - DNA, 1282 bp, Zea Mays
aacgcgcttgaaacgtctgtggcggggtggtgttaggaacagctatccaccacgccgccgcagacgcttcaagtgcgttccacttttttcagacatggtcggcattctgcaagcatggtgaccgtgctgccgtggcggtggagctcccgtgccacgaccgcaccctactccgcgcacggtccccacccacagtccaccccgacgcgctcttgacattgctgcctcggctcaccctctctgaccccgagggatcccttgccaccgaagtcttcaccatttccagcgatcagctcgcctccctgaagcacctctgcggtggcgcgagcaccttttgcgcggtgagcgctctcctctggcagtgcgcgtgcgttgcgcgccgccttccaccggattctcaagtgcgcatgctgttccctgccgacctccggcgccggatgaggccgcccctcccgagccactacttcggcaacgcagtgttcaggctatgcgcaactggccgggcgggggatattggcacggtggcgttgggatccgtcgctgcccggatcaagggcgccatcgaccggatggatgacgagctggtgcgttccgccattgactactacgagtacgagacggccgaggtgaacaagagacggactccgacaggcaccctgccacagacggacctcaatattaccagctggttgggtaggtcacagtacgacgcggattttgggtggggaacgccgcaattcatgtcccgggcggactccgaccgcggcggattcgtgcacttgatcaacgatgagggtggtggcaccgccaccggcgacgtccgcgtgctcgtgaccgtgggggctgaaaatataaaggagctagggcggcttctttatgcgaaactctagctaggtgctgctagtggcattatccaaacttgaaatatcccaactcgtaactgatgtaccgaaacctgaattctcaaacactatttcagatcctaggtttgaaaaccaaaatttatacacaaattaactgaaattatatgttatttgtaatgtataatatatgctcttggggactggtgactttatgttaactcttcaacgccctaagttgtgatatctaatatattatgtttgcttgtgtggacttctattaggtctacttctagttcaataatttctgtttctactgtactagactgctagttttgttatatagctatgtaccatgcgatgtggcactgctagctagcagtatgaacttaatttgtaatgtgtgaaatgcatgtgaaatgagg

SEQ ID NO: 29441 - DNA, 1906 bp, Zea Mays
ctcataacctgttcttggctattttaagggccgctaatgatgaacacaaacagcggtttagagtgaatccgcaactccatactccaaccagcgctccttcctcggcgcgccttcagccatcgcacagctgagtactagtaacatccagtttgctggtcaatcaataaaccacttggtgtgctcgtgggaggaagaagatggaatccatagatttgaaggtgcaggtggtagagtcatcatttatagcgccgagcgagccgacgccaagcaagggcctctggctctcttccttggacatcctgctggtcaacataggccacaccccaacgatctacttgtacagctccaacgatgtagccgcggctgattttttcgacgtgggcagactcaaaaaggctatggccaaggctttggtgcccttctaccccctcgccggccgcctcggcaacaacagcgacaatggtaggacggagatcagctgcaacggcgaaggtgcactctttgttgtcgctcacgcggatggtgatctcactatcgatgacatcaagaaattgaagccatcgccagagttgaggaggctgtttattccactcatcgagccatcgtctatcataatggccatacaggtgacttccttgaagtgtggaggggtggtgttaggaacagctatccaccacgccgccgcagacgcttcaagtgcgttccacttttttcagacatggtcggcattctgcaagcatggtgaccgtgctgccgtggcggtggagctcccgtgccacgaccgcaccctactccgcgcacggtccccacccacagtccaccccgacgcgctcttgacattgctgcctcggctcaccctctctgaccccgagggatcccttgccaccgaagtcttcaccatttccagcgatcagctcgcctccctgaagcacctctgcggtggcgcgagcaccttttgcgcggtgagcgctctcctctggcagtgcgcgtgcgttgcgcgccgccttccaccggattctcaagtgcgcatgctgttccctgccgacctccggcgccggatgaggccgcccctcccgagccactacttcggcaacgcagtgttcaggctatgcgcaactggccgggcgggggatattggcacggtggcgttgggatccgtcgctgcccggatcaagggcgccatcgaccggatggatgacgagctggtgcgttccgccattgactactacgagtacgagacggccgaggtgaacaagagacggactccgacaggcaccctgccacagacggacctcaatattaccagctggttgggtaggtcacagtacgacgcggattttgggtggggaacgccgcaattcatgtcccgggcggactccgaccgcggcggattcgtgcacttgatcaacgatgagggtggtggcaccgccaccggcgacgtccgcgtgctcgtgaccgtgggggctgaaaatataaaggagctagggcggcttctttatgcgaaactctagctaggtgctgctagtggcattatccaaacttgaaatatcccaactcgtaactgatgtaccgaaacctgaattctcaaacactatttcagatcctaggtttgaaaaccaaaatttatacacaaattaactgaaattatatgttatttgtaatgtataatatatgctcttggggactggtgactttatgttaactcttcaacgccctaagttgtgatatctaatatattatgtttgcttgtgtggacttctattaggtctacttctagttcaataatttctgtttctactgtactagactgctagttttgttatatagctatgtaccatgcgatgtggcactgctagctagcagtatgaacttaatttgtaatgtgtgaaatgcatgtgaaatgagg

SEQ ID NO: 29442 - DNA, 1893 bp, Zea Mays
ggctattttaagggccgctaatgatgaacacaaacagcggtttagagtgaatccgcaactccatactccaaccagcgctccttcctcggcgcgccttcagccatcgcacagctgagcagtactagtaacatccagtttgctggtcaatcaataaaccacttggtgtgctcgtgggaggaagaagatggaatccatagatttgaaggtgcaggtggtagagtcatcatttatagcgccgagcgagccgacgccaagcaagggcctctggctctcttccttggacatcctgctggtcaacataggccacaccccaacgatctacttgtacagctccaacgatgtagccgcggctgattttttcgacgtgggcagactcaaaaaggctatggccaaggctttggtgcccttctaccccctcgccggccgcctcggcaacaacagcgacaatggtaggacggagatcagctgcaacggcgaaggtgcactctttgttgtcgctcacgcggatggtgatctcactatcgatgacatcaagaaattgaagccatcgccagagttgaggaggctgtttattccactcatcgagccatcgtctatcataatggccatacaggtgacttccttgaagtgtggaggggtggtgttaggaacagctatccaccacgccgccgcagacgcttcaagtgcgttccacttttttcagacatggtcggcattctgcaagcatggtgaccgtgctgccgtggcggtggagctcccgtgccacgaccgcaccctactccgcgcacggtccccacccacagtccaccccgacgcgctcttgacattgctgcctcggctcaccctctctgaccccgagggatcccttgccaccgaagtcttcaccatttccagcgatcagctcgcctccctgaagcacctctgcggtggcgcgagcaccttttgcgcggtgagcgctctcctctggcagtgcgcgtgcgttgcgcgccgccttccaccggattctcaagtgcgcatgctgttccctgccgacctccggcgccggatgaggccgcccctcccgagccactacttcggcaacgcagtgttcaggctatgcgcaactggccgggcgggggatattggcacggtggcgttgggatccgtcgctgcccggatcaagggcgccatcgaccggatggatgacgagctggtgcgttccgccattgactactacgagtacgagacggccgaggtgaacaagagacggactccgacaggcaccctgccacagacggacctcaatattaccagctggttgggtaggtcacagtacgacgcggattttgggtggggaacgccgcaattcatgtcccgggcggactccgaccgcggcggattcgtgcacttgatcaacgatgagggtggtggcaccgccaccggcgacgtccgcgtgctcgtgaccgtgggggctgaaaatataaaggagctagggcggcttctttatgcgaaactctagctaggtgctgctagtggcattatccaaacttgaaatatcccaactcgtaactgatgtaccgaaacctgaattctcaaacactatttcagatcctaggtttgaaaaccaaaatttatacacaaattaactgaaattatatgttatttgtaatgtataatatatgctcttggggactggtgactttatgttaactcttcaacgccctaagttgtgatatctaatatattatgtttgcttgtgtggacttctattaggtctacttctagttcaataatttctgtttctactgtactagactgctagttttgttatatagctatgtaccatgcgatgtggcactgctagctagcagtatgaacttaatttgtaatgtgtgaaatgcatgtgaaatgagg

SEQ ID NO: 29443 - DNA, 3158 bp, Zea Mays
gggtactgacataggttcattccttaaattacatttgtctaactccaaggatatgcggaactggaaatccaaatacacgtttggtttacgcatttagccgaaagaagagacctaagtgttaccatgtccaatcgggtatccggtatccaaatacacgtttgaaaagatggtcatctatattaggtattctaccacatcgtatctagaatgagtatcgattataggttacctgatggagatgctacaatgttatttagatatatataatgggtttaggtgccctgataggtactcagctggagtcaaccttacatcttctggaatgagcacctactcgaaacaatgatttcacttttcacatgggttgataacttgtaatcatcccttttttcaagtcatgcaatactatacgcaatgttttaatagtgggctgagcttcttagcagctatcatctgcaacatataagggtgcgtttggttcggttgtgaaaaagttgttgtaagctgtctattgtgaaaaatctactttgagttgcccgctatgcaaaactgaaaatcctttggttgaaactgttgtgaaaccgtagatttcacgtgatttgtctacaatgcccttgagagggctacatagattgtttatactcaaactggttgtagtacaatgttttttagaattgacataatttttcactattacaacattcaattaatatttcataaatatagatgagtaggaaacattcaatatttatgcaacaaaataactgaaaaatatattaacaagctatagaatgcctgatgtttatagttcgatgatggatcatgcatgtcttcaattcaggcactctttcttgttacttttaccttttctaggaggctagaagaacaactaagtcacatttgcacaaggaccattacaatcttatcaacacaggcgtatcaggccatttccatttgtaccagcaaagaaccacttattcaaatgcacacacaaaaatcgaatcaaatgagtaacaagttgcaaaaggaggcaaggcatcgccatcagcaatgcgcctttagttaagcgcgcgtcagaatcatccaggtggtgaagaacttgtagagcacggcgttgcctatcagccttgccgcatccttgagctcgtcgaggctgcacctagcatcttccacgagctatcgcgtcgctgaccaccacccttcccgacacggggactcgacaaattgccaccggaagaagtccttgactgccatggctgtcaccatgatggagcttagcgccagcaacacgtcgtgggtgtggtagatgaccgcctcttggaggcccatccattgcttccacaacatgacgtggtggggcggaggccgaggctcgtagcgcagttaacgaaaatatgtccggcgctgtacatggcgatggcttacaagttacaactgctaggcggcgagggaattgctcgtgagcgggttggcgatggtgagcgtgcacgtggtagaggacgagttttccgaatacaaccacgggcacgggcacgacgacccttgatgcggtgtggtagcggttccagttgtggttggggttggtgacgttgaaggcgatgggtggacaggggtcagagtcgactagaaggtagggaaccgttgtagggaggaagaaaagaaaaaaaataacgtttcactcttcacaaccaactagtatggtgcccatgcgttgcaacggaacacaaactatttgttaaatgcttattacctacgcatatctatgttcttgaagcgacgtggtatactggttacctcatttaaatcgttgaatttccagggcataagaacctacaaaatatcagtcattaggattgcaaagaagtgccctttataaatatcagtcataagaacctgcgtctcccgcccgagggtggcctcgggcgagccgttattgcgtctcccactcgaggttggcctcgggcgaggcgtgactgtgtctcccgcccaagggtggcctcggacgagccgtgactgcgtctatcgcccgaggttggcctcgggcaaggcgtgactgcgtcttttgcccgaggttggccttgggcgaggcgtgactacgtgaggttggccttgggtgaggtgtgactgcgtctcccgcctgagggtggcctcaggtgagccatgactgcgtctcccgcccgagggtggcctcgggcgagccgtgactgtttctcctgcatgaggttggcctcgggcgagccgtgactgcgcctcccggccggggttggcctcgggtgaggcgtgactacgtctccgtccgaggtgattgcttctcccgccagaggttggcctcgggcgaggcgtgacagcgtctcccacccgaggccaccctcgggcaagccgtgactacgtttcccgcccggggatggcctcgggcgaggcgtgactacctgtccttcccgaggatggcctcgggcgtgtcgtgactgtgtctcccgcctggggttggtctcgggcgagtgagcgagtcgtgactgcgtctcccgcccgaggatggccacgggcgagtcgtgactgcgtctcctgcccgaggatggcctgagcgagtcgtgactgcctctctcgcccgaggttggcctcgagcgagtcgtgactgcgtctcccgcccggggatggcctcaggcaagtcgtgactgcctgtcccgcccgaggcctcgggcgagtcgtgactgcctctctcgcatgaagttggcctcgagcaagtcgtgactgcgtctcccacccgaggatggccttgggcgagtcgtgactgcttgtcccacccgtggatggtatcgggcgagtcgtgacttcgtctcctgcccgggcttggcctcgggagtcgtgattgcgtctcccgcccgaggttagcctcgggcgagtcgtgactgtctgtcctgctcgaggatggcctcaagcgagtcatgactgcgtctcccgtctgaggttggcctcaggcgagtcgtgactacgtctcccgcccggggatggcctcgggtgagtcgtgactgcgtctcccgcccgggtttggcctcgggcgagtcgtgactgccgctcccgctcgaggttggtcgggcgagtcgcagcatcgtagtcgccgtcctcaactggcggcatgcgagtagcaaggccaagcggat

SEQ ID NO: 29444 - DNA, 845 bp, Zea Mays
attacatttgtctaactccaaggatatgcggaactggaaatccaaatacacgtttggtttacgcatttagccgaaagaagagacctaagtgttaccatgtccaatcgggtatccggtatccaaatacacgtttgaaaagatggtcatctatattaggactgaagataagatggctgccttgccattggccaccgcagaagcatgtgatgctaatgctgctttaattatgaatggtgatcttcgttctctccaacctatcttccgaatctatggaggccggcagatttttgctggccctgttgtgacactgaagatctttgaggataacgttctgctccgcgagttccttgaggagaaaggtcacggcagggtcctggtggttgatgccggtgggagcatgcgttgtgcagttttgggtggcaaccttgcccagctgatgcagaataatgggtgggctggaatcgttgtcaatggctgcatcagggacgtcgacgagataaatggctgcgacgttggtgtccgggctctgaactcacaccctatgaagtcaaacaagaagggcgtcggtgagaagcatgtccctgtgacctttgcagggacaagaatctgcgatggagaatggctctatgccgattccgatggcattctcatctcaagatcagaattgagtgtgtaggcctgttcttatgttatgtgtgaacttgtaataatgtatagctgaattacatgactagcgggaatactttggacgtttcgtcagtatcgtttgggagatatacatttgaaaatcattgcatcagtcatgtgaattgtgaataaactgggtatctcaccatatttctgtc

SEQ ID NO: 29445 - DNA, 1366 bp, Zea Mays
ggttcttaataaagtagtatagattgcaggtgggtgtaaatatcatgactcgtttgctcccacaactgcaaaaagcaggggtctacatgctgtgggatttctactgcgaaaaagtagatgtggtgagaaaagcgggttactgtaggagccctttggtttagcttgtgctgtgggaaaagaaaaaggttgcaatagcagaaccaaacatacttagttcttttccctgtagttttcactgcaaggcgagttttttttgccttgcacaaatacttagttctggtccaaaatcaaacactactgagacgttgcatcacactatgactctcctagagtgctattaacttctggttttgggctcaggcgaacatgtcattttgtgttgggctggatgttgttacagaacctaagcagttcaactccaaacagtgtctatgttgcatatagaattggagtgattttttttccagataagtattgaattttagctgtcttttcttctcctatagaggcagatatgattgtgttcctaagtttgaggcttgtttgctggttcatgttcttcatggaagattgaactctgcttggcatgatttttactaattgtgctgcgtggcagttgaggcctgcttgctggctcctgtttttctctttgccaagatttgatccctggcagttaggactgaagataagatggctgccttgccattggccaccgcagaagcatgtgatgctaatgctgctttaattatgaatggtgatcttcgttctctccaacctatcttccgaatctatggaggccggcagatttttgctggccctgttgtgacactgaagatctttgaggataacgttctgctccgcgagttccttgaggagaaaggtcacggcagggtcctggtggttgatgccggtgggagcatgcgttgtgcagttttgggtggcaaccttgcccagctgatgcagaataatgggtgggctggaatcgttgtcaatggctgcatcagggacgtcgacgagataaatggctgcgacgttggtgtccgggctctgaactcacaccctatgaagtcaaacaagaagggcgtcggtgagaagcatgtccctgtgacctttgcagggacaagaatctgcgatggagaatggctctatgccgattccgatggcattctcatctcaagatcagaattgagtgtgtaggcctgttcttatgttatgtgtgaacttgtaataatgtatagctgaattacatgactagcgggaatactttggacgtttcgtcagtatcgtttgggagatatacatttgaaaatcattgcatcagtcatgtgaattgtgaataaactgggtatctcaccatatttctgtc

SEQ ID NO: 29446 - DNA, 1159 bp, Zea Mays
ggcagccatcacgatggcgcttgcccacctccccttcgtcctcctcttggtgtcgtccgtcgccgccttcgccgcaggcgaccacggcctcacgcacatccacctgtacgtgcacgagacgtacaccggggcgaacgccacggccgccgccgtgctgcagtccccgctgggcgccaactcgtcgttcgggagcatgggcgtggtggacgacgagatacgcgtgggcccggaccggtcgtcgcagctcgtcggccggtaccagggcgtcttcttcggcacgagcgtgcagctgggcgccggctacctgtcgtccatcacgctggtgttcaccgccggcgagtacaacgggagcaccctgtccgtgcaggggcccctgctcgggttcactggcaccatcgagcgcgccgtggtcggcggcaccggcaagttcaggctggcgcgcgggtacatgcttttcaagatgataagcaagccgacgccggagacggacgtcaacgagatcaacctgttcgtgctcatgcaccccgctggcaagtactagcgcatacaccttgagacgagtgagtggctactggctactaccgcattgttgttgggcaggttggatgaagtgtctatgtccaatccaactctttcagatttgtttctcttggtgaaacccaataaatatgcaatttcttcgtcctatgagcaaaaatgtagaccattttcttggccttgacctgtttcttggccaatgacttgtttgggagtgagaataccgaagttaattggaggaattaatttttcttttgctatttaaaattaaatagctaggagattttagccactccagtcttccatccttgcttccaaacaagttcttttaaccttaggttagtttcgtagagctctttcagctctaaattctctgtcgaagttgattctttgtgaagagtgattttctgactgaattgattccggtactatttccggtccaagcccggcacctacctacacctagtctacggtggacaccacgaatcatagggctagtttggtggatcggataatgtaggtgatccactaaggaggaatcccttcatttccatgtacatcaaaccagcccttaagggtatgtacacagtggttcagttttttcagttttcaattacaagag

SEQ ID NO: 29447 - DNA, 1116 bp, Zea Mays
gtattatgcaactagctttggggttcttgatgtttgctgttggtgtaaactcaagcgccaaggatttgattgaaacaataaaaaagcccagatgctattgctgcgggctatatcggacagtttgtcaagctcgtcaccgtcgacgaccctttcatcaccacggactacatggtttcgggaggatcaacgggctcgtggccagggtcccctccagaaatgtggggaaaattgatgaggcatcagaactgaggagaactgtgagtgatatcaagcacaatgttcagacacagcttagcgagaatgctaagaccaataaacgagtgactgggattcgcaaagaattgcagaaactgcatagagaagctattcagaacaccatcaattcagtcaccatggtagcaaccctgattgcctccattgccttcgttgtcatattcaatttgccaggtcaatacttccaagatgtgaatagtgggggagacattgattgtgagtgaggcggtggtggtggagacgcgcaggacgggacggacgaagcatcttccaagtcggggcagagcgctgtcgaagcagccagcagcagaagctttcgctggagccgctggtggagtgcagagacgtgggaaccaggaagggtattgttgttgaccgattagttgggtttcaagatctcagaagtaaagacgattttctaacaagagcattggaacatattcttattctcaagacgaaagggataatcgatgagaagaagaaagatgacgaagatgacgatgaagaaagcgaggctaagaataggagggttaggtcctcaactgctcaagactgattcagactgaacctgagatgaggattgaggactcaccttttttgcactttggattttgtttgtttgttctgtgctgtgctgtactgtactataattgatttgtgtaaccatgtatcggtaccagacaccacaacaagaacatgtacaagagattctttagcatccattgtgtgtaaaagctagggtttgtggctgccttttatttcatttttcctcagctgtcataggatggtacaacacaacaagaacatgtacaagtatgtcatagcttgtctttcttgcttctt

SEQ ID NO: 29448 - DNA, 581 bp, Zea Mays
aaaagagaaaaggaggagtaagaaatggactgccccagccatggtttttaaagcggtaaggcggtccaaggcgttggaccaccgcctggacgcctaggcgaggtaggcgggcaaggcgcctaggcgttagaccaccgcccggacgcctaggcgtaggcgacgccttaagaacagaggccccagcccacaaggcagcccatgtgcccctcctggtgtggcgtcatcaagaaagcttttcatctctcaaactcccgatccttgaagtgctatctgattccacttctgcccagatacactgctctgctttccttattctgcacctctctagatgccctgttttgcttccctcctcccctctacttcctctccctcacttctcagcgctcttagatcgacaaccacagctgttcctcagggggaagatggcgcagccgcacagctcggcggcgggcgggcggcaacttctcccagcggtggaagaatgcgtcggcgcagataagctgcagcttcctgtacctctcccgctcactgcgccaggaggagaccgaacgcggtcgcgggacgggactgtgggaggcgcg

SEQ ID NO: 29449 - DNA, 1673 bp, Zea Mays
gcaaggcgcctaggcgttagaccaccgcccggacgcctaggcgtaggcgacgccttaagaacagaggccccagcccacaaggcagcccatgtgcccctcctggtgtggcgtcatcaagaaagcttttcatctctcaaactcccgatccttgaagtgctatctgattccacttctgcccagatacactgctctgctttccttattctgcacctctctagatgccctgttttgcttccctcctcccctctacttcctctccctcacttctcagcgctcttagatcgacaaccacagctgttcctcagggggaagatggcgcagccgcacagctcggcggcgggcgggcggcaacttctcccagcggtggaagaatgcgtcggcgcagataagctgcagcttcctgtacctctcccgctcactgatcacttaccacgagcgattgggcatgattcagacgccaaagggatgttttttggacacctaatctgtaaagcggatatcacacagatctaggacaaatcatctgctgtggtgtcgtgcatgcagcgctttggcgcttaagcaacaccaaagtgatgccttaataacatatgcacatggcaaagcttttgtttacttgaatgccgtcgaatgtgcttcctatctaactatgaaaagaaacatgccactgttcatatgatctaaattgagtacacgttgcaacatactagtatggtcactcaagggcaatagatcgaactatttttcagaactaggaacgaaacaaccaatttatatgttaatgggatcaatttcaataccacaaatgggaagagccatgtaattccagaaccactttgccgagctgcaattgttgtaggacctcccagtgatggaatccagaaaaatccttctgtcaatagccccttcatgtcataaaagacactcagcccaaaaaaacactcaatcaagcaagcttaaagcagttggactgaacttacctcatttgctacatttgaaagggcctggtaaagaccaatccatacaggaattgttgctaacgttggaaaacatcctgtcagataaagtatgaggtcatgattgtactgtcataaaagcacggtattgcatagcagggagtactatatcagaaaaaaaacaaatatcacacgaaaggattcctattcgggaatgaagcacaaaataaatagtcagtatggtttaggacggaaaaattcaagaaacctgctaaagggtttacaccagcttgcttgtataaccgagcagtctctagctgtatcctttcctaatatgaattatataaaagcaggaaatcaaaatacgcaaacaagtgaatttgaaaaaaggtaaggataaaataagcttgtaaggagcacggtcgatgataaaaaatgtccaacggctgtacaaacctggttgcctgcgtatctctgctggattgccttaatctgcggctgtaaattctgcattgccagagttgattccacctaaaatacatgagaagcacaacaatcaaaccatcgaatctgtaacaaggaaccagagacgggatacatttctccaaatagtttggaacattcacctgctttttggttagaggcaatgtcgcagccttaacaatgatagtgagcagaatgatggcaaacccgtaggagtatggcacatggactgca

SEQ ID NO: 29450 - DNA, 706 bp, Zea Mays
cccagcccacaaggcagcccatgtgcccctcctggtgtggcgtcatcaagaaagcttttcatctctcaaactcccgatccttgaagtgctatctgattccacttctgcccagatacactgctctgctttccttattctgcacctctctagatgccctgttttgcttccctcctcccctctacttcctctccctcacttctcagcgctcttagatcgacaaccacagctgttcctcagggggaagatggcgcagccgcacagctcggcggcgggcgggcggcaacttctcccagcggtggaagaatgcgtcggcgcagataagctgcagcttcctgtacctctcccgctcactggcactgatggaatcatatgggatgtgtttggttccttggtccagtctgagtctggctcagtgagaggaccagacttaagggagcccgcatgtacagagccaacaaataatgtttggttgtctgcttaaaatgaaccagacacatattatacattgtttggttctctttttttagcttggcccaattgagttgccgccagttttgatatgtaaaatgcagctcccgccaaattttaaaattttaagcgcaattaaacaaattacagcaaatttaaactaaaaatatgattttgacccataaaatgaactaattgcaatcatctaaatatgatgtacaataatctgaattaaaca

SEQ ID NO: 29451 - DNA, 528 bp, Zea Mays
caaacccatttggctatttcatccttgttaatccggtcgagctcccgaagaagggagaggccgccgacggcgaagtaggagagggtgaggtggttgacctcctgggaggcgtattcgtcggggagctccgtggccatggcctcgaagaacgccacgtggtgcaggcgctcgaaatcgcgcttccccatctccggcggtcggcagccgagagcccctggtcgccggcggcgtcagcgccgccgcggtgcgccacgatctgagaaagccacgcggacgcaaccaatcgcccagctatgcgctaaactgtttttttttttggccccacttcgcagagagcacttcagacgttgaacatgtaggtttggagaaactaagactgctgaattcggtgggaattttgcatgtcaatgcaggatacgagtatttgtctcggccgaagaatttcccaccccttcacacaagcttttgctgcgtgctgctcgccatggacacggtccacatcaggatgtcgagccacgtaaactcgag

SEQ ID NO: 29452 - DNA, 3777 bp, Zea Mays
aaaaaaaaactgttcaaccagaagaagttttcaactaccaacgcccgccacccggacatccagggaaagcccgccacggaccggaatttaacggaaacaccctctcctcgcatctgttctccctccctgcgtggatccaccgtttctttccattcccgtttccgttcctcggtcctcaccaacaaaccccttccggaactcccaagcctccgatcctcgcctcagaaacctgccggatttgcgggcctctcaggcgtcgtatggaaccagccagtgacatgtggagtcatgcaattgctccgtcagcgtgttctcccacctgtgaagctttgagcaatcgtactggcgtctttcactccctcactcttcttggctttgtttgattggagatagccagataggttgatgcgcatcatgatcttatttatgttcatttcttatttatgctggcacttgtgtttgctgttcttgctcatgttcatttcttatttatgctggcaataaatactggacacgagcttagcagtatatgttgcttagcacgtggctaatatttcccaaagtttgcctctccccattagaagcttcctcgctctccttatgtttgtactgagtttttttatttatttagaaacgcggcaagacaattgccgactgaaatgcactggagatgtttggccatggaacaagtacttaagtaaaaaacggcctgaaaatcacaatcttttttttcttcatctgggtggcgtatgactcactcctctataaccatcttatcgttgattagcattagaggcaataatctgattattgattagcaatggatactcgaactaacacggatagggaaatatatcttgtaatcagtctgtcttaataaatgcttacattgcagttggggtttgctgtcttcatgtttcccgaaagcagagtgttgtgtccgcatctttggttgattagtctagaaaaggtgggggggaggggggaagctttgttaagctggcttttattcgcacattagtcgattatggtaaaaattatattctatctttactttatgcgttttctcaggattagctcctcctttagcttactgaatttgtggacactttgtttggagaccatcttttcctgtattaagtttgttaggcgcagacactttttttttaacgcaatgcacatacacttttcgtgtatggtctggtggcaatgatttaaatggagcgggatagacattaggtttgttaatcagtggacagtctgttgctgttcatgacaggtgggaaagttgagcgaagctgaaaccgtgtcccttattttgcaagggtggtgctcataaggaaccacccccctcttctttgctggtgggagaacaccaaatggcccagctgttgcaccatcaggattctgcattctacagcaaggaattgcacgggtgccggtggggtattcttcaattctttgggtttcgccgtcgcctacggtccacaaagatgctctctgacaagagacatggtcaggagaaaaacagccgtggaagtagacgccgaagcagctcctatgctccattgaagaacgaagacagtgcaattctggatgatgaggaaaacactgaggtatatcaggttacaaaaaaacagaaggcctcaaaaaggaattctggcaagtctagtttgaggtccttgattctaacgaagttatatggaaaggaaggccagaaagagaagatgcttccggttgcaccaaagctactccgcactatttcgatacactatctggaaagcaatgaatacgttcttgacggcgaatccacttcgagcggcgatggttcttcaaacagtactaagccgccgatgcaaaatgctggcgatatgatgaatctgcaccatgctacatctagcgtcccagatggctgtggtgtcgattcaagctcctcacttctcctaaagatagacgacgtccgtacgaagcgaaagaagagccaccgtagcatttcgatggacgggattcttcacaaggtcccctatgggaagaaggtgtccggagatgtgatcagtgaaggtctcccccgatcagcctctgccacgtacgatagggacggcgcgaaaccttactttggtggtgctgctgcaaagaggcatgcaaaccaagggtttcggcgttcacgttccctcagtgaatcctgggaaaactactcgcgcctacttgattccatctcgagtggtgagtccaaaagaacactggccagctctaagtctaccagggatcattccctagatggccctgtcgcgagtacttcattgcaaagaacttctgaagccttgaggtctcaaggtctgggtaaacgtgatgagaacctcgtgactgcagaagatgcgttggcgccacatgttcaagagaaaactggtgaagttgctaagggtcagagctccagcgatacgatggtcgctggtggctctgaaaatcctgctttacctgacgagcacgttgacgacaaagctgaagaaaacacatgcgctgctccttcaccttcagaagctgtcggtatctcagaagaacaggcagtgagtcgtgacggtaacagtcagactccctcacctgaagttggcataccagaagaacattctgcagaagcttatgatgatggtgatggtcagatccactcgtcaacacaggctgctgatgcatatgctgctctgtcttcagaggagaccaccgtttcagaagaacgtactccagtttctcatggcaaccaaacgcacccgttccatacttcagagccaacagaaggtacgttgttggacttggacccaagagttgtccattcaaatgacgctgacgcttcaaccggcatcgctgccgtagaacaagaaagcggcttcgacggcctccaagtagacccaaggcacgagaccgagttccgctacgtgaaggagatattcagaaagtcgagcttcagcaccgagacgctgttcgacgaatggtgctcacagaacatcagtgtcctccaggaagcggattgccagcactacgaggccgccgcggcgtcgtacgacctgtcggcggacatgtcggccgagcagctgctcctgttcgacctgacgaacgaaggcctgctggacatctacaggaggcactccgtctccaggtctaggctctcctggttctcgtctttcgaccggccgagacctgtggggagccgtgcgctcggggagctgtggtctgggctgagcctccgtctggacggacggcggccacgggccagcgtccacgtcgacgcggttctgtcgagcgacctagcgaagagcgacccctggacggatttcccgcggggcgctgagcgtctggggagcaggctggcggactctgtgtttgacgagcttctgagtgagctcgttcagcagctcgcggagctttgagtgcgggcaacaaggcgtctgtttttttgtgcctatttttcgtgtttaggggggttctatattgtaggtactagttcatttcttttttaggacaagataatctggggattattgttgttgttattaggtcttaggaattcaattcgtgtgctggaaaagttttgcctgatgcactgatgggtgctagtgtaagtgctgactgaaagagcaacatttgtacgtacaccttcgagagagagagagaaaaaaaatgtatgtatatatagtcttggaaatgaaggttacgaaatagaaatttgtggagcaggcaaaggtgaaagtgaaacgcgaaaagaaacgattgaaagtgaaacgcgaa

SEQ ID NO: 29453 - DNA, 4269 bp, Zea Mays
gaagttttcaactaccaacgcccgccacccggacatccagggaaagcccgccacggaccggaatttaacggaaacaccctctcctcgcatctgttctccctccctgcgtggatccaccgtttctttccattcccgtttccgttcctcggtcctcaccaacaaaccccttccggaactcccaagcctccgatcctcgcctcagaaacctgccggatttgcgggcctctcaggcgtcgtatggaaccagccaggtcagttcgctgcgtgtttcgcgaccgcttctcggcggcggcggcggcgctgctttgcgttgcgcgtttaatctgttcgtgggaaggcgtcacccgttcgtgctggtttcatggaccaatacgagccgcggaaccgcgatcgctgatagctctggagtcgacttgtttgtttccattcgtgttcttcggaacgcgttttcacatgtgcttaatttggtttcgtactttggttttttttttctgttccgcgctgattttgttgggaaggaaacaagatgccctcgtttttttgttcggatcggtaagagatgccaccgttcgatgccatcttttgtatgcacttcaggatttagtgtttcattctgtctatgcttttttttcctttcgagttctgtgcccgacggggacattaagcagttacagtaagcactaaccaataaatctgtcacggaacctgttagagacgtggggctaaaaagtgatttgatttttttttacctttttcatggttccagtgacatgtggagtcatgcaattgctccgtcagcgtgttctcccacctgtgaagctttgagcaatcgtactggcgtctttcactccctcactcttcttggctttgtttgattggagatagccagataggttgatgcgcatcatgatcttatttatgttcatttcttatttatgctggcacttgtgtttgctgttcttgctcatgttcatttcttatttatgctggcaataaatactggacacgagcttagcagtatatgttgcttagcacgtggctaatatttcccaaagtttgcctctccccattagaagcttcctcgctctccttatgtttgtactgagtttttttatttatttagaaacgcggcaagacaattgccgactgaaatgcactggagatgtttggccatggaacaagtacttaagtaaaaaacggcctgaaaatcacaatcttttttttcttcatctgggtggcgtatgactcactcctctataaccatcttatcgttgattagcattagaggcaataatctgattattgattagcaatggatactcgaactaacacggatagggaaatatatcttgtaatcagtctgtcttaataaatgcttacattgcagttggggtttgctgtcttcatgtttcccgaaagcagagtgttgtgtccgcatctttggttgattagtctagaaaaggtgggggggaggggggaagctttgttaagctggcttttattcgcacattagtcgattatggtaaaaattatattctatctttactttatgcgttttctcaggattagctcctcctttagcttactgaatttgtggacactttgtttggagaccatcttttcctgtattaagtttgttaggcgcagacactttttttttaacgcaatgcacatacacttttcgtgtatggtctggtggcaatgatttaaatggagcgggatagacattaggtttgttaatcagtggacagtctgttgctgttcatgacaggtgggaaagttgagcgaagctgaaaccgtgtcccttattttgcaagggtggtgctcataaggaaccacccccctcttctttgctggtgggagaacaccaaatggcccagctgttgcaccatcaggattctgcattctacagcaaggaattgcacgggtgccggtggggtattcttcaattctttgggtttcgccgtcgcctacggtccacaaagatgctctctgacaagagacatggtcaggagaaaaacagccgtggaagtagacgccgaagcagctcctatgctccattgaagaacgaagacagtgcaattctggatgatgaggaaaacactgaggtatatcaggttacaaaaaaacagaaggcctcaaaaaggaattctggcaagtctagtttgaggtccttgattctaacgaagttatatggaaaggaaggccagaaagagaagatgcttccggttgcaccaaagctactccgcactatttcgatacactatctggaaagcaatgaatacgttcttgacggcgaatccacttcgagcggcgatggttcttcaaacagtactaagccgccgatgcaaaatgctggcgatatgatgaatctgcaccatgctacatctagcgtcccagatggctgtggtgtcgattcaagctcctcacttctcctaaagatagacgacgtccgtacgaagcgaaagaagagccaccgtagcatttcgatggacgggattcttcacaaggtcccctatgggaagaaggtgtccggagatgtgatcagtgaaggtctcccccgatcagcctctgccacgtacgatagggacggcgcgaaaccttactttggtggtgctgctgcaaagaggcatgcaaaccaagggtttcggcgttcacgttccctcagtgaatcctgggaaaactactcgcgcctacttgattccatctcgagtggtgagtccaaaagaacactggccagctctaagtctaccagggatcattccctagatggccctgtcgcgagtacttcattgcaaagaacttctgaagccttgaggtctcaaggtctgggtaaacgtgatgagaacctcgtgactgcagaagatgcgttggcgccacatgttcaagagaaaactggtgaagttgctaagggtcagagctccagcgatacgatggtcgctggtggctctgaaaatcctgctttacctgacgagcacgttgacgacaaagctgaagaaaacacatgcgctgctccttcaccttcagaagctgtcggtatctcagaagaacaggcagtgagtcgtgacggtaacagtcagactccctcacctgaagttggcataccagaagaacattctgcagaagcttatgatgatggtgatggtcagatccactcgtcaacacaggctgctgatgcatatgctgctctgtcttcagaggagaccaccgtttcagaagaacgtactccagtttctcatggcaaccaaacgcacccgttccatacttcagagccaacagaaggtacgttgttggacttggacccaagagttgtccattcaaatgacgctgacgcttcaaccggcatcgctgccgtagaacaagaaagcggcttcgacggcctccaagtagacccaaggcacgagaccgagttccgctacgtgaaggagatattcagaaagtcgagcttcagcaccgagacgctgttcgacgaatggtgctcacagaacatcagtgtcctccaggaagcggattgccagcactacgaggccgccgcggcgtcgtacgacctgtcggcggacatgtcggccgagcagctgctcctgttcgacctgacgaacgaaggcctgctggacatctacaggaggcactccgtctccaggtctaggctctcctggttctcgtctttcgaccggccgagacctgtggggagccgtgcgctcggggagctgtggtctgggctgagcctccgtctggacggacggcggccacgggccagcgtccacgtcgacgcggttctgtcgagcgacctagcgaagagcgacccctggacggatttcccgcggggcgctgagcgtctggggagcaggctggcggactctgtgtttgacgagcttctgagtgagctcgttcagcagctcgcggagctttgagtgcgggcaacaaggcgtctgtttttttgtgcctatttttcgtgtttaggggggttctatattgtaggtactagttcatttcttttttaggacaagataatctggggattattgttgttgttattaggtcttaggaattcaattcgtgtgctggaaaagttttgcctgatgcactgatgggtgctagtgtaagtgctgactgaaagagcaacatttgtacgtacaccttcgagagagagagagaaaaaaaatgtatgtatatatagtcttggaaatgaaggttacgaaatagaaatttgtggagcaggcaaaggtgaaagtgaaacgcgaaaagaaacgattgaaagtgaaacgcgaa

SEQ ID NO: 29454 - DNA, 2740 bp, Zea Mays
gaagttttcaactaccaacgcccgccacccggacatccagggaaagcccgccacggaccggaatttaacggaaacaccctctcctcgcatctgttctccctccctgcgtggatccaccgtttctttccattcccgtttccgttcctcggtcctcaccaacaaaccccttccggaactcccaagcctccgatcctcgcctcagaaacctgccggatttgcgggcctctcaggcgtcgtatggaaccagccaggtgggaaagttgagcgaagctgaaaccgtgtcccttattttgcaagggtggtgctcataaggaaccacccccctcttctttgctggtgggagaacaccaaatggcccagctgttgcaccatcaggattctgcattctacagcaaggaattgcacgggtgccggtggggtattcttcaattctttgggtttcgccgtcgcctacggtccacaaagatgctctctgacaagagacatggtcaggagaaaaacagccgtggaagtagacgccgaagcagctcctatgctccattgaagaacgaagacagtgcaattctggatgatgaggaaaacactgaggttacaaaaaaacagaaggcctcaaaaaggaattctggcaagtctagtttgaggtccttgattctaacgaagttatatggaaaggaaggccagaaagagaagatgcttccggttgcaccaaagctactccgcactatttcgatacactatctggaaagcaatgaatacgttcttgacggcgaatccacttcgagcggcgatggttcttcaaacagtactaagccgccgatgcaaaatgctggcgatatgatgaatctgcaccatgctacatctagcgtcccagatggctgtggtgtcgattcaagctcctcacttctcctaaagatagacgacgtccgtacgaagcgaaagaagagccaccgtagcatttcgatggacgggattcttcacaaggtcccctatgggaagaaggtgtccggagatgtgatcagtgaaggtctcccccgatcagcctctgccacgtacgatagggacggcgcgaaaccttactttggtggtgctgctgcaaagaggcatgcaaaccaagggtttcggcgttcacgttccctcagtgaatcctgggaaaactactcgcgcctacttgattccatctcgagtggtgagtccaaaagaacactggccagctctaagtctaccagggatcattccctagatggccctgtcgcgagtacttcattgcaaagaacttctgaagccttgaggtctcaaggtctgggtaaacgtgatgagaacctcgtgactgcagaagatgcgttggcgccacatgttcaagagaaaactggtgaagttgctaagggtcagagctccagcgatacgatggtcgctggtggctctgaaaatcctgctttacctgacgagcacgttgacgacaaagctgaagaaaacacatgcgctgctccttcaccttcagaagctgtcggtatctcagaagaacaggcagtgagtcgtgacggtaacagtcagactccctcacctgaagttggcataccagaagaacattctgcagaagcttatgatgatggtgatggtcagatccactcgtcaacacaggctgctgatgcatatgctgctctgtcttcagaggagaccaccgtttcagaagaacgtactccagtttctcatggcaaccaaacgcacccgttccatacttcagagccaacagaaggtacgttgttggacttggacccaagagttgtccattcaaatgacgctgacgcttcaaccggcatcgctgccgtagaacaagaaagcggcttcgacggcctccaagtagacccaaggcacgagaccgagttccgctacgtgaaggagatattcagaaagtcgagcttcagcaccgagacgctgttcgacgaatggtgctcacagaacatcagtgtcctccaggaagcggattgccagcactacgaggccgccgcggcgtcgtacgacctgtcggcggacatgtcggccgagcagctgctcctgttcgacctgacgaacgaaggcctgctggacatctacaggaggcactccgtctccaggtctaggctctcctggttctcgtctttcgaccggccgagacctgtggggagccgtgcgctcggggagctgtggtctgggctgagcctccgtctggacggacggcggccacgggccagcgtccacgtcgacgcggttctgtcgagcgacctagcgaagagcgacccctggacggatttcccgcggggcgctgagcgtctggggagcaggctggcggactctgtgtttgacgagcttctgagtgagctcgttcagcagctcgcggagctttgagtgcgggcaacaaggcgtctgtttttttgtgcctatttttcgtgtttaggggggttctatattgtaggtactagttcatttcttttttaggacaagataatctggggattattgttgttgttattaggtcttaggaattcaattcgtgtgctggaaaagttttgcctgatgcactgatgggtgctagtgtaagtgctgactgaaagagcaacatttgtacgtacaccttcgagagagagagagaaaaaaaatgtatgtatatatagtcttggaaatgaaggttacgaaatagaaatttgtggagcaggcaaaggtgaaagtgaaacgcgaaaagaaacgattgaaagtgaaacgcgaa

SEQ ID NO: 29455 - DNA, 2616 bp, Zea Mays
gagtcatgcaattgctccgtcagcgtgttctcccacctgtgaagctttgagcaatcgtactggcgtctttcactccctcactcttcttggctttgtttgattggagatagccagataggtgggaaagttgagcgaagctgaaaccgtgtcccttattttgcaagggtggtgctcataaggaaccacccccctcttctttgctggtgggagaacaccaaatggcccagctgttgcaccatcaggattctgcattctacagcaaggaattgcacgggtgccggtggggtattcttcaattctttgggtttcgccgtcgcctacggtccacaaagatgctctctgacaagagacatggtcaggagaaaaacagccgtggaagtagacgccgaagcagctcctatgctccattgaagaacgaagacagtgcaattctggatgatgaggaaaacactgaggtatatcaggttacaaaaaaacagaaggcctcaaaaaggaattctggcaagtctagtttgaggtccttgattctaacgaagttatatggaaaggaaggccagaaagagaagatgcttccggttgcaccaaagctactccgcactatttcgatacactatctggaaagcaatgaatacgttcttgacggcgaatccacttcgagcggcgatggttcttcaaacagtactaagccgccgatgcaaaatgctggcgatatgatgaatctgcaccatgctacatctagcgtcccagatggctgtggtgtcgattcaagctcctcacttctcctaaagatagacgacgtccgtacgaagcgaaagaagagccaccgtagcatttcgatggacgggattcttcacaaggtcccctatgggaagaaggtgtccggagatgtgatcagtgaaggtctcccccgatcagcctctgccacgtacgatagggacggcgcgaaaccttactttggtggtgctgctgcaaagaggcatgcaaaccaagggtttcggcgttcacgttccctcagtgaatcctgggaaaactactcgcgcctacttgattccatctcgagtggtgagtccaaaagaacactggccagctctaagtctaccagggatcattccctagatggccctgtcgcgagtacttcattgcaaagaacttctgaagccttgaggtctcaaggtctgggtaaacgtgatgagaacctcgtgactgcagaagatgcgttggcgccacatgttcaagagaaaactggtgaagttgctaagggtcagagctccagcgatacgatggtcgctggtggctctgaaaatcctgctttacctgacgagcacgttgacgacaaagctgaagaaaacacatgcgctgctccttcaccttcagaagctgtcggtatctcagaagaacaggcagtgagtcgtgacggtaacagtcagactccctcacctgaagttggcataccagaagaacattctgcagaagcttatgatgatggtgatggtcagatccactcgtcaacacaggctgctgatgcatatgctgctctgtcttcagaggagaccaccgtttcagaagaacgtactccagtttctcatggcaaccaaacgcacccgttccatacttcagagccaacagaaggtacgttgttggacttggacccaagagttgtccattcaaatgacgctgacgcttcaaccggcatcgctgccgtagaacaagaaagcggcttcgacggcctccaagtagacccaaggcacgagaccgagttccgctacgtgaaggagatattcagaaagtcgagcttcagcaccgagacgctgttcgacgaatggtgctcacagaacatcagtgtcctccaggaagcggattgccagcactacgaggccgccgcggcgtcgtacgacctgtcggcggacatgtcggccgagcagctgctcctgttcgacctgacgaacgaaggcctgctggacatctacaggaggcactccgtctccaggtctaggctctcctggttctcgtctttcgaccggccgagacctgtggggagccgtgcgctcggggagctgtggtctgggctgagcctccgtctggacggacggcggccacgggccagcgtccacgtcgacgcggttctgtcgagcgacctagcgaagagcgacccctggacggatttcccgcggggcgctgagcgtctggggagcaggctggcggactctgtgtttgacgagcttctgagtgagctcgttcagcagctcgcggagctttgagtgcgggcaacaaggcgtctgtttttttgtgcctatttttcgtgtttaggggggttctatattgtaggtactagttcatttcttttttaggacaagataatctggggattattgttgttgttattaggtcttaggaattcaattcgtgtgctggaaaagttttgcctgatgcactgatgggtgctagtgtaagtgctgactgaaagagcaacatttgtacgtacaccttcgagagagagagagaaaaaaaatgtatgtatatatagtcttggaaatgaaggttacgaaatagaaatttgtggagcaggcaaaggtgaaagtgaaacgcgaaaagaaacgattgaaagtgaaacgcgaa

SEQ ID NO: 29456 - DNA, 1568 bp, Zea Mays
ggagcacgaaagcggaaccgccgaggcggtggtgcgcatccacgatgcaactatgcaatgcaagcatgcaaacgcgcccgtcagtccgtcacccgtgtcgcgatgcgccggccgctgattcgccgccgccccctgttccccgctccactgctacagctcgtacattcgccgtccgaagctccgcaccccaatctaatcgacacctcaccgagatgggccgcaagttcttcgtcggtggcaactggaaatgcaggtcgttgtcagccctccttatgtcttccttcctgtggtcaagagccagctgcgccaagagttccatgttgctgctcagaactgctgggtgaagaagggaggtgctttcactggtgaagtcagtgctgagatgctcgtcaaccttggtgttccctgggtcattcttggacactctgaaaggagagctctgctgggagaatcaaatgaatttgttggagacaaggttgcgtatgccctgtctcagggactaaaggtcattgcatgtgttggtgagacccttgagcagagggaggctgggtctaccatggatgttgttgctgcacaaacaaaagcaattgctgagaagatcaaggactggagcaacgtagttgttgcctatgaaccagtttgggctattggaactggtaaagttgccaccccagctcaggctcaggaagtgcacgcctccctgagggattggctaaagaccaatgccagccctgaggttgctgaatctactaggatcatctacggaggctctgtaactgctgcgaactgcaaagagctagcagcacagcctgatgtcgatggttttcttgtcggtggagcttctttgaagcctgagttcatcgacatcatcaacgcggccaccgtgaagtccgcttaagatgctacgctgaagacgaacatactttttttttgctcaactgtgctatgtaagctagtagcttttgcgcaggagcagagactgttttgcctgcccccaacttctagcttgagcttgctaataatgtttacctctggacgtatcaataatggtgcttatgtatccccttttttttgtgccgaattacggtggatccgtcatctgaaccatgggtttggtgtatgtaattgcgtcacccgatgcctagggtgtgagactgaagtttttggacatttgggacaaggtagccttgtgcccttgtgccccacattggtcgaatgctgccaaaactgtaccggtcatctgtgctccgtacggattagcctgatctgcgaatgcaacttgtcagctaatcgttgcacggaggcagccagacaattattgtacgatatatattcgatctccccaggcataggggattgaatatctattcttgtttttacaaatgaaatacggatccaaacaatgtccaaaactattgtttacttctttttttttaaaattaaatacacatacgtacaagaatgggcgtggcttaattagtgggatgaaacctgtcgattcaagataagtcggcatgggtggtctcgtattcctagaactagcaaagtatagatataaaccaaaaaga

SEQ ID NO: 29457 - DNA, 1793 bp, Zea Mays
ggagcacgaaagcggaaccgccgaggcggtggtgcgcatccacgatgcaactatgcaatgcaagcatgcaaacgcgcccgtcagtccgtcacccgtgtcgcgatgcgccggccgctgattcgccgccgccccctgttccccgctccactgctacagctcgtacagtacaggacatttgtagctacagcctaatacggcgatactacccagttgattcccagctgcgtagaaatacgaaaagttatctataacatagtagttgatttcacgggtttaaatatatataaaaaagaaagtgatgaattgggatcacatgagaggccacaaacctcaccccacctatattatcccgtgccccttgtctttcttcctccacaagcagcgaaatccaatctagaagcacccctctccctctctctctcttcgccgtccgaagctccgcaccccaatctaatcgacacctcaccgagatgggccgcaagttcttcgtcggtggcaactggaaatgcaatggaaccacagatcaggtcgagaagattgtcaaaaccctgaatgaaggacaggttcccccttcagatgttgtggaggtcgttgtcagccctccttatgtcttccttcctgtggtcaagagccagctgcgccaagagttccatgttgctgctcagaactgctgggtgaagaagggaggtgctttcactggtgaagtcagtgctgagatgctcgtcaaccttggtgttccctgggtcattcttggacactctgaaaggagagctctgctgggagaatcaaatgaatttgttggagacaaggttgcgtatgccctgtctcagggactaaaggtcattgcatgtgttggtgagacccttgagcagagggaggctgggtctaccatggatgttgttgctgcacaaacaaaagcaattgctgagaagatcaaggactggagcaacgtagttgttgcctatgaaccagtttgggctattggaactggtaaagttgccaccccagctcaggctcaggaagtgcacgcctccctgagggattggctaaagaccaatgccagccctgaggttgctgaatctactaggatatcatcaacgcggccaccgtgaagtccgcttaagatgctacgctgaagacgaacatactttttttttgctcaactgtgctatgtaagctagtagcttttgcgcaggagcagagactgttttgcctgcccccaacttctagcttgagcttgctaataatgtttacctctggacgtatcaataatggtgcttatgtatccccttttttttgtgccgaattacggtggatccgtcatctgaaccatgggtttggtgtatgtaattgcgtcacccgatgcctagggtgtgagactgaagtttttggacatttgggacaaggtagccttgtgcccttgtgccccacattggtcgaatgctgccaaaactgtaccggtcatctgtgctccgtacggattagcctgatctgcgaatgcaacttgtcagctaatcgttgcacggaggcagccagacaattattgtacgatatatattcgatctccccaggcataggggattgaatatctattcttgtttttacaaatgaaatacggatccaaacaatgtccaaaactattgtttacttctttttttttaaaattaaatacacatacgtacaagaatgggcgtggcttaattagtgggatgaaacctgtcgattcaagataagtcggcatgggtggtctcgtattcctagaactagcaaagtatagatataaaccaaaaaga

SEQ ID NO: 29458 - DNA, 1791 bp, Zea Mays
ggagcacgaaagcggaaccgccgaggcggtggtgcgcatccacgatgcaactatgcaatgcaagcatgcaaacgcgcccgtcagtccgtcacccgtgtcgcgatgcgccggccgctgattcgccgccgccccctgttccccgctccactgctacagctcgtacagtacaggacatttgtagctacagcctaatacggcgatactacccagttgattcccagctgcgtagaaatacgaaaagttatctataacatagtagttgatttcacgggtttaaatatatataaaaaagaaagtgatgaattgggatcacatgagaggccacaaacctcaccccacctatattatcccgtgccccttgtctttcttcctccacaagcagcgaaatccaatctagaagcacccctctccctctctctctcttcgccgtccgaagctccgcaccccaatctaatcgacacctcaccgagatgggccgcaagttcttcgtcggtggcaactggaaatgcaatggaaccacagatcaggtcgagaagattgtcaaaaccctgaatgaaggacaggttcccccttcagatgttgtggaggtcgttgtcagccctccttatgtcttccttcctgtggtcaagagccagctgcgccaagagttccatgttgctgctcagaactgctgggtgaagaagggaggtgctttcactggtgaagtcagtgctgagatgctcgtcaaccttggtgttccctgggtcattcttggacactctgaaaggagagctctgctgggagaatcaaatgaatttgttggagacaaggttgcgtatgccctgtctcagggactaaaggtcattgcatgtgttggtgagacccttgagcagagggaggctgggtctaccatggatgttgttgctgcacaaacaaaagcaattgctgagaagatcaaggactggagcaacgtagttgttgcctatgaaccagtttgggctattggaactggtaaagttgccaccccagctcaggctcaggaagtgcacgcctccctgagggattggctaaagaccaatgccagccctgaggttgctgaatctactaggatcatcaacgcggccaccgtgaagtccgcttaagatgctacgctgaagacgaacatactttttttttgctcaactgtgctatgtaagctagtagcttttgcgcaggagcagagactgttttgcctgcccccaacttctagcttgagcttgctaataatgtttacctctggacgtatcaataatggtgcttatgtatccccttttttttgtgccgaattacggtggatccgtcatctgaaccatgggtttggtgtatgtaattgcgtcacccgatgcctagggtgtgagactgaagtttttggacatttgggacaaggtagccttgtgcccttgtgccccacattggtcgaatgctgccaaaactgtaccggtcatctgtgctccgtacggattagcctgatctgcgaatgcaacttgtcagctaatcgttgcacggaggcagccagacaattattgtacgatatatattcgatctccccaggcataggggattgaatatctattcttgtttttacaaatgaaatacggatccaaacaatgtccaaaactattgtttacttctttttttttaaaattaaatacacatacgtacaagaatgggcgtggcttaattagtgggatgaaacctgtcgattcaagataagtcggcatgggtggtctcgtattcctagaactagcaaagtatagatataaaccaaaaaga

SEQ ID NO: 29459 - DNA, 1902 bp, Zea Mays
ggagcacgaaagcggaaccgccgaggcggtggtgcgcatccacgatgcaactatgcaatgcaagcatgcaaacgcgcccgtcagtccgtcacccgtgtcgcgatgcgccggccgctgattcgccgccgccccctgttccccgctccactgctacagctcgtacagtacaggacatttgtagctacagcctaatacggcgatactacccagttgattcccagctgcgtagaaatacgaaaagttatctataacatagtagttgatttcacgggtttaaatatatataaaaaagaaagtgatgaattgggatcacatgagaggccacaaacctcaccccacctatattatcccgtgccccttgtctttcttcctccacaagcagcgaaatccaatctagaagcacccctctccctctctctctcttcgccgtccgaagctccgcaccccaatctaatcgacacctcaccgagatgggccgcaagttcttcgtcggtggcaactggaaatgcaatggaaccacagatcaggtcgagaagattgtcaaaaccctgaatgaaggacaggttcccccttcagatgttgtggaggtcgttgtcagccctccttatgtcttccttcctgtggtcaagagccagctgcgccaagagttccatgttgctgctcagaactgctgggtgaagaagggaggtgctttcactggtgaagtcagtgctgagatgctcgtcaaccttggtgttccctgggtcattcttggacactctgaaaggagagctctgctgggagaatcaaatgaatttgttggagacaaggttgcgtatgccctgtctcagggactaaaggtcattgcatgtgttggtgagacccttgagcagagggaggctgggtctaccatggatgttgttgctgcacaaacaaaagcaattgctgagaagatcaaggactggagcaacgtagttgttgcctatgaaccagtttgggctattggaactggtaaagttgccaccccagctcaggctcaggaagtgcacgcctccctgagggattggctaaagaccaatgccagccctgaggttgctgaatctactaggatcatctacggaggctctgtaactgctgcgaactgcaaagagctagcagcacagcctgatgtcgatggttttcttgtcggtggagcttctttgaagcctgagttcatcgacatcatcaacgcggccaccgtgaagtccgcttaagatgctacgctgaagacgaacatactttttttttgctcaactgtgctatgtaagctagtagcttttgcgcaggagcagagactgttttgcctgcccccaacttctagcttgagcttgctaataatgtttacctctggacgtatcaataatggtgcttatgtatccccttttttttgtgccgaattacggtggatccgtcatctgaaccatgggtttggtgtatgtaattgcgtcacccgatgcctagggtgtgagactgaagtttttggacatttgggacaaggtagccttgtgcccttgtgccccacattggtcgaatgctgccaaaactgtaccggtcatctgtgctccgtacggattagcctgatctgcgaatgcaacttgtcagctaatcgttgcacggaggcagccagacaattattgtacgatatatattcgatctccccaggcataggggattgaatatctattcttgtttttacaaatgaaatacggatccaaacaatgtccaaaactattgtttacttctttttttttaaaattaaatacacatacgtacaagaatgggcgtggcttaattagtgggatgaaacctgtcgattcaagataagtcggcatgggtggtctcgtattcctagaactagcaaagtatagatataaaccaaaaaga

SEQ ID NO: 29460 - DNA, 1644 bp, Zea Mays
ggagcacgaaagcggaaccgccgaggcggtggtgcgcatccacgatgcaactatgcaatgcaagcatgcaaacgcgcccgtcagtccgtcacccgtgtcgcgatgcgccggccgctgattcgccgccgccccctgttccccgctccactgctacagctcgtacattcgccgtccgaagctccgcaccccaatctaatcgacacctcaccgagatgggccgcaagttcttcgtcggtggcaactggaaatgcaatggaaccacagatcaggtcgagaagattgtcaaaaccctgaatgaaggacaggttcccccttcagatgttgtggaggtcgttgtcagccctccttatgtcttccttcctgtggtcaagagccagctgcgccaagagttccatgttgctgctcagaactgctgggtgaagaagggaggtgctttcactggtgaagtcagtgctgagatgctcgtcaaccttggtgttccctgggtcattcttggacactctgaaaggagagctctgctgggagaatcaaatgaatttgttggagacaaggttgcgtatgccctgtctcagggactaaaggtcattgcatgtgttggtgagacccttgagcagagggaggctgggtctaccatggatgttgttgctgcacaaacaaaagcaattgctgagaagatcaaggactggagcaacgtagttgttgcctatgaaccagtttgggctattggaactggtaaagttgccaccccagctcaggctcaggaagtgcacgcctccctgagggattggctaaagaccaatgccagccctgaggttgctgaatctactaggatcatctacggaggctctgtaactgctgcgaactgcaaagagctagcagcacagcctgatgtcgatggttttcttgtcggtggagcttctttgaagcctgagttcatcgacatcatcaacgcggccaccgtgaagtccgcttaagatgctacgctgaagacgaacatactttttttttgctcaactgtgctatgtaagctagtagcttttgcgcaggagcagagactgttttgcctgcccccaacttctagcttgagcttgctaataatgtttacctctggacgtatcaataatggtgcttatgtatccccttttttttgtgccgaattacggtggatccgtcatctgaaccatgggtttggtgtatgtaattgcgtcacccgatgcctagggtgtgagactgaagtttttggacatttgggacaaggtagccttgtgcccttgtgccccacattggtcgaatgctgccaaaactgtaccggtcatctgtgctccgtacggattagcctgatctgcgaatgcaacttgtcagctaatcgttgcacggaggcagccagacaattattgtacgatatatattcgatctccccaggcataggggattgaatatctattcttgtttttacaaatgaaatacggatccaaacaatgtccaaaactattgtttacttctttttttttaaaattaaatacacatacgtacaagaatgggcgtggcttaattagtgggatgaaacctgtcgattcaagataagtcggcatgggtggtctcgtattcctagaactagcaaagtatagatataaaccaaaaaga

SEQ ID NO: 29461 - DNA, 2432 bp, Zea Mays
gctatttccggtgcccgcacgggaagcgtaacgcgacaccgacgcgccctcgccaccccgtcacccgttgcgctgcctccctccctagtccctatctctctctgccgtctgccccgaaagaggcggcaacccctccgcgcggggttcttctctcggtgctctgacaggcggcgcggcagcgagacgtcgctctctctctcactccccgcatcctccttttcttacccgcgccggagagaccgatcgagaggccgagaccccccccccccccccccccccacaacactaaatgagctcgccgacgccattacgtcccgccggcggcggcagttactacccgctccaccggcggcgcgggcgaccgggcccaggcccgggcgcgggtttaagaaggccgcgggtgcgccggtgcaagatgaagctgatgtacttcctcatggacagggacgagcagcgcgagaagcggctggagctcgagttcgaggtgtcggagctggagacggtgctcgagaaggagcagcagctgggcagggtcctgcagtgctcgctccaggggcgcgtcgtgtgccattgctgcctctccgcgctggttcctaccaacgttaggggccttttagcggagctagcggtggtggaggacgagatattctacttggagaagaaggtggacgacctgcgcctgaggctgcgccgggagcagaagtggacggaccactgcatcctccaccaccagcagcagcagcagcagcacaaccgccagcaacggcactccgtgtccgtgtccaggagggagctccagctccaacaagcaggcgcccagcagctacccaggctaccgtgtccgggtccgggcagcgacgaggctcccgaacgcgagagcaaggcttccgtcggatccgcctccgccaaaggagatgagacagagcacgtcgtcggcaggaggagcagccactgccactcgtcgtcgtcgtcgtcggagaacccgtaccggccgacgcctcccgagcggaagacgtactgcatggcgagcagccccaacaggctctcggaggagctcgtcaggctgacggtgaccatcttccacaagctcaacaagacggcgacggcgacggcggcggacgcgggggagctggatctggagctggagccgagcggcggcggcgcgtcgtcgtccaagctcaacatctcgtgcatcggccccaggagcctcgtccccagggtctccgcgtccgtgaacggcgccgcggcggcgatgagcccgctcaagagccggagagcggcggccaagggcggcggcgcggagaccgggtctgccgccgggtgccagaggaggttcgtcgagttcaccagaggctccgtcgacgtcagccgcatctcactgtgcctcgtcgacatcaagaacctgagaggcctgatgcagaagctctgcgccgtcgaccccagccttatgacgaacaagcagaagctggcgttttggatcaacgtctacaacttctgcgtgatgcatgcgtttctccagcacggtttgcctccgtctccggagaagcttcttgcgctgctgaatcaggcttcggtgaacgtcggcggaacagtgctgaacgttgtgtcgatcgagcacctcatcctgaggcactctcctgacgccaagcaaggcattatgggcgacgacggacagacggatctgctgcactcgtacgggctagggtatcccgagcccaacgtcgtcttcgcgctgtgcagaggcagccgctcctcgccagcactgcgcgtgtacacggcggaggacgtgtcgaacgagctggagcgggccaaggtggagtacctggagtcttcggtgcgcgtcgccggcaggaagcagcgcgccgtcgtggtgcccaagctgctgcactggcacatgcgcgacttcgccgacgacgccgcgtcgctgctggagtgggtgcacagccagctgcccagggcgtcggggccgctccgccgggccatcagggaggtcctgggcgccaacatgggcagcggcagcagggcgcccacgccggcgccggcggccaagatgctggaggtcgagccgtacgacgccgacttctgctacctgctgcccgtctggtgagcgtcagcgaccgtccgtgtccatgtaagcaaggcattgctagctgcgcgccgcgcgggtcaagttctgctgtgaccattgctgcagtgcgaggtggtgacgatgtcgtgcatgtgaagcgtgaactacttccgccgtatgatagttttactacgtacatttttttgtgcgttgtgttgacgtgcagaagtatcaatcaataaggccttgttcatattctatatggattcgaaaaattgcgaagaattttgacttgctatgaattttaacacatccaattctgtccaatagatatagattgtggtcaaaacgaacattgccctaa

SEQ ID NO: 29462 - DNA, 1993 bp, Zea Mays
atgaagctgatgtacttcctcatggacagggacgagcagcgcgagaagcggctggagctcgagttcgaggtgtcggagctggagacggtgctcgagaaggagcagcagctgggcagggtcctgcagtgctcgctccaggggcgcgtcgtgtgccattgctgcctctccgcgctggttcctaccaacgttaggggccttttagcggagctagcggtggtggaggacgagatattctacttggagaagaaggtggacgacctgcgcctgaggctgcgccgggagcagaagtggacggaccactgcatcctccaccaccagcagcagcagcagcagcacaaccgccagcaacggcactccgtgtccgtgtccaggagggagctccagctccaacaagcaggcgcccagcagctacccaggctaccgtgtccgggtccgggcagcgacgaggctcccgaacgcgagagcaaggcttccgtcggatccgcctccgccaaaggagatgagacagagcacgtcgtcggcaggaggagcagccactgccactcgtcgtcgtcgtcgtcggagaacccgtaccggccgacgcctcccgagcggaagacgtactgcatggcgagcagccccaacaggctctcggaggagctcgtcaggctgacggtgaccatcttccacaagctcaacaagacggcgacggcgacggcggcggacgcgggggagctggatctggagctggagccgagcggcggcggcgcgtcgtcgtccaagctcaacatctcgtgcatcggccccaggagcctcgtccccagggtctccgcgtccgtgaacggcgccgcggcggcgatgagcccgctcaagagccggagagcggcggccaagggcggcggcgcggagaccgggtctgccgccgggtgccagaggaggttcgtcgagttcaccagaggctccgtcgacgtcagccgcatctcactgtgcctcgtcgacatcaagaacctgagaggcctgatgcagaagctctgcgccgtcgaccccagccttatgacgaacaagcagaagctggcgttttggatcaacgtctacaacttctgcgtgatgcatgcgtttctccagcacggtttgcctccgtctccggagaagcttcttgcgctgctgaatcaggcttcggtgaacgtcggcggaacagtgctgaacgttgtgtcgatcgagcacctcatcctgaggcactctcctgacgccaagcaaacggatctgctgcactcgtacgggctagggtatcccgagcccaacgtcgtcttcgcgctgtgcagaggcagccgctcctcgccagcactgcgcgtgtacacggcggaggacgtgtcgaacgagctggagcgggccaaggtggagtacctggagtcttcggtgcgcgtcgccggcaggaagcagcgcgccgtcgtggtgcccaagctgctgcactggcacatgcgcgacttcgccgacgacgccgcgtcgctgctggagtgggtgcacagccagctgcccagggcgtcggggccgctccgccgggccatcagggaggtcctgggcgccaacatgggcagcggcagcagggcgcccacgccggcgccggcggccaagatgctggaggtcgagccgtacgacgccgacttctgctacctgctgcccgtctggtgagcgtcagcgaccgtccgtgtccatgtaagcaaggcattgctagctgcgcgccgcgcgggtcaagttctgctgtgaccattgctgcagtgcgaggtggtgacgatgtcgtgcatgtgaagcgtgaactacttccgccgtatgatagttttactacgtacatttttttgtgcgttgtgttgacgtgcagaagtatcaatcaataaggccttgttcatattctatatggattcgaaaaattgcgaagaattttgacttgctatgaattttaacacatccaattctgtccaatagatatagattgtggtcaaaacgaacattgccctaa

SEQ ID NO: 29463 - DNA, 2431 bp, Zea Mays
aaaagagctcctggaatcccggtccgggacggggacgggctcccaaagcgggaccgtgctccagttcggcctttcgggggaaaaggaatcgtatctgctgaatccccgggctccggggatggatcttgacatggacggctacgtagacccctacgaggaggccgcggccgagggcgactccgacgaccctgacgaggacgactcggatgcggagagcgactacgaggagaagtcgttcggcctcctcaagtccggcaagcaccgggtgcgcaacccggacggcaccttccgctgccccttctgcctcggcaagaagaagcagggttacaagatcaaggacctcctccagcatgccgacggcatcggcgtctccagcaagcaccgacgtcacggccgcgaacgcgcgaaccaccgcgcctttgcacgctttgtccgcaccgatccgtcctttgcggaagacctcgtcggtataactggcattcaaggtgccattacaactacccctgctaatgagaactacagcgccaatggcaacgggaaggccaaggctaatgtagatactgctggttccagttctgtggcggcaaaagtgggtccgccacaggaggttgagaggtttgcttggccgtgggcttgtgttcttgcagctggggcaggctttaatgctgaggactttgttggtagagtagcattgttcagttcggttgaggttgtgcctttgtttgtcgatgagatggaagtcacagaaaccttcgcaattgtgaggtttaccaatgattggagtggattcaatgatgcacttacgatagagaactatttcagcgtcaataagcttggtaagaaggaatttcagatgagagatagtggtcttggttccgtggagggagatggcgaaggcgatgtcaaggtttatgggtgggttgcccgagctgaggactacgatgcaacgactgtggtaggaagattcttgagaaagcacactgtcctgcaaacaatagacgaggtttccaagactgaattagagaaatcaggggagatggtggcgatactggcatcccagatcgaggaaaagaaccgatacttgcaggatttggagacaaagaagaatgcgacagaactctccatctcaaggcttgaggaggacaacaggaaacttcatgaggcatacaatgaagaaatgcgcaatcttcatcgcagggctcgtgaaaatgcgctacggattttccaagagaatgaaaacttgaggattgacttagaaaataagaggagagaactgaacttacgagctaaggagcttgaaaaaatgtcagctgagaatgctaacgacaggaagacactcgatgatcagaagcagaagacaaagtatgataatagtgaacttgagctagctagcatagagcaacagagggctgatgcagatgttctgaagctattggctgaccaagagagggaaaaggaagatgtacttgctagaatgcttcagctggaaaaagagctgcatgagaagcaacagcttgagctcgaagtagaacggttgaatggtacactccaagtgatgaaacatctagagggagacgatgacgggggagatatccatgaaaagatggagaagctgagtgaaagatttgagcgggaaaagaagcgcctggaggatttgagtggtgatctggtgacaaaagagcgtgaaagtaatgatgagctacaacaagcccgaaaagaattgataaagggtttggaggaagagctaaatggacggacagctgttgggatcaaaagaatgggggaactcgatgaaaagcctttcctaaatgcatgtaagagaaaatatgggaacaatgaataccaggtcaaagcagcagagctggtcacaaattggcaggaggaactaaagaatccatcctggtatccttttaagatgattcatgttgacggagaggacaaggaaattctggttgacgatgatacgaaactgaagtttctgtggattgagtttggcgatgacgtgtgtaatgcggtgaagacggcattgatggagataaacgagtataacccaagtgggaggtatgttgtgcccgagctgtggaacttcaggaaaggcaggaaggcgacgatgaaggaggtgctcaagtacctgttcagtcagatggacacgacgaccaagcgcaggaggggctgagtaggtgcccttggccatgccgtgaagcccagtcgtgtgctgctcgatcccgtagtggcagtctgtcttgtactgtgtagtgacatctgacgtaataatgttcaggcttgggtatggtttgagctaacgagccatatagtgtgcttggctaggctcgtttacgagctctttagctcgcgagtcaggtgagaacagaaaaaacaatatgtatataataattaatttctagttaattttaaactaatttaacaatag

SEQ ID NO: 29464 - DNA, 1392 bp, Zea Mays
gaggcctcctcctagtcgaggacctgctggcgtctggcgaccagaccgaataactgagattagttggacgacttgaaaacagagtttttgagtgcttgaatttcttggctttacaaaatcgacaaagcaaattatttcggttggaagtcatttatcatggctcgtgaaaatgcgctacggattttccaagagaatgaaaacttgaggattgacttagaaaataagaggagagaactgaacttacgagctaaggagcttgaaaaaatgtcagctgagaatgctaacgacaggaagacactcgatgatcagaagcagaagacaaagtatgataatagtgaacttgagctagctagcatagagcaacagagggctgatgcagatgttctgaagctattggctgaccaagagagggaaaaggaagatgtacttgctagaatgcttcagctggaaaaagagctgcatgagaagcaacagcttgagctcgaagtagaacggttgaatggtacactccaagtgatgaaacatctagagggagacgatgacgggggagatatccatgaaaagatggagaagctgagtgaaagatttgagcgggaaaagaagcgcctggaggatttgagtggtgatctggtgacaaaagagcgtgaaagtaatgatgagctacaacaagcccgaaaagaattgataaagggtttggaggaagagctaaatggacggacagctgttgggatcaaaagaatgggggaactcgatgaaaagcctttcctaaatgcatgtaagagaaaatatgggaacaatgaataccaggtcaaagcagcagagctggtcacaaattggcaggaggaactaaagaatccatcctggtatccttttaagatgattcatgttgacggagaggacaaggaaattctggttgacgatgatacgaaactgaagtttctgtggattgagtttggcgatgacgtgtgtaatgcggtgaagacggcattgatggagataaacgagtataacccaagtgggaggtatgttgtgcccgagctgtggaacttcaggaaaggcaggaaggcgacgatgaaggaggtgctcaagtacctgttcagtcagatggacacgacgaccaagcgcaggaggggctgagtaggtgcccttggccatgccgtgaagcccagtcgtgtgctgctcgatcccgtagtggcagtctgtcttgtactgtgtagtgacatctgacgtaataatgttcaggcttgggtatggtttgagctaacgagccatatagtgtgcttggctaggctcgtttacgagctctttagctcgcgagtcaggtgagaacagaaaaaacaatatgtatataataattaatttctagttaattttaaactaatttaacaatag

SEQ ID NO: 29465 - DNA, 1201 bp, Zea Mays
cgtccctacattggagggctccaaggatgcggcacaaaaggctcgcctccctcccgaccaccaaacaatctccaagaatagcgggggggacggctataaatcggaaaatctgcccctcaagtttgccaactttaggataggccgtgcaaatccatttcttgccttgccggcacagctctgcatagctcctcccaagctttaggattaggatttggatttggatttggatttggatcgggtgtgtttcctgcgtaaccatgagcgagatcatgaagctaaagcgtgggatcagcaccaaaccaggagaccacctcgtccaaaatggccaacaacatccatgtcacgaatgggaggagcaacagcgctactggccctcgccgcgggcgccgccggcgagcccgacggagtcgcccaggaccccaggcgggagccagaagaaggcggttctgggcaaggtgaagagcaaggccaagaaatggatgcacatgctgcatcacaagaagaaacccgcgccaccggaggagatgatgtggacccccagggccgggcctggacccagcgcggcacaagacagcatgcccagcagggaggagcgacacgccgccgagcaccgtggcactggcactggcacccccaggaaaccgcagcaacacgcgccttcctgttcctcgagcgatccagagcgggcgtccgaggtgttcctggaagcgtcaccgaggcagaactcgccggtcccgagccccaccgcgcacaggcagcagcagcagccgcagccgtacttcaaggtcagcagcaggttcgagtcggagatgaaggaggccaacgagatgctgatggagtccaagaagctccgcgtcaacacgaccaagcccagacggtgctcgagatggtcgccaggatccaggaggcggtggcgctcgttgacggacggcggcacgtggtagagaggctcgtgtcgctcggcaggtacctggtgatgaagctggagcctgggcaggacgacacgttgctctcggaagcgatcactgacgccgtcctcgacctgttcgacgcgtggagcgagagcgtcgagaggcctttggtgcgacgggcgaaggagatctcttcttggttcctgcaggaaggaagagaagacacacctcctcctgttccgccgtctacgcgtccttgtgcggccgaagctcataggatgaaaaggtga

SEQ ID NO: 29466 - DNA, 1978 bp, Zea Mays
aataaataacatcttccaccactacaccccaccatgtcgaattgtgtccttaacaaaatatatcaaataactagagacgttggatataaaataagtaatgttaatttaatatatacaccatgtacactaaacttccatgtacactagatatccagatatgttcttaataaataaatgcctacccagctacccgcagacagagccgaccgacaacatcatggcgaggattccccaggttctggcgccgctcctcctcctgctgctccccgccggtctccgggagctgatgatcgaccgccggcccctgccggaaggcgctgccggcggcgaggtcctcctccacccgctggtgctggtgcccgggctgacgtgcagcgagctggacgcgcggctcacggacgcctaccgcccctccgcgccgcggtgcggcgccatgaaggggaagggctggttcggcctctgggccaactgctccgacctgcccgcgcaccactacgtgcggtgcttcatggagcagatggccctcgtctacgaccccgtcgcgaacgactaccggaacctgcccggcgtcgagacgcgcgtgcgcaatttcggctcctcccaaggattccagaagaacccagagcacacgacctggtcctggtgcttcgaggtcctcagaaacgagctggcaagggccgggtaccgcgacggcgacaccctgttcggggccccgtacgacctccgctacgccccgccggtgcccggccagccatcggaggtcttctccggctacttccgtcggctggcgagcctcgtcgaggacgcgagccgcaagaaccggggcaggaaggtgatcctcttcgggcacagcttcgggggcatggtggcgctggagttcgtccggagcactcccatggcgtggcgagacagtcagctcgctcgagctggcctttaggccgatgtggcggaccttcgagtcctccctcgtcaacttcccctccccggcggtgttcgggcgcaggccgctcgtggtcaccgcgcggaggaactactccgcctacgacctggaggacctcctcgtcgccgtcggctacggcgccggcgtggagcccttcaggagacgggcggtccccaagatgagctacttccaggcccccatggtgccgaccacgtgcatgaacggggtgggcaacgacacgccggagcagctcgtctactgggacggcgatttcgacgcgaccccggagattgtgtacggcgacggggacgattccatcaatttggtcagcatgctggcgttcgacgagaagatgcgccggcagccggaacagaacaaggtgtacaagtcgatcaagattcgtggggcccagcacggtactattgtgacagacgacacggcgctcaagcgggtcatgcacgaaattcttgaagcgaatcgtagttaataatacctttaagggctacttaaaggttagtttgggaactagggatttttattttcccagcaaaattagttcatttttttatagaaaaataaaaatctcttaatgttcccaaactagccctaaataacatttattaaattgaaaaaaatcctatcaagagttatggtatcttagttagcattgttacggtaaaatctatgtattaaattagtactattagatataagaggtgtttgaatgaactagagataatagttagttggctaaaaaatcattagcggaattatctagctaacaaatatctagttaaatattagctaatttgctaaaaatagataatagttaaattattatctagcctatttgaacgtattcaactaatattagcagctaactattatctctagtatattcaaacattatatactatatttattttgttttatagatattgttactcgatcttataaagttactaaaaaattaaatagtttaatttgtacatattgtaaaattgatttatttagacatggaaggagtatattaattat

SEQ ID NO: 29467 - DNA, 2495 bp, Zea Mays
caacgttatggacgagcactatggagttgggccgaaacccacccgggccagcccaccggcagtccggcacccagacacagccagcaaccaaccaacacaaaaacgaaattgaaaagacgataggccccacctgtaagtctccttaaggacacgacgcgtgcacgaccgacatccccgaacaaaatctcctccgccaccaaccctcggaattcgggccgcgctccactaatcctcgtatcggtcgctaatggcgtgctgatctggcaccgtcgcatacagcagggcgctctttattcgcctgtgtgagcttcagcgaagttaatcccattttccgtgcccgcgcccgtgccgtaccgtccctatcacaccggatcgccactcgctcccccccaccccactccgccccacctccgcgcctcagatccatccccaaccggcaaccctagcgccgggttcctcctcctcggatccgcccgccgccgcgcggactccattgccagaggtgatcgagggggagagatagagcttgggtggtcggattagggagagagggaggggaggatgtccagacggtcgttgaacccgagccggcgggtggcggacgggggtctgccgacagtcggaggcctgttccaccccaagtcacgctcgcctcccgtgcttactattgccctagtcgtcctgggtgtcattcttctcgtcgcctacttcaacagcggctcaggtgtaactgttacaagcagagagtctgtgaccaggtctgaaggtacaacttttttttctccctattgtctcgttttgggttgcaaatcacccgctgatgttatttctttagtcatccaaaattctgtattctcctttaaacttgctctttactgtgtcgttaaaattgcaggttcaaatattttttgttctcctgattacaaggttgcacttattgtagtttgcaattgagatgcttaattagttttacttcaatatattgtatccatggctatgtttttgttatcttagcattgttgagtagtgcagttaccccaaaatcttacagacacattctgtatgctaattcttaggagcaatatcctatggttacaatgcatttatattattctgcctccatttttactgcaatagtgtcctatttcctttgtaactgatttgatgtttggtattcttcagtaagatatgaaatatcttgcagtgcatccaatactagtaactggtgaccagcaatcaacctcatgataaatagcaaacactgaaacgaactctgctgtgccactatgatttggttccctgattcttggtaactcaaaacatatttatttttctccttattcccatatgatcaggaggaccagtagctaattttctacattaggtacatgattatttagtttctttagttatgttcacatttttctttcccaacatgttgatgggggaagttttgttctcttaatctcagactttccatctacatctgcatccaggttcttgcacatcagaagttatgcgggtgcttccatatcttaaaaaggcatatggaaatgccatgcaaaaggcaacccaggtcagcagaaagctaaggtctcagaactaccaaaatttggaagaccggcaaagttgcggagttcttcatggtggacacggtactttgtccagaccggcttgacagagaacgaagggccgctgaagaaattcgaagatgctacatccaagaacaaatacaaaccaggttgtcagatcttccacctaagttcgccaaggtgatgcgcatccatagcaccttgaattgttgtcacaccccctgccctcctccggttggcttgctcattgttcgtgtggaggaaatcgtcgcaaaaaaagccatcaggaataggttagcttatgtagagaggctccgacacttgttgctagaaattcactctggaaattaaattgtgtcccccaatgattgcaaactggagccccgctgggatatatatgtaagaactttcacgctgttgtaccgctgtgctatccatgtattgtcaggtgttcaccgagcagtttgaaatgtaaagctcttgatgatccaggaggcggggggctatatttgaccactagttgtagacatcgtaccatgtcattttcagcaagttggatgatgcttcaagccgacccgttcttttctgagacgcgagaaagatggtctaccaaattctgtatcaaagctcagtttaattataggccccaagtttcgaggtcgaagtctcgaacgcaagcttgcttcacctaacagacaaaggaaccgggggggtggcatgaacgcataacaaacatcaccagaatttgtcctaacgtcaggtaagttgtctacaacgtgcatcttttctgtggccctgcattcatttcttgaagcagaaggccattcgtggtggtggtgattggattggtcttcctctactcccacctccaggccagattctgaaacccggagcaggtgtagc

SEQ ID NO: 29468 - DNA, 2309 bp, Zea Mays
atctcctccgccaccaaccctcggaattcgggccgcgctccactaatcctcgtatcggtcgctaatggcgtgctgatctggcaccgtcgcatacagcagggcgctctttattcgcctgtgtgagcttcagcgaagttaatcccattttccgtgcccgcgcccgtgccgtaccgtccctatcacaccggatcgccactcgctcccccccaccccactccgccccacctccgcgcctcagatccatccccaaccggcaaccctagcgccgggttcctcctcctcggatccgcccgccgccgcgcggactccattgccagaggtgatcgagggggagagatagagcttgggtggtcggattagggagagagggaggggaggatgtccagacggtcgttgaacccgagccggcgggtggcggacgggggtctgccgacagtcggaggcctgttccaccccaagtcacgctcgcctcccgtgcttactattgccctagtcgtcctgggtgtcattcttctcgtcgcctacttcaacagcggctcaggtgtaactgttacaagcagagagtctgtgaccaggtctgaaggtacaacttttttttctccctattgtctcgttttgggttgcaaatcacccgctgatgttatttctttagtcatccaaaattctgtattctcctttaaacttgctctttactgtgtcgttaaaattgcaggttcaaatattttttgttctcctgattacaaggttgcacttattgtagtttgcaattgagatgcttaattagttttacttcaatatattgtatccatggctatgtttttgttatcttagcattgttgagtagtgcagttaccccaaaatcttacagacacattctgtatgctaattcttaggagcaatatcctatggttacaatgcatttatattattctgcctccatttttactgcaatagtgtcctatttcctttgtaactgatttgatgtttggtattcttcagtaagatatgaaatatcttgcagtgcatccaatactagtaactggtgaccagcaatcaacctcatgataaatagcaaacactgaaacgaactctgctgtgccactatgatttggttccctgattcttggttcttgcacatcagaagttatgcgggtgcttccatatcttaaaaaggcatatggaaatgccatgcaaaaggttctccatgtaggccctgatagttgtacagtagtttctaatttgttgaaagaaggaaaggttgaagcttggggagtggagccttatgatttggaagatactgacagtacttgcaaaagcctcgtgcgcaagggctttgtccatttagcaagggtttccacagatggccttgttatttttgctggcaacccaggtcagcagaaagctaaggtctcagaactaccaaaatttggaagaccggcaaagttgcggagttcttcatggtggacacggtactttgtccagaccggcttgacagagaacgaagggccgctgaagaaattcgaagatgctacatccaagaacaaatacaaaccaggttgtcagatcttccacctaagttcgccaaggtgatgcgcatccatagcaccttgaattgttgtcacaccccctgccctcctccggttggcttgctcattgttcgtgtggaggaaatcgtcgcaaaaaaagccatcaggaataggttagcttatgtagagaggctccgacacttgttgctagaaattcactctggaaattaaattgtgtcccccaatgattgcaaactggagccccgctgggatatatatgtaagaactttcacgctgttgtaccgctgtgctatccatgtattgtcaggtgttcaccgagcagtttgaaatgtaaagctcttgatgatccaggaggcggggggctatatttgaccactagttgtagacatcgtaccatgtcattttcagcaagttggatgatgcttcaagccgacccgttcttttctgagacgcgagaaagatggtctaccaaattctgtatcaaagctcagtttaattataggccccaagtttcgaggtcgaagtctcgaacgcaagcttgcttcacctaacagacaaaggaaccgggggggtggcatgaacgcataacaaacatcaccagaatttgtcctaacgtcaggtaagttgtctacaacgtgcatcttttctgtggccctgcattcatttcttgaagcagaaggccattcgtggtggtggtgattggattggtcttcctctactcccacctccaggccagattctgaaacccggagcaggtgtagc

SEQ ID NO: 29469 - DNA, 937 bp, Zea Mays
cgcttcttcttaaaagcatccccacgccttccaagagtcccgactccggacccctaaaaccctagtcgggcttcatacgccgccaccgcgccgcttcctccctcgccatggccctctttgctgccgcacgccgcgccgcggcctcctccgtgcccgttctcctccgtgcctccgcctcctcggggtcccaccgcagcgccgtcctgctccggcccctcgctgccgccgtggcgccgccgaagccccgcgcgatgccgttctcctcggcgcccgcgacgagacccagctccgacgccgagctactcagcgtcatcgactccgagatcaagtacgccgaggactgcgatgaccacgacagggttgaggagattccagaaaatttccctttcaaaatcagcgacgagaaggggacgaatgcagttacccttaaaagaacatatcagggtgagcagattgaggttgtggttcacatgcccagccttgtcactggagatgagcctgatcatgaccgtgatggtgaggatgaggacacggcgggagatgacaatgacgaagatgaaggccagaagcctgaacagtcaagcattcctctcacagtcactatatccaagggtgacggtcctgttcttgaattcacctgcactgcctatcctgacgaggtcatcatcgactccatgtctgtgacacaacaatcaggggatgatgaacgtgacatgattgcatatgagggtcctgatttcaatgaccttgatgagaacctgcagagggaattccacaggtacctggatctgcagcaaaaaaaaaaaaaaaaaaaagaagaggaagaaggtgaaagtcaatgattttataggttttattttcgtttgcaacaaatgcgtttgctgggatgtatgcgtcgactttacttcgtgtccaaaatctttttttaacatgccag

SEQ ID NO: 29470 - DNA, 1577 bp, Zea Mays
ggaagagagagaaggtgcagtcagtcagtcaggcagagaaacgtgcggaggtggaagccacaacgggagcgcctaccctcgcagtccgcccctcgacctcggagccgcagcccgcgaggagcgttcacaatcacaccggccaccgcggaccctagcgctttagccttatccgtccgagcgcgcgcccgatgcagacggaggcgcgcgtgggcgtcgtcgtcgacggcggcgccgccgtgggccggtgccaggagcagcgccacatcggcacggcggcgcacctcgccgccggaggcttcgcgggcgccgtcagcaagacgtgcaccgcccccctcgcgcggctcaccatcctcttccaggtagctggtatgcattcagatgttgcgactctaaggaagtgtagcatatggcatgaggcttcacgaatttttcgagaagaagggattgaagccttttggaaaggaaatctagtgacaattgtacatcgcttgccttattctgccatcagcttctattcgtatgagcgctacaaaaatataagcatttcagcttctccaaacggttcctggcctggatagagactcaaataatgttggtgttgtacgtttgcttggtggtggtttggcgggaataactgctgcatctttaacttacccgttggatgttgttcgtactcgcttggcgacgcagaaaaccactaggtattacaagggcatcttccatgcggtgtccacaatttgtagagacgagggtgtcaaaggattgtataaaggccttggggccacgttattgggagttggacctagtatagcaatcagcttttctgtctatgaatcactaaggtcttattggcaaatggaaaggccccatgattcaactgcagttgttagcttgttttctgggagtctatctggtattgcatcatctacagccacatttccccttgatcttgtaaagcgacggatgcaacttcaaggagcagctgggacagcgtccgtccagaaatcaaccatatctggaactgtccgtgatatcttgcagagagaaggtctccgtggcttctacagaggtatcgcccctgagtacctcaaggtcgttcctagtgttggaatcgccttcatgacatacgagacactgaagggcttgctctccagcattgacatagacgatgagagctgaggtttcccattatacgaagaggttaaacttcaccggattttttggccataggttaccatcagaatgtatgtaagtgcatcagagtggttacacgaacggcattgtggcagttttgtagttgacggtaggtcaaagcttacctgaggtgtacaactagtcttgtgttgtaccataggctaaacagagcaaataagcacttcatgatggagtcttcatcttgtgttcctttgtacattatgctccatcaaggaagagcaaaaaaaaaaaaaaaaaaaagaagaggaagaaggtgaaagtcaatgattttataggttttattttcgtttgcaacaaatgcgtttgctgggatgtatgcgtcgactttacttcgtgtccaaaatctttttttaacatgccag

SEQ ID NO: 29471 - DNA, 320 bp, Zea Mays
ctcgatgactattgaagtaaagaatacaaaacaattgtgttgttttagtttttttgaatgaataatgataatgaaatataatgcgcaccacaaagacattagagtcaacaggtacatgtttgaactaatcatagttgtccaactcggcagcgttaattatgacattgcgtgcgacatttgggccaaggccagtccacaaagctccaataccttcttggaaacatgaaagattttaaggacaacgaaaaaagaaatagtcttgtacacttactgcccatgatggttaaagtaacatgtctgattattatagcatatacatt

SEQ ID NO: 29472 - DNA, 508 bp, Zea Mays
ctcacttccaaatgggtcccgctcgccagcctcaccgcatgctccctcttccttgcccgctgtcgcttacgcgtgggccccagtcacctgcttcccttcctcctccgatcaccgcgaccactgctctgggttgttgagatcgagcggagtttccgctactggactctgcgaacccctcagcccgacgaataaataccgagccccgcacccctagccatcttcatgtcgggcgagcaccacgaatcgtgagctcgcacaaaagagggaccctgaccgccgccggccacatcctcgcggaaaggcatcactggagcctcgattggtagctctcgggaatcgctggaccatcacagatccattggtggagatcggtagcatagaggatcagtgagtgattgggaattcgtcgccagagtacatcatcgccgtggagccgcttcgtttcgtggtcaaggtctgctactgctctacagccgcgacgttacgagtcacttgaagaccaatttgg

SEQ ID NO: 29473 - DNA, 511 bp, Zea Mays
ctcacttccaaatgggtcccgctcgccagcctcaccgcatgctccctcttccttgcccgctgtcgcttacgcgtgggccccagtcacctgcttcccttcctcctccgatcaccgcgaccactgctctgggttgttgagatcgagcggagtttccgctactggactctgcgaacccctcagcccgacgaataaataccgagccccgcacccctagccatcttcatgtcgggcgagcaccacgaatcgtgagctcgcacaaaagagggaccctgaccgccgccggccacatcctcgcggaaaggcatcactggagcctcgattggtagctctcgggaatcgctggaccatcacagatccattggtggagatcggtagcatagaggatcagtgagtgattgggaattcgtcgccagagtacatcatcgccgtggagccgcttcgtttcgtggtcaaggtctgctactgctctacagccgcagcgacgttacgagtcacttgaagaccaatttgg

SEQ ID NO: 29474 - DNA, 2319 bp, Zea Mays
gccacggcccaatcgccggctgacactcacaagaacctgcctccctcggtctggatcgctatctcttttctagcggctccagagggagggaaagctagcgcacagccgagagaagaaagcagagagggagggagaacaaagagagagagaaaaaaaaaaccagagaggttgagcaagaaccgaggcggatccgccttttgtccctcctgcccgagggctagcctgccgccgcccccgcgagagatcgagaggaggcgctgttcagttcaggtgaaattttgccttgttctgggtggggtctctcgggctctctgtggtgtttggtggtgtaaattggagtgggatttagaggtagttaggtctcgtctgctaggataggtgcggtggtctcgttaatttgtgggctccggaggtcaatttgttcacgatcccggtcctgttcgcggttcagttcaggagcgagtgttcctgagcccaatctaattcgtccataaagtcgatcccttaggtcgaggacaataacctgtttgcagctggttccaggtttcacttgcaaaagatgcgccttgatatctcctccaatcccatgttcatcttatatgatttgatttctagcgacgacaagaatttgtgttcagagagagagagggggcgggggagagagagagaaatcctttaataattgttacagtgctctcggaatctttatcttgttctgagtgagatgcccaaaaaggcaaagggaaatctaacctttcttccagtcctgtgattccttcctacaggggggtgagaagccgtgggggaagagatgatgcgggagacgtacatggacgtgctgccgccggtggaccacatagccgcctcacggagcggcggctggttcccgggcgcggcgcgtctctggacggcggcggagaacaagcagttcgagcgggcgctggccgggctcgacctctgccgcccggactgggagaaggtggcgcgggccatcccgggccggacggtgcgcgaggtcgtcagccacttcaagagcctccaggtcgacgtccagcagatcgagagcggcctggtgcccatgccggtctacggcgccggggccggctcgttcaccctgcagtgggacggctgctacggccccgcggactcgaggcacaacggctaccgcttcggaagcggaggctgcgggaggcggcaccacggccgcaccccggagcaggaccggaagaagggcgtgccgtggacggaggaggagcacaggctgttcctcttaggcctgaagaaatacggcaagggggactggaggaacatatcgcgcaactacgtccagacgcggacgcccacgcaggtggccagccacgcgcagaagtacttcatcaggctcaactccggcggcaaggacaagaggaggtccagcatccacgacatcaccacggtgaacctgacggacgacgagcgggcgccctcgccgtcgcggtcctctctgatcaccaccaccagccagccaaacgcgccggctccggccgcagcggtgataggcgggcccttctcgtcggcggcggcggccgaggccaagcagcaccagcacggcgctgggaacctgccaccgaaccggacctccgtggtgccggctgtttacaggatggacgattcgcaggaccacggcctgcagtgtggccctctgcgtcatcaactggtcgccagccaccacagcgttctgttttaggcgcaagcgcaatcccactttgaggcgcgccatggtcatggatccatccatcaggtgttgtctagtgtgtgtgtgtacgatgcgtgtgttctttgctgtagcttcagcgcctgtatcgaagtgattagccttttggggagggggggcgtaacggaaaggggatcttcggttccacggtggtccaggtccacaatttgttgttggtgatgccgagaacgtaacaaaaaaaaggacgccaagaattctgagtggacttggcattcaatcatggaccctgcttttgctcgccgtggcccgggatgatcagcagaacctaattctggatccttcttggtcggctgatgtatcccttgagtgaccttggtgaccatctcatcctgctgctgtctctgaagacggcgacgcgcttgtattggagggtttcagagttcagatcacattgctgtagtgtagtctagacatgtttacccatagtacgtaatcagtttttttttttggcactggcggctgccgaaatctgtgtctggacaggcttcatttctctcggatgaagagaagataaaaaacgaaatcgagtttgcgatgagtcatgc

SEQ ID NO: 29475 - DNA, 2319 bp, Zea Mays
gccacggcccaatcgccggctgacactcacaagaacctgcctccctcggtctggatcgctatctcttttctagcggctccagagggagggaaagctagcgcacagccgagagaagaaagcagagagggagggagaacaaagagagagagaaaaaaaaaaccagagaggttgagcaagaaccgaggcggatccgccttttgtccctcctgcccgagggctagcctgccgccgcccccgcgagagatcgagaggaggcgctgttcagttcagtcctgtgattccttcctacaggggggtgagaagccgtgggggaagagatgatgcgggagacgtacatggacgtgctgccgccggtggaccacatagccgcctcacggagcggcggctggttcccgggcgcggcgcgtctctggacggcggcggagaacaagcagttcgagcgggcgctggccgggctcgacctctgccgcccggactgggagaaggtggcgcgggccatcccgggccggacggtgcgcgaggtcgtcagccacttcaagagcctccaggtcgacgtccagcagatcgagagcggcctggtgcccatgccggtctacggcgccggggccggctcgttcaccctgcagtgggacggctgctacggccccgcggactcgaggcacaacggctaccgcttcggaagcggaggctgcgggaggcggcaccacggccgcaccccggagcaggaccggaagaagggcgtgccgtggacggaggaggagcacaggctgttcctcttaggcctgaagaaatacggcaagggggactggaggaacatatcgcgcaactacgtccagacgcggacgcccacgcaggtggccagccacgcgcagaagtacttcatcaggctcaactccggcggcaaggacaagaggaggtccagcatccacgacatcaccacggtgaacctgacggacgacgagcgggcgccctcgccgtcgcggtcctctctgatcaccaccaccagccagccaaacgcgccggctccggccgcagcggtgataggcgggcccttctcgtcggcggcggcggccgaggccaagcagcaccagcacggcgctgggaacctgccaccgaaccggacctccgtggtgccggctgtttacaggatggacgattcgcaggaccacggcctgcagtgtggccctctgcgtcatcaactggtcgccagccaccacagcgttctgttttaggcgcaagcgcaatcccactttgaggcgcgccatggtcatggatccatccatcaggtcctatatgtggtgatgatgcgagagctccaccaaacgcctgtgtgagattggcgatgagtcagagttccactacctcctcggcgtctctatgcatcctattgcatcatctttcgcagctccctttttggccctgctgcttcccttgctcggaaaggcgtctgcggatccttgtgcgagcaccaaagggcgcttctctgtaggctgtagccaagccaagcccccaaaaaaaaatgcagccatcttcttctcttctgtgggtgggtgcccgtgctttttctggctcctcgctctgcaagttgcagcgaaatgcagaacacgaggcacccactgatgatgatggagatggagggcactgttccagagaaggaagcttctggtgcgggggtgtgtgtgtgttttctatctactgctgagcttgccgtcagggctgctgcagcaagatctgatgaaaagcctggaattcttcaggctagttgccattgccagtcccagtcccagtcaccttctcatctctgatgtctttcagtccacctgattcagctcagttcagtgaacaaccaccgagacgatgttttcatcatcattattgtcgtttcgtcgccgaagacgccgtgtggagtggaacatcccttggtttggtttggtggcgttgattcgactggaagggaatcgaactccgccaagatttttcttgtttttttccttttcataaacttgacgggtaagcttcggattgctttcagccgtcatactcttggctgcccaccatgaactgctcaagtcggttaacgctccaagttaaaatgtgaaagcgtcctcaggacatttgcacccaaacctgcaaaactgcagttccaaactgttcgttggcgacgaacagaagccagcaccggtgattccacacacgcaaagtcgtcccagcatatataggtgagaagtaggatcgatgttaagttttatctttttgggtcattagttacgctctatttggatcatttggactaacaggtacggagtagtaacttaaaaa

SEQ ID NO: 29476 - DNA, 1484 bp, Zea Mays
gttaacagcagcgaggaaggtccgttttgcccttggcgacttgagtcaagtccttgttgttcaggccgccgccgctcccagttctcccgtgaggctcttctctcgttcgtgtccccctgttctccccgccgaaccctagattcacagcaccaaggatgggttaagcgaggatggggaatcatggtggaggaccagggtccggattggcgggcgacatggcaccgatgaggtccgacgactggccttcatggcttccagatgggatggacccaaaaacaagcttcaatttagaattcaggatattcgctacaaaatcacgtttcccatggtttttgcacactgagcttgtagattctgacattatgaattacaaagatctgcttgatgaaatcatgaggaagtacccttgttcttacggggaggtggtgaaaatgtattattactgtgctgagtccaagtccaacattgaggtttgctgtgatgaagacctagttaatatgtttcagaaaaatgcatccactaagacatgtcatatttccattgctcactatgaccctagtactgaaccaccagccataccactatgggatgtaacatatgctaaggcagtggaaatcccttgcacatcatcaatgccagctccaactcaatctttagatgaaccaagccaacaaccagaggatgatgacaagtacctgcaaaaccctgaaccagaaaatgaatatgttggtgtcgatgaagaaggcatgtacattgacttaggaccacaggttcagggaaatgcagaccaagaggatgagtatattcctgagactgactctaacttggattctaactttgaatctgatggttctgatgatgagatggtggaggataatgttccaccccacacagccgaagcagtgtatgacaaagctgacccacctatggaagtgaagaagaacccacatctgcatgagtgccatagtacaaggagaaaaggtcaggtgaagggtgcaaccaaacattgggttgctgatacagtgagagattggttagtggacaatccaaggttgactccaaaggcccttcaacagaggataaaagatgagttcaaggtatgggtgcactacaagagggtttaccatgcaccaagaatggttttccctgatcttggcctcacacctccagttacaaagaagaaaaagagctcatccactacatcaaaggctgccaagaagaagaagagctcagccatgtctgttagatctggacaaggctccaaccagccagaccctatgcctttgtctatcatgatgccatcaatggaggttgcagacaaggaagagaatcaagaaacaaaaaaagaggtggcaggacatgggaagaaaaataagagagagccagaagtcatcggatctcctgcaatgggaactagaagcaaagccagttgcagtggcagtcctgccatgggaactagaagcaaaagaaagctcaatgtctaa

SEQ ID NO: 29477 - DNA, 2061 bp, Zea Mays
ctgcctatgtcacaccagaggttgcggtggaatcggtgcacccggccgcacgcggacgcttcttcaacgacgattcgggtgccccgcttgactcggacgacgacagctccgtccacggcggccacggatccgtgatgtcccatctcctggagcgcgaggccgacaccgccttccttccccactcggatcagcgggatggagttgaggcgtggttcatcctgcgccggtgcactcccgcctccttcaacgtcgcctccaccgaccccaacaacgaggtctcgagcgccgttaccgcggacgcgctcgctaaggccgcgcccgcgctcttcgcttcgagggcgcccagaccatcgctcaagtacctggagctgcttctcccggcagaaatcgacttcgaccacattgacctaccgactgctgccgccgcagggcacatcgtcgcccaggtcaccggcaacaacgcggtgtccgtggtggaggaccaactcaggtgcaccctcttgctcacgcgtaacttcctgtcaagccaccaccaggccgtcagcaaggagtgggacatggtcgccgtcgtgcacccagtgtgcaacctgggggaaaagtctattttggtactcaccatggattcgctgcatggcccaggagccatggcacaattcttgtcttcgatttttagcaataccttgtcctggaacaactcaatgtcgattgctgcttcatgctcaaccaacaccctttttgccaaggatgatggagattctatgaaccggtgtttcagttggtgttggaagcctccatggttacatccagctatttacatcaggaggagcaaggattgtcaatgcttcctcacttgcgtcggagctgaagagaatgccaaatgagaagttgcgaaacgatttgagcaacattgacatctgggacgaggaccggatacaagcagtactcaacacattcttggaagacctgaggagcggtcggctggaagaggctgggtggcccgtgatgctaccagcctacagcctgtcgaaaatggtcatcaatctgtacaccaggatcatagcaaggaggtatccggagatgcgcatcaactgtgtgcgacctggatttgtcacgacggacatcagctggaatctgggggtcctgacgcctaaacaaggtgcgagagggccagtcatgctagctctcctcccagatgatggaccaacgggttggtacagagatgaaatgggcgataagatgggcagcctattatttttcaaaatggtcaagtattcatcactagtcgagggattttgtggtgtgcagttttcatttcctaatattcaattgtgcaagtcttggtcacaggagttagccaccaacacagaaagccatttactaccagaaatgctagaagcggccaatggttatatttgtcatgagcttcatcttatgcttacctctattggagtgacacatatgatcgattgtgttaaatatttgataggggttatcgacttgctaactccatgggatcctggcatagtggtcttcaacctcaagttcctgatgctttggcttgagggcaagccaaatcttaagaaggggggaatgtcagtactgatgagatggaaaacagtgtggtggctgatggcgggtcgcgtccgcctcgtgtgcatcatctgagcgatcgtgtatatgggccggaccgaagaaagtgacctgttgggcgcctgcgtgcgcgagaatagctggacctggtttggcagcttgtaagcaagtagtacttatgcattgcctgatggaagggtcaggattatcgaaaacatgaacaactatttcctctctgcagaagatactccatccttcctgtgatcttccctacctcttctcctgtatcttcctccactcctgctgtgtatcttcctccactcctgctgttcggttagggattagtgagtattgctaacacatggcctgcgtgccgagcgcgagtgggggagggagcgcgagtgggaacgccggcgctgaaaggaagacgaagaaacgacgacggatgtgtgcattcgctggagctgtgaa

SEQ ID NO: 29478 - DNA, 2486 bp, Zea Mays
gcggacgcttcttcaacgacgattcgggtgccccgcttgactcggacgacgacagctccgtccacggcggccacggatccgtgatgtcccatctcctggagcgcgaggccgacaccgccttccttccccactcggatcagcgggatggagttgaggcgtggttcatcctgcgccggtgcactcccgcctccttcaacgtcgcctccaccgaccccaacaacgaggtctcgagcgccgttaccgcggacgcgctcgctaaggccgcgcccgcgctcttcgcttcgagggcgcccagaccatcgctcaagtacctggagctgcttctcccggcagaaatcgacttcgaccacattgacctaccgactgctgccgccgcagggcacatcgtcgcccaggtcaccggcaacaacgcggtgtccgtggtggaggaccaactcaggtgcaccctcttgctcacgcgtaacttcctgtcaagccaccaccaggccgtcagcaaggagtgggacatggtcgccgtcgtgcacccagtgtgcaacctgggggaaaagtctattttggtactcaccatggattcgctgcatggcccaggagccatggcacaattcttgtcttcgatttttagcaataccttgtcctggaacaactcaatgtcgattgctgcttcatgctcaaccaacaccctttttgccaaggatgatggagattctatgaaccggtgtttcagttggtgttggaagcctccatggttacatccaggtcagtcgaaattcagagatttcctctggtggtctttttggtatttccaatttgtcaggtccaagtattatgggtgcagagcatcacaattactaactccttggacaccacctatgacattatgtttggttggcgatgaccttcttgtgatgctagttattccaagtatgctactgttatctcggtgctattttagtggagtagaatgtgtgctggcagctgcagatccgttattttctacatttcatgctgagagagagttgttctggaagccaccttggcaacatctagttcctaacaccagatctgagatacagttgttgatggagtttgtctatctcaatacaggagtctgccgttctctgcacatgattaataaattttctaagcaatactttgttggcctatctttgctaattacaagggaaaaatttatgtctgggagaataatgttggctcttcttccacttctgaagctatttacatcaggaggagcaaggattgtcaatgcttcctcacttgcgtcggagctgaagagaatgccaaatgagaagttgcgaaacgatttgagcaacattgacatctgggacgaggaccggatacaagcagtactcaacacattcttggaagacctgaggagcggtcggctggaagaggctgggtggcccgtgatgctaccagcctacagcctgtcgaaaatggtcatcaatctgtacaccaggatcatagcaaggaggtatccggagatgcgcatcaactgtgtgcgacctggatttgtcacgacggacatcagctggaatctgggggtcctgacgcctaaacaaggtgcgagagggccagtcatgctagctctcctcccagatgatggaccaacgggttggtacagagatgaaatgggcgataagatgggcagcctattatttttcaaaatggtcaagtattcatcactagtcgagggattttgtggtgtgcagttttcatttcctaatattcaattgtgcaagtcttggtcacaggagttagccaccaacacagaaagccatttactaccagaaatgctagaagcggccaatggttatatttgtcatgagcttcatcttatgcttacctctattggagtgacacatatgatcgattgtgttaaatatttgataggggttatcgacttgctaactccatgggatcctggcatagtggtcttcaacctcaagttcctgatgctttggcttgagggcaagccaaatcttaagaaggggggaatgtcagtactgatgagatggaaaacagtgtggtggctgatggcgggtcgcgtccgcctcgtgtgcatcatctgagcgatcgtgtatatgggccggaccgaagaaagtgacctgttgggcgcctgcgtgcgcgagaatagctggacctggtttggcagcttgtaagcaagtagtacttatgcattgcctgatggaagggtcaggattatcgaaaacatgaacaactatttcctctctgcagaagatactccatccttcctgtgatcttccctacctcttctcctgtatcttcctccactcctgctgtgtatcttcctccactcctgctgttcggttagggattagtgagtattgctaacacatggcctgcgtgccgagcgcgagtgggggagggagcgcgagtgggaacgccggcgctgaaaggaagacgaagaaacgacgacggatgtgtgcattcgctggagctgtgaa

SEQ ID NO: 29479 - DNA, 2191 bp, Zea Mays
atcgtcaccgcagaaaagaatttctgtttcccttcaatgagatggagaatccgagaatgggataagaccgcgccgcgcgcgctctcctctccgccactctcaccgtcgcctgccccgccatgacttccttgctgttgccgccgccgcaggcggctgccgcagcgtacggatgctgccactgtctcctgctcgcttctaccaccgtgccggcgaggagtgggtgcgtgggacgcgccagcagaatcacgctcgcgctccgctgcctcccgattaccgggcacaggctgaggagtcgaaaggttgcgtgccaagcgacgactgagaccgagcccgagggcaatggcgacgaggaggataagaaagagtttggagatgatgcttcatcaccttcagtttataatgttgcagaagcaaatgggccgggagaaaatgactcgagtttagacaataagaaagatgaaaccacgaatgcagaagcagcactgctgagctccggcgacacggtccaggacatggatgcagatgctacttctaccaatggcatacaagaaaatgtggaagttattgaagttgctagtggatctccattgccaggaatgaagcaacagcttgatgattctgtcaggatccccaaggctacaatagacattctaaaggatcaggtttttggatttgacacattttttgtaacaagtcaggagccttacgagggtggagtattattcaagggaaatcttcgtggtaaaccagccaaaagttatgagaagatcacaagtcggctacagaacaaatttggtgatgaatataagctttttcttctcatcaacccagaggatgagaagccagttgctgtggttatacccaagcagacattacagcctgaaactacaggtgacaaaaatttatcagtaccttcggtggcgtcggtagtgctcagagtgcggtcccagaatggtttgctgctgctgcatttggattagttaccatcttcactctgctacttcgaaatgtacctgttctacaggagaacttgctatcaacatttgacaaccttgagttgttgaaagacggactatccggtgctctagtaactggccttataataggggtgcacgaaattggacatatccttgctgccagggaaagtggaatcaagctcggcgtgccatattttgttcctagctggcagataggatctttcggcgggattaccagaatcgtcaatatcgtccgcaaccgtgaggacctactgaagctagcggctgctggaccattggccgggttttccttgggattcgttcttctgctgctgggcttcgtcttgcctccaagtgatggccttggccttgtgatagatccaaccgtcttccatgaatcgttcctcgttggtggtctcgcgaaacttcttctcggagatgttttgaaagaagggacgcagttatccataaacccgcttgttctatgggcctgggccggtctcctgatcaacgctatcaacagcatacccgctggggagcttgacggcggccgcatagcgttggccatgtggggaagaaaggtatcgtcccggatcagcagcctcgccatcgggctgctcggggtcgcggctctcttcaacgacgtcgccttctactgggtggtgctgatcttcttcctgcagaggggccccattgctcctctctccgaggaaatcacagaccctgagaacagctacatcggcatcggtgctgccattttgctgtttgggcttctggtctgcctgccctacccgttcccctttgacccgtcgcagttaactgatatggatttcaacttctgagaaaaggaaaccaaaaaaaaagcagttacaactcaccggatgagatgtatttaacctgtcggctctgtattctgctgtgtcatcttttgctccattgctccttgtagtagccaataaaagcagagctttcttgtgtaagcttgcctgttgtattagtaggatgctcgatcagagtagaatatagatgttattttggctgtaactgttacctgtcagttgtggcttatcaacaataggttccttgtcagagtatgatctatcagattcatacgcgatacttagcgttttggataagaataagcagacctaggacattgtgcgattgttgtgccagagccattcaaactgatactgctactaccttatataaaa

SEQ ID NO: 29480 - DNA, 2141 bp, Zea Mays
atcgtcaccgcagaaaagaatttctgtttcccttcaatgagatggagaatccgagaatgggataagaccgcgccgcgcgcgctctcctctccgccactctcaccgtcgcctgccccgccatgacttccttgctgttgccgccgccgcaggcggctgccgcagcgtacggatgctgccactgtctcctgctcgcttctaccaccgtgccggcgaggagtgggtgcgtgggacgcgccagcagaatcacgctcgcgctccgctgcctcccgattaccgggcacaggctgaggagtcgaaaggttgcgtgccaagcgacgactgagaccgagcccgagggcaatggcgacgaggaggataagaaagagtttggagatgatgcttcatcaccttcagtttataatgttgcagaagcaaatgggccgggagaaaatgactcgagtttagacaataagaaagatgaaaccacgaatgcagaagcagcactgctgagctccggcgacacggtccaggacatggatgcagatgctacttctaccaatggcatacaagaaaatgtggaagttattgaagttgctagtggatctccattgccaggaatgaagcaacagcttgatgattctgtcaggatccccaaggctacaatagacattctaaaggatcaggtttttggatttgacacattttttgtaacaagtcaggagccttacgagggtggagtattattcaagggaaatcttcgtggtaaaccagccaaaagttatgagaagatcacaagtcggctacagaacaaatttggtgatgaatataagctttttcttctcatcaacccagaggatgagaagccagttgctgtggttatacccaagcagacattacagcctgaaactacagcggtcccagaatggtttgctgctgctgcatttggattagttaccatcttcactctgctacttcgaaatgtacctgttctacaggagaacttgctatcaacatttgacaaccttgagttgttgaaagacggactatccggtgctctagtaactggccttataataggggtgcacgaaattggacatatccttgctgccagggaaagtggaatcaagctcggcgtgccatattttgttcctagctggcagataggatctttcggcgggattaccagaatcgtcaatatcgtccgcaaccgtgaggacctactgaagctagcggctgctggaccattggccgggttttccttgggattcgttcttctgctgctgggcttcgtcttgcctccaagtgatggccttggccttgtgatagatccaaccgtcttccatgaatcgttcctcgttggtggtctcgcgaaacttcttctcggagatgttttgaaagaagggacgcagttatccataaacccgcttgttctatgggcctgggccggtctcctgatcaacgctatcaacagcatacccgctggggagcttgacggcggccgcatagcgttggccatgtggggaagaaaggtatcgtcccggatcagcagcctcgccatcgggctgctcggggtcgcggctctcttcaacgacgtcgccttctactgggtggtgctgatcttcttcctgcagaggggccccattgctcctctctccgaggaaatcacagaccctgagaacagctacatcggcatcggtgctgccattttgctgtttgggcttctggtctgcctgccctacccgttcccctttgacccgtcgcagttaactgatatggatttcaacttctgagaaaaggaaaccaaaaaaaaagcagttacaactcaccggatgagatgtatttaacctgtcggctctgtattctgctgtgtcatcttttgctccattgctccttgtagtagccaataaaagcagagctttcttgtgtaagcttgcctgttgtattagtaggatgctcgatcagagtagaatatagatgttattttggctgtaactgttacctgtcagttgtggcttatcaacaataggttccttgtcagagtatgatctatcagattcatacgcgatacttagcgttttggataagaataagcagacctaggacattgtgcgattgttgtgccagagccattcaaactgatactgctactaccttatataaaa

SEQ ID NO: 29481 - DNA, 2160 bp, Zea Mays
atcgtcaccgcagaaaagaatttctgtttcccttcaatgagatggagaatccgagaatgggataagaccgcgccgcgcgcgctctcctctccgccactctcaccgtcgcctgccccgccatgacttccttgctgttgccgccgccgcaggcggctgccgcagcgtacggatgctgccactgtctcctgctcgcttctaccaccgtgccggcgaggagtgggtgcgtgggacgcgccagcagaatcacgctcgcgctccgctgcctcccgattaccgggcacaggctgaggagtcgaaaggttgcgtgccaagcgacgactgagaccgagcccgagggcaatggcgacgaggaggataagaaagagtttggagatgatgcttcatcaccttcagtttataatgttgcagaagcaaatgggccgggagaaaatgactcgagtttagacaatctttcccatgactcgccagaagaaagatgaaaccacgaatgcagaagcagcactgctgagctccggcgacacggtccaggacatggatgcagatgctacttctaccaatggcatacaagaaaatgtggaagttattgaagttgctagtggatctccattgccaggaatgaagcaacagcttgatgattctgtcaggatccccaaggctacaatagacattctaaaggatcaggtttttggatttgacacattttttgtaacaagtcaggagccttacgagggtggagtattattcaagggaaatcttcgtggtaaaccagccaaaagttatgagaagatcacaagtcggctacagaacaaatttggtgatgaatataagctttttcttctcatcaacccagaggatgagaagccagttgctgtggttatacccaagcagacattacagcctgaaactacagcggtcccagaatggtttgctgctgctgcatttggattagttaccatcttcactctgctacttcgaaatgtacctgttctacaggagaacttgctatcaacatttgacaaccttgagttgttgaaagacggactatccggtgctctagtaactggccttataataggggtgcacgaaattggacatatccttgctgccagggaaagtggaatcaagctcggcgtgccatattttgttcctagctggcagataggatctttcggcgggattaccagaatcgtcaatatcgtccgcaaccgtgaggacctactgaagctagcggctgctggaccattggccgggttttccttgggattcgttcttctgctgctgggcttcgtcttgcctccaagtgatggccttggccttgtgatagatccaaccgtcttccatgaatcgttcctcgttggtggtctcgcgaaacttcttctcggagatgttttgaaagaagggacgcagttatccataaacccgcttgttctatgggcctgggccggtctcctgatcaacgctatcaacagcatacccgctggggagcttgacggcggccgcatagcgttggccatgtggggaagaaaggtatcgtcccggatcagcagcctcgccatcgggctgctcggggtcgcggctctcttcaacgacgtcgccttctactgggtggtgctgatcttcttcctgcagaggggccccattgctcctctctccgaggaaatcacagaccctgagaacagctacatcggcatcggtgctgccattttgctgtttgggcttctggtctgcctgccctacccgttcccctttgacccgtcgcagttaactgatatggatttcaacttctgagaaaaggaaaccaaaaaaaaagcagttacaactcaccggatgagatgtatttaacctgtcggctctgtattctgctgtgtcatcttttgctccattgctccttgtagtagccaataaaagcagagctttcttgtgtaagcttgcctgttgtattagtaggatgctcgatcagagtagaatatagatgttattttggctgtaactgttacctgtcagttgtggcttatcaacaataggttccttgtcagagtatgatctatcagattcatacgcgatacttagcgttttggataagaataagcagacctaggacattgtgcgattgttgtgccagagccattcaaactgatactgctactaccttatataaaa

SEQ ID NO: 29482 - DNA, 2210 bp, Zea Mays
atcgtcaccgcagaaaagaatttctgtttcccttcaatgagatggagaatccgagaatgggataagaccgcgccgcgcgcgctctcctctccgccactctcaccgtcgcctgccccgccatgacttccttgctgttgccgccgccgcaggcggctgccgcagcgtacggatgctgccactgtctcctgctcgcttctaccaccgtgccggcgaggagtgggtgcgtgggacgcgccagcagaatcacgctcgcgctccgctgcctcccgattaccgggcacaggctgaggagtcgaaaggttgcgtgccaagcgacgactgagaccgagcccgagggcaatggcgacgaggaggataagaaagagtttggagatgatgcttcatcaccttcagtttataatgttgcagaagcaaatgggccgggagaaaatgactcgagtttagacaatctttcccatgactcgccagaagaaagatgaaaccacgaatgcagaagcagcactgctgagctccggcgacacggtccaggacatggatgcagatgctacttctaccaatggcatacaagaaaatgtggaagttattgaagttgctagtggatctccattgccaggaatgaagcaacagcttgatgattctgtcaggatccccaaggctacaatagacattctaaaggatcaggtttttggatttgacacattttttgtaacaagtcaggagccttacgagggtggagtattattcaagggaaatcttcgtggtaaaccagccaaaagttatgagaagatcacaagtcggctacagaacaaatttggtgatgaatataagctttttcttctcatcaacccagaggatgagaagccagttgctgtggttatacccaagcagacattacagcctgaaactacaggtgacaaaaatttatcagtaccttcggtggcgtcggtagtgctcagagtgcggtcccagaatggtttgctgctgctgcatttggattagttaccatcttcactctgctacttcgaaatgtacctgttctacaggagaacttgctatcaacatttgacaaccttgagttgttgaaagacggactatccggtgctctagtaactggccttataataggggtgcacgaaattggacatatccttgctgccagggaaagtggaatcaagctcggcgtgccatattttgttcctagctggcagataggatctttcggcgggattaccagaatcgtcaatatcgtccgcaaccgtgaggacctactgaagctagcggctgctggaccattggccgggttttccttgggattcgttcttctgctgctgggcttcgtcttgcctccaagtgatggccttggccttgtgatagatccaaccgtcttccatgaatcgttcctcgttggtggtctcgcgaaacttcttctcggagatgttttgaaagaagggacgcagttatccataaacccgcttgttctatgggcctgggccggtctcctgatcaacgctatcaacagcatacccgctggggagcttgacggcggccgcatagcgttggccatgtggggaagaaaggtatcgtcccggatcagcagcctcgccatcgggctgctcggggtcgcggctctcttcaacgacgtcgccttctactgggtggtgctgatcttcttcctgcagaggggccccattgctcctctctccgaggaaatcacagaccctgagaacagctacatcggcatcggtgctgccattttgctgtttgggcttctggtctgcctgccctacccgttcccctttgacccgtcgcagttaactgatatggatttcaacttctgagaaaaggaaaccaaaaaaaaagcagttacaactcaccggatgagatgtatttaacctgtcggctctgtattctgctgtgtcatcttttgctccattgctccttgtagtagccaataaaagcagagctttcttgtgtaagcttgcctgttgtattagtaggatgctcgatcagagtagaatatagatgttattttggctgtaactgttacctgtcagttgtggcttatcaacaataggttccttgtcagagtatgatctatcagattcatacgcgatacttagcgttttggataagaataagcagacctaggacattgtgcgattgttgtgccagagccattcaaactgatactgctactaccttatataaaa

SEQ ID NO: 29483 - DNA, 1986 bp, Zea Mays
gagctctcctacttctataaccctagggtttgcagattaggctaccgtcatggaatctgttgcggagctatgtgcccagaagctgtccgcggccgttgatgtagcccgtgacacaatgaatgcttctgctaccgcttgtatggttgctggtgattactgcaaaacattttccttaggtaacgatgtggtttctacgcttgatgttcttgaatccgctgtggcggcggaaaaagtgctatgtgttcttatcaacaggcgagtgcagccgtcgtttgtgctcgggagacattggccaaatactgtgagctgcctgtttgttcagctgaggatgaacaaaaaacttgcacatgcactcagatatgccacgtctcaaatgagtgatacagctaagaaactacaagatactgcctctttctgctacacagatgaggatgttgtagatggtttcatgatgactcaagtagctcgttcaatggacgagttagctgaaatgctagaagtaacttcaattgactgtcaggtctcgatgatggatccaacaactatattagaagctggctatggaagtgaagacagtgcggtgtgggaggacgtattccgtgaccgagaaataatgaatcagccattagaagcggagacgcttgctgagcactgtgctaagtgggggcttagtttcaatgagatctgggatagatcagtgtaacattgtcttgtgtagttcttttgtgttcagttagctgaactagtattgtaatgagtgggttggaaattgtaagacaagacatcatgaactacttgtttggttcttatttgctatgaaatgctatgaactacctgttgggttgttatttgttatgtgttctctaattgcgttctattgtgtgttctctaattttaagagagttcatgacaattatgaaagagagttcatacaaatgccatagtgtcatacaagtaccatacaaatgccataggtgcatacaaatgtcatacagatgccaaagttacatacaaatgtcacacaaatgccatagttccatacacacaccatactaccataagaacaaacaagttcaccatagtactcaaacattcttcttcctaggtgtgatctttttaactaggactcgaactacacgttcttctggtggcgaagaaggtctttcaacaacatcttcaatagctggtatcattgcaaccacgtcttcattctcgtggtcaactggctgtgatgactcaggtacatctttggggaaccagcctttagttgaatttttcctaggctttcgcttcctgttttgacagaaattagttaatatcataaaatagccagttgcacaaataatttcaaccagaaataatgtaaccttttctttgtgccatttaatggacattcgtagcttgctttcctgtgccctagttcaccacagtttggacacttgaacttgtcccgaatgcttttcttaccattgtcattgttaactttcttttttccactacctccctcaaggcatccttttatcctatttttcctctgtcgacccacagcgcgttttccaattggagcacccacttcttttgggaaaggaacttctggccaaaatgatttgtcaccgacaggtggaaccacccttgagtatgttgtggtgaaatgagctacagagtagtagtcatcgacaaaatcctccatcctgacatccctaaattcttgagctgttatcaagcacaaagcatggatacatggtttgcccgtgtgctgccactctttgcaagaacattcccgcagctgagcattgacaatgtgcttcgaatgcacatcattgttgtcccttacctctgcaatgtagttgtcagctttacgtactgataaatgacctaaacatcttgttctggcgtgtaggatatgtagaaccaacggtaaaatccttccttgcaacttttgtgcaatcctcctcctgtgaaacatctccataatttcctccctta

SEQ ID NO: 29484 - DNA, 2373 bp, Zea Mays
caaaaacacgcttctcccttcccatcttttcctttcccctcctccctcctcggctcgtctctgttcccctttccctcctgcgcaccccgtcttctcctccccgcgtcaaaccccagcacaaaaagcaaccgcccgccgcctcctcgctcctctcccgaatcagccgtcgaggtgcctaatccggccgatcccccctccgatccgcgggtgcccgccgcagaggcggcgcctccgggcctcccccgatgtatagcaacttcaaggagcaggcgatcgagtacgtcaagcaggcggtccaggaggacaatgccggcaactacgtcaaggcgttccctctctacatgaacgcgctcgagtacttcaaaacccacctcaagtacgagaagaaccccaagatcaaggaggccatcaccgccaagttcaccgagtacctccgccgcgccgaggagatccgggcggtcctcgatgagggcggcgcagggcctggggccaacggtggcgacgcagctgtcgccacgcgccccaagaccaagggcaaggacggggacggaggcaacggaggggatgactccgagcagtccaagctgagggcggggctcaactccgccatcatcaccgagaagcccaacattaagtggaacgacgttgccggcctcgagagcgccaagcaggcactgcaggaggccgttatattgcccgtcaagttcccgcagttcttcacgggcaagcggaggccttggagggcgtttcttttgtatggccccccaggaacaggaaagtcttatttggcaaaaagctgttgcaaccgaggctgattcaacgtttttcagtatatcttcttcagatctggtttcaaagtggatgggtgaaagtgagaaattagttgcaaatctgttccaaatggctcgggaaaatgccccttccattatcttcattgatgaaattgattctttatgcggtcaacgtggagaaggcaatgaaagtgaagcatctaggagaattaagactgaacttcttgtgcaaatgcagggtgttggtcacaatgatgataaagttcttgttcttgctgccacgaatacgccatatgctctggaccaggctgtgcggcgaagatttgacaagcgtatctacattccgctacctgacttgaaagcaaggcaacacatgtttaaggtccatctcggggatacaccacacagtttaactgaaagtgatttcgagagcttggcccgtcggacagacgggttttctggttctgacgttgctgtctgtgttaaggacgtgttatttgaacccgtgcgcaaaacgcaggacgccatgttcttcttcaaggcggacggtgacatgtggatgccatgtggaccgaagcaaccgggcgccgtgcagaccaccatgcaggagcttgcatccaaaggcctcgctgcgaagattcttccgccccctatttcgagggcggacttcgagaaggtcctgtcgaggcagaggccgacggttagcaagaaggacctggaggtgcacgagaggttcacgaaggagttcggcgaggagggctgacagacgcgcgcacccacccatgcacgggcggctgcaccacacaaatggccattttattagagagggtatattctggaggtgatctaattctctcgggcgttctatttgaggtaggttgctgtggtggtaataatagcgacgtctgggtgttggttcctgactggtttggctggattcatcggtgcacgtgatggtgctgcagttgcagtacacagatgagattgggctctggctcagctatgcacgcgtcgtgtgtcagctagaaaacgacgggactcatcgatcgatcgtccatccatgtccaccatgggtgttactgacatgtactctccgactccgttgcacaacgaactgatgatcgaaaggagaagaactgatgatcgaaaggagaagacgtatactactactcgtacggtctacactagacagaagcgtacgtgtccggcgtcgtcttgcctgctcaagtttctttggacggacatgcatgcattttgtcagaccaactgtgcgtagataaggttaggtcatccttatcatctctctctcacaccaagttcatgccgtctgccggcgcgcgctttaatcgtgcctaatgcatgcctacgagtataaatactatataccgagtattatgtatacaaagaactactgtaactttaattgtagctatctcctctcctcgcctcaataaataaaaagcagaggatgcatgcatgcgtgcgtgcgttgcagagagggaaatgaaacaggaggcagcatataaatgcatcagcacagccacgtccacgcatatgcaattaggcacgcgcggaatattac

SEQ ID NO: 29485 - DNA, 2592 bp, Zea Mays
caaaaacacgcttctcccttcccatcttttcctttcccctcctccctcctcggctcgtctctgttcccctttccctcctgcgcaccccgtcttctcctccccgcgtcaaaccccagcacaaaaagcaaccgcccgccgcctcctcgctcctctcccgaatcagccgtcgaggtgcctaatccggccgatcccccctccgatccgcgggtgcccgccgcagaggcggcgcctccgggcctcccccgatgtatagcaacttcaaggagcaggcgatcgagtacgtcaagcaggcggtccaggaggacaatgccggcaactacgtcaaggcgttccctctctacatgaacgcgctcgagtacttcaaaacccacctcaagtacgagaagaaccccaagatcaaggaggccatcaccgccaagttcaccgagtacctccgccgcgccgaggagatccgggcggtcctcgatgagggcggcgcagggcctggggccaacggtggcgacgcagctgtcgccacgcgccccaagaccaagggcaaggacggggacggaggcaacggaggggatgactccgagcagtccaagctgagggcggggctcaactccgccatcatcaccgagaagcccaacattaagtggaacgacgttgccggcctcgagagcgccaagcaggcactgcaggaggccgttatattgcccgtcaagttcccgcagttcttcacgggcaagcggaggccttggagggcgtttcttttgtatggccccccaggaacaggaaagtcttatttggcaaaaagctgttgcaaccgaggctgattcaacgtttttcagtatatcttcttcagatctggtttcaaagtggatgggtgaaagtgagaaattagttgcaaatctgttccaaatggctcgggaaaatgccccttccattatcttcattgatgaaattgattctttatgcggtcaacgtggagaaggcaatgaaagtgaagcatctaggagaattaagactgaacttcttgtgcaaatgcagggtgttggtcacaatgatgataaagttcttgttcttgctgccacgaatacgccatatgctctggaccaggctgtgcggcgaagatttgacaagcgtatctacattccgctacctgacttgaaagcaaggcaacacatgtttaaggtccatctcggggatacaccacacagtttaactgaaagtgatttcgagagcttggcccgtcggacagacgggttttctggttctgacgttgctgtctgtgttaaggacgtgttatttgaacccgtgcgcaaaacgcaggacgccatgttcttcttcaaggcggacggtgacatgtggatgccatgtggaccgaagcaaccgggcgccgtgcagaccaccatgcaggagcttgcatccaaaggcctcgctgcgaagattcttccgccccctatttcgagggcggacttcgagaaggtcctgtcgaggcagaggccgacggttagcaagaaggacctggaggtgcacgagaggttcacgaaggagttcggcgaggagggctgacagacgcgcgcacccacccatgcacgggcggctgcaccacacaaatggccattttattagagagggtatattctggaggtgatctaattctctcgggcgttctatttgaggtatttacctccgctagaatctgcacatctcagtaatggttcaaattttttacggtttccatattatatctaccacaaacttcagcagttctgaatgatctgcacgttctgtatttttgattagttgcttagtatagtaactactcagtatagccatcatctatttacttagtatattaactactcatggttaccagctagaaaaagcgagcaatgcaggtaggttgctgtggtggtaataatagcgacgtctgggtgttggttcctgactggtttggctggattcatcggtgcacgtgatggtgctgcagttgcagtacacagatgagattgggctctggctcagctatgcacgcgtcgtgtgtcagctagaaaacgacgggactcatcgatcgatcgtccatccatgtccaccatgggtgttactgacatgtactctccgactccgttgcacaacgaactgatgatcgaaaggagaagaactgatgatcgaaaggagaagacgtatactactactcgtacggtctacactagacagaagcgtacgtgtccggcgtcgtcttgcctgctcaagtttctttggacggacatgcatgcattttgtcagaccaactgtgcgtagataaggttaggtcatccttatcatctctctctcacaccaagttcatgccgtctgccggcgcgcgctttaatcgtgcctaatgcatgcctacgagtataaatactatataccgagtattatgtatacaaagaactactgtaactttaattgtagctatctcctctcctcgcctcaataaataaaaagcagaggatgcatgcatgcgtgcgtgcgttgcagagagggaaatgaaacaggaggcagcatataaatgcatcagcacagccacgtccacgcatatgcaattaggcacgcgcggaatattac

SEQ ID NO: 29486 - DNA, 2313 bp, Zea Mays
caaaaacacgcttctcccttcccatcttttcctttcccctcctccctcctcggctcgtctctgttcccctttccctcctgcgcaccccgtcttctcctccccgcgtcaaaccccagcacaaaaagcaaccgcccgccgcctcctcgctcctctcccgaatcagccgtcgaggtgcctaatccggccgatcccccctccgatccgcgggtgcccgccgcagaggcggcgcctccgggcctcccccgatgtatagcaacttcaaggagcaggcgatcgagtacgtcaagcaggcggtccaggaggacaatgccggcaactacgtcaaggcgttccctctctacatgaacgcgctcgagtacttcaaaacccacctcaagtacgagaagaaccccaagatcaaggaggccatcaccgccaagttcaccgagtacctccgccgcgccgaggagatccgggcggtcctcgatgagggcggcgcagggcctggggccaacggtggcgacgcagctgtcgccacgcgccccaagaccaagggcaaggacggggacggaggcaacggaggggatgactccgagcagtccaagctgagggcggggctcaactccgccatcatcaccgagaagcccaacattaagtggaacgacgttgccggcctcgagagcgccaagcaggcactgcaggaggccgttatattgcccgtcaagttcccgcagttcttcacggtatatcttcttcagatctggtttcaaagtggatgggtgaaagtgagaaattagttgcaaatctgttccaaatggctcgggaaaatgccccttccattatcttcattgatgaaattgattctttatgcggtcaacgtggagaaggcaatgaaagtgaagcatctaggagaattaagactgaacttcttgtgcaaatgcagggtgttggtcacaatgatgataaagttcttgttcttgctgccacgaatacgccatatgctctggaccaggctgtgcggcgaagatttgacaagcgtatctacattccgctacctgacttgaaagcaaggcaacacatgtttaaggtccatctcggggatacaccacacagtttaactgaaagtgatttcgagagcttggcccgtcggacagacgggttttctggttctgacgttgctgtctgtgttaaggacgtgttatttgaacccgtgcgcaaaacgcaggacgccatgttcttcttcaaggcggacggtgacatgtggatgccatgtggaccgaagcaaccgggcgccgtgcagaccaccatgcaggagcttgcatccaaaggcctcgctgcgaagggccattttattagagagggtatattctggaggtgatctaattctctcgggcgttctatttgaggtatttacctccgctagaatctgcacatctcagtaatggttcaaattttttacggtttccatattatatctaccacaaacttcagcagttctgaatgatctgcacgttctgtatttttgattagttgcttagtatagtaactactcagtatagccatcatctatttacttagtatattaactactcatggttaccagctagaaaaagcgagcaatgcaggtaggttgctgtggtggtaataatagcgacgtctgggtgttggttcctgactggtttggctggattcatcggtgcacgtgatggtgctgcagttgcagtacacagatgagattgggctctggctcagctatgcacgcgtcgtgtgtcagctagaaaacgacgggactcatcgatcgatcgtccatccatgtccaccatgggtgttactgacatgtactctccgactccgttgcacaacgaactgatgatcgaaaggagaagaactgatgatcgaaaggagaagacgtatactactactcgtacggtctacactagacagaagcgtacgtgtccggcgtcgtcttgcctgctcaagtttctttggacggacatgcatgcattttgtcagaccaactgtgcgtagataaggttaggtcatccttatcatctctctctcacaccaagttcatgccgtctgccggcgcgcgctttaatcgtgcctaatgcatgcctacgagtataaatactatataccgagtattatgtatacaaagaactactgtaactttaattgtagctatctcctctcctcgcctcaataaataaaaagcagaggatgcatgcatgcgtgcgtgcgttgcagagagggaaatgaaacaggaggcagcatataaatgcatcagcacagccacgtccacgcatatgcaattaggcacgcgcggaatattac

SEQ ID NO: 29487 - DNA, 2416 bp, Zea Mays
aacacgcttctcccttcccatcttttcctttcccctcctccctcctcggctcgtctctgttcccctttccctcctgcgcaccccgtcttctcctccccgcgtcaaaccccagcacaaaaagcaaccgcccgccgcctcctcgctcctctcccgaatcagccgtcgaggtgcctaatccggccgatcccccctccgatccgcgggtgcccgccgcagaggcggcgcctccgggcctcccccgatgtatagcaacttcaaggagcaggcgatcgagtacgtcaagcaggcggtccaggaggacaatgccggcaactacgtcaaggcgttccctctctacatgaacgcgctcgagtacttcaaaacccacctcaagtacgagaagaaccccaagatcaaggaggccatcaccgccaagttcaccgagtacctccgccgcgccgaggagatccgggcggtcctcgatgagggcggcgcagggcctggggccaacggtggcgacgcagctgtcgccacgcgccccaagaccaagggcaaggacggggacggaggcaacggaggggatgactccgagcagtccaagctgagggcggggctcaactccgccatcatcaccgagaagcccaacattaagtggaacgacgttgccggcctcgagagcgccaagcaggcactgcaggaggccgttatattgcccgtcaagttcccgcagttcttcacgggcaagcggaggccttggagggcgtttcttttgtatggccccccaggaacaggaaagtcttatttggcaaaaagctgttgcaaccgaggctgattcaacgtttttcagtatatcttcttcagatctggtttcaaagtggatgggtgaaagtgagaaattagttgcaaatctgttccaaatggctcgggaaaatgccccttccattatcttcattgatgaaattgattctttatgcggtcaacgtggagaaggcaatgaaagtgaagcatctaggagaattaagactgaacttcttgtgcaaatgcagggtgttggtcacaatgatgataaagttcttgttcttgctgccacgaatacgccatatgctctggaccaggctgtgcggcgaagatttgacaagcgtatctacattccgctacctgacttgaaagcaaggcaacacatgtttaaggtccatctcggggatacaccacacagtttaactgaaagtgatttcgagagcttggcccgtcggacagacgggttttctggttctgacgttgctgtctgtgttaaggacgtgttatttgaacccgtgcgcaaaacgcaggacgccatgttcttcttcaaggcggacggtgacatgtggatgccatgtggaccgaagcaaccgggcgccgtgcagaccaccatgcaggagcttgcatccaaaggcctcgctgcgaagggccattttattagagagggtatattctggaggtgatctaattctctcgggcgttctatttgaggtatttacctccgctagaatctgcacatctcagtaatggttcaaattttttacggtttccatattatatctaccacaaacttcagcagttctgaatgatctgcacgttctgtatttttgattagttgcttagtatagtaactactcagtatagccatcatctatttacttagtatattaactactcatggttaccagctagaaaaagcgagcaatgcaggtaggttgctgtggtggtaataatagcgacgtctgggtgttggttcctgactggtttggctggattcatcggtgcacgtgatggtgctgcagttgcagtacacagatgagattgggctctggctcagctatgcacgcgtcgtgtgtcagctagaaaacgacgggactcatcgatcgatcgtccatccatgtccaccatgggtgttactgacatgtactctccgactccgttgcacaacgaactgatgatcgaaaggagaagaactgatgatcgaaaggagaagacgtatactactactcgtacggtctacactagacagaagcgtacgtgtccggcgtcgtcttgcctgctcaagtttctttggacggacatgcatgcattttgtcagaccaactgtgcgtagataaggttaggtcatccttatcatctctctctcacaccaagttcatgccgtctgccggcgcgcgctttaatcgtgcctaatgcatgcctacgagtataaatactatataccgagtattatgtatacaaagaactactgtaactttaattgtagctatctcctctcctcgcctcaataaataaaaagcagaggatgcatgcatgcgtgcgtgcgttgcagagagggaaatgaaacaggaggcagcatataaatgcatcagcacagccacgtccacgcatatgcaattaggcacgcgcggaatattac

SEQ ID NO: 29488 - DNA, 2890 bp, Zea Mays
cttctcccttcccatcttttcctttcccctcctccctcctcggctcgtctctgttcccctttccctcctgcgcaccccgtcttctcctccccgcgtcaaaccccagcacaaaaagcaaccgcccgccgcctcctcgctcctctcccgaatcagccgtcgaggtgcctaatccggccgatcccccctccgatccgcgggtgcccgccgcagaggcggcgcctccgggcctcccccgatgtatagcaacttcaaggagcaggcgatcgagtacgtcaagcaggcggtccaggaggacaatgccggcaactacgtcaaggcgttccctctctacatgaacgcgctcgagtacttcaaaacccacctcaagtacgagaagaaccccaagatcaaggaggccatcaccgccaagttcaccgagtacctccgccgcgccgaggagatccgggcggtcctcgatgagggcggcgcagggcctggggccaacggtggcgacgcagctgtcgccacgcgccccaagaccaagggcaaggacggggacggaggcaacggaggggatgactccgagcagtccaagctgagggcggggctcaactccgccatcatcaccgagaagcccaacattaagtggaacgacgttgccggcctcgagagcgccaagcaggcactgcaggaggccgttatattgcccgtcaagttcccgcagttcttcacgggcaagcggaggccttggagggcgtttcttttgtatggccccccaggaacaggaaagtcttatttggcaaaaagctgttgcaaccgaggctgattcaacgtttttcagtatatcttcttcagatctggtttcaaagtggatgggtgaaagtgagaaattagttgcaaatctgttccaaatggctcgggaaaatgccccttccattatcttcattgatgaaattgattctttatgcggtcaacgtggagaaggcaatgaaagtgaagcatctaggagaattaagactgaacttcttgtgcaaatgcagggtgttggtcacaatgatgataaagttcttgttcttgctgccacgaatacgccatatgctctggaccaggctgtgcggcgaagatttgacaagcgtatctacattccgctacctgacttgaaagcaaggcaacacatgtttaaggtccatctcggggatacaccacacagtttaactgaaagtgatttcgagagcttggcccgtcggacagacgggttttctggttctgacgttgctgtctgtgttaaggacgtgttatttgaacccgtgcgcaaaacgcaggacgccatgttcttcttcaaggcggacggtgacatgtggatgccatgtggaccgaagcaaccgggcgccgtgcagaccaccatgcaggagcttgcatccaaaggcctcgctgcgaagattcttccgccccctatttcgagggcggacttcgagaaggtcctgtcgaggcagaggccgacggttagcaagaaggacctggaggtgcacgagaggttcacgaaggagttcggcgaggagggctgacagacgcgcgcacccacccatgcacgggcggctgcaccacacaaatgtatattgcatcttatgacttggattgttctgcttcgaagtggaagttgcgttacattacaatttggtgtcccaactacggctaatcatgccagctggtttctcgtgttgggctaccaatgggcctctgttgtcagcctatttcatttttattgttgcacatggaatttttccacgggtgtattattatggaataataattgttagcgtggtggagtccttgtggttgcagactgtatgtatagctatttcactaacgttccttggtttttacgcccagtttctttttttttccgattttacttgcagggccattttattagagagggtatattctggaggtgatctaattctctcgggcgttctatttgaggtatttacctccgctagaatctgcacatctcagtaatggttcaaattttttacggtttccatattatatctaccacaaacttcagcagttctgaatgatctgcacgttctgtatttttgattagttgcttagtatagtaactactcagtatagccatcatctatttacttagtatattaactactcatggttaccagctagaaaaagcgagcaatgcaggtaggttgctgtggtggtaataatagcgacgtctgggtgttggttcctgactggtttggctggattcatcggtgcacgtgatggtgctgcagttgcagtacacagatgagattgggctctggctcagctatgcacgcgtcgtgtgtcagctagaaaacgacgggactcatcgatcgatcgtccatccatgtccaccatgggtgttactgacatgtactctccgactccgttgcacaacgaactgatgatcgaaaggagaagaactgatgatcgaaaggagaagacgtatactactactcgtacggtctacactagacagaagcgtacgtgtccggcgtcgtcttgcctgctcaagtttctttggacggacatgcatgcattttgtcagaccaactgtgcgtagataaggttaggtcatccttatcatctctctctcacaccaagttcatgccgtctgccggcgcgcgctttaatcgtgcctaatgcatgcctacgagtataaatactatataccgagtattatgtatacaaagaactactgtaactttaattgtagctatctcctctcctcgcctcaataaataaaaagcagaggatgcatgcatgcgtgcgtgcgttgcagagagggaaatgaaacaggaggcagcatataaatgcatcagcacagccacgtccacgcatatgcaattaggcacgcgcggaatattac

SEQ ID NO: 29489 - DNA, 1609 bp, Zea Mays
gttcgataggaggatagagtatatcttcttcagatctggtttcaaagtggatgggtgaaagtgagaaattagttgcaaatctgttccaaatggctcgggaaaatgccccttccattatcttcattgatgaaattgattctttatgcggtcaacgtggagaaggcaatgaaagtgaagcatctaggagaattaagactgaacttcttgtgcaaatgcagggtgttggtcacaatgatgataaagttcttgttcttgctgccacgaatacgccatatgctctggaccaggctgtgcggcgaagatttgacaagcgtatctacattccgctacctgacttgaaagcaaggcaacacatgtttaaggtccatctcggggatacaccacacagtttaactgaaagtgatttcgagagcttggcccgtcggacagacgggttttctggttctgacgttgctgtctgtgttaaggacgtgttatttgaacccgtgcgcaaaacgcaggacgccatgttcttcttcaaggcggacggtgacatgtggatgccatgtggaccgaagcaaccgggcgccgtgcagaccaccatgcaggagcttgcatccaaaggcctcgctgcgaagggccattttattagagagggtatattctggaggtgatctaattctctcgggcgttctatttgaggtatttacctccgctagaatctgcacatctcagtaatggttcaaattttttacggtttccatattatatctaccacaaacttcagcagttctgaatgatctgcacgttctgtatttttgattagttgcttagtatagtaactactcagtatagccatcatctatttacttagtatattaactactcatggttaccagctagaaaaagcgagcaatgcaggtaggttgctgtggtggtaataatagcgacgtctgggtgttggttcctgactggtttggctggattcatcggtgcacgtgatggtgctgcagttgcagtacacagatgagattgggctctggctcagctatgcacgcgtcgtgtgtcagctagaaaacgacgggactcatcgatcgatcgtccatccatgtccaccatgggtgttactgacatgtactctccgactccgttgcacaacgaactgatgatcgaaaggagaagaactgatgatcgaaaggagaagacgtatactactactcgtacggtctacactagacagaagcgtacgtgtccggcgtcgtcttgcctgctcaagtttctttggacggacatgcatgcattttgtcagaccaactgtgcgtagataaggttaggtcatccttatcatctctctctcacaccaagttcatgccgtctgccggcgcgcgctttaatcgtgcctaatgcatgcctacgagtataaatactatataccgagtattatgtatacaaagaactactgtaactttaattgtagctatctcctctcctcgcctcaataaataaaaagcagaggatgcatgcatgcgtgcgtgcgttgcagagagggaaatgaaacaggaggcagcatataaatgcatcagcacagccacgtccacgcatatgcaattaggcacgcgcggaatattac

SEQ ID NO: 29490 - DNA, 1583 bp, Zea Mays
tatctgtgcaagtcaaattagcccaagtttgaccaaatttatagtgattactattaaaatttacgtcttcaactatgtttactatgaaaatatattccagaattaatgatttagtggtacttattttgtatcataaatgttaatactttttgtctaactttggttaagcttcaaaccgtttgactcgaaaagtgagaattgcattctttttgggatagagggagtacagttttgcaccgaatacaacttcgccaaaaaaaagctgtgcggcgaagatttgacaagcgtatctacattccgctacctgacttgaaagcaaggcaacacatgtttaaggtccatctcggggatacaccacacagtttaactgaaagtgatttcgagagcttggcccgtcggacagacgggttttctggttctgacgttgctgtctgtgttaaggacgtgttatttgaacccgtgcgcaaaacgcaggacgccatgttcttcttcaaggcggacggtgacatgtggatgccatgtggaccgaagcaaccgggcgccgtgcagaccaccatgcaggagcttgcatccaaaggcctcgctgcgaagggccattttattagagagggtatattctggaggtgatctaattctctcgggcgttctatttgaggtatttacctccgctagaatctgcacatctcagtaatggttcaaattttttacggtttccatattatatctaccacaaacttcagcagttctgaatgatctgcacgttctgtatttttgattagttgcttagtatagtaactactcagtatagccatcatctatttacttagtatattaactactcatggttaccagctagaaaaagcgagcaatgcaggtaggttgctgtggtggtaataatagcgacgtctgggtgttggttcctgactggtttggctggattcatcggtgcacgtgatggtgctgcagttgcagtacacagatgagattgggctctggctcagctatgcacgcgtcgtgtgtcagctagaaaacgacgggactcatcgatcgatcgtccatccatgtccaccatgggtgttactgacatgtactctccgactccgttgcacaacgaactgatgatcgaaaggagaagaactgatgatcgaaaggagaagacgtatactactactcgtacggtctacactagacagaagcgtacgtgtccggcgtcgtcttgcctgctcaagtttctttggacggacatgcatgcattttgtcagaccaactgtgcgtagataaggttaggtcatccttatcatctctctctcacaccaagttcatgccgtctgccggcgcgcgctttaatcgtgcctaatgcatgcctacgagtataaatactatataccgagtattatgtatacaaagaactactgtaactttaattgtagctatctcctctcctcgcctcaataaataaaaagcagaggatgcatgcatgcgtgcgtgcgttgcagagagggaaatgaaacaggaggcagcatataaatgcatcagcacagccacgtccacgcatatgcaattaggcacgcgcggaatattac

SEQ ID NO: 29491 - DNA, 1623 bp, Zea Mays
ataaatgttaatactttttgtctaactttggttaagcttcaaaccgtttgactcgaaaagtgagaattgcattctttttgggatagagggagtacagttttgcaccgaatacaacttcgccaaaaaaaagctgtgcggcgaagatttgacaagcgtatctacattccgctacctgacttgaaagcaaggcaacacatgtttaaggtccatctcggggatacaccacacagtttaactgaaagtgatttcgagagcttggcccgtcggacagacgggttttctggttctgacgttgctgtctgtgttaaggacgtgttatttgaacccgtgcgcaaaacgcaggacgccatgttcttcttcaaggcggacggtgacatgtggatgccatgtggaccgaagcaaccgggcgccgtgcagaccaccatgcaggagcttgcatccaaaggcctcgctgcgaagattcttccgccccctatttcgagggcggacttcgagaaggtcctgtcgaggcagaggccgacggttagcaagaaggacctggaggtgcacgagaggttcacgaaggagttcggcgaggagggctgacagacgcgcgcacccacccatgcacgggcggctgcaccacacaaatggccattttattagagagggtatattctggaggtgatctaattctctcgggcgttctatttgaggtatttacctccgctagaatctgcacatctcagtaatggttcaaattttttacggtttccatattatatctaccacaaacttcagcagttctgaatgatctgcacgttctgtatttttgattagttgcttagtatagtaactactcagtatagccatcatctatttacttagtatattaactactcatggttaccagctagaaaaagcgagcaatgcaggtaggttgctgtggtggtaataatagcgacgtctgggtgttggttcctgactggtttggctggattcatcggtgcacgtgatggtgctgcagttgcagtacacagatgagattgggctctggctcagctatgcacgcgtcgtgtgtcagctagaaaacgacgggactcatcgatcgatcgtccatccatgtccaccatgggtgttactgacatgtactctccgactccgttgcacaacgaactgatgatcgaaaggagaagaactgatgatcgaaaggagaagacgtatactactactcgtacggtctacactagacagaagcgtacgtgtccggcgtcgtcttgcctgctcaagtttctttggacggacatgcatgcattttgtcagaccaactgtgcgtagataaggttaggtcatccttatcatctctctctcacaccaagttcatgccgtctgccggcgcgcgctttaatcgtgcctaatgcatgcctacgagtataaatactatataccgagtattatgtatacaaagaactactgtaactttaattgtagctatctcctctcctcgcctcaataaataaaaagcagaggatgcatgcatgcgtgcgtgcgttgcagagagggaaatgaaacaggaggcagcatataaatgcatcagcacagccacgtccacgcatatgcaattaggcacgcgcggaatattac

SEQ ID NO: 29492 - DNA, 154 bp, Zea Mays
atttacgaccatggccgcaccacgcgacagtaatcctgtacaaagatttgtactactaaaatgatgatgattctgtagcgtcctaaaccccctacgaccgaaatgattactcacaccctccgcctctcccggtcccggccaagagcgtgccgtg

SEQ ID NO: 29493 - DNA, 2537 bp, Zea Mays
aaaagctggctcagattcgcgacacccatggttcttcaatgtcaccgcatcgcctccctgtctgtccgcttccgccgcgcccgattccttccccgatcccgcacggccgtccgatcacggatcatcgtacgggtacggcgtacgccatcaggttccagcgttcttccccccgcttcaccttgtccccttcccttccccaccactattcctccaccacctccatccgccactctaaagtctccaagcttccccactccaccgcagcgaagaaatttctctacccccgcaacccccctaaaatcctcgtcgctacgacaggggatccctcccccaatgcggctgctcccgctcctcctgctcctcctcgccggcgccggcgcccgcgcctccgacgaccccttcctctccggcgcggcgaaccacagctacaacatcgactgcggcggcgcggcggacttcacctcggccttggggcgccggtggctcgccgaccggttcttctccgcgggcggggccgccggcatggtggcggagccgcaccgcttcccgcagccgcaggagcgcacgctccgcttcttcccgccctcctcggccggcaagtcctcctgctactcgctcccgcttccccccggccgctactacctccgcctcttctccgtctacgacaactacgactccaagctgcgcacgccctccttcgacgtctccgccgccgccacgctcgtgctctccttccgctcgccctggcccgagcccgccgcgcgctacggggcctactccgacctcatcttcccctccgccaccgagcccgcctccgacctctgcttctactcgctctccaccgacgcgcccgccgtcgcctccatcgaggtctcccccgtccacccgctcgcctacgacggcgccaccaccggcgccgacctcgtcctcgtcaactacggccgcgtcacctgcgggaacagcctcttcggccccggattcaccagggacgccgacgccttctcgcgggtgtggcaggcggacgtcgatttccggaacaacgacctcagctacgacgccatcactgcgggcgggaggaaggtctttggcagcaaccagccgcccaactacttccccaccaagctgtacgagtcggcggtcaccacgggcggtgacgccgccaatgagatcgagtacctcatgccggtcgacacgaggctgtcctacatggtctggctccatttcgccgagatcgatgctgggatcggctcacctggccagagggtgttcgacgtagtgctggctggggagaacgtcacgaggatcgacatcttcaagcaggtcggaggcttcacggcgttcaagtggacctacattgtcaagaatctgacaagctcgacgttgagcgtcaggcttgtgccagtggtgggacggccgattctgtgcggccttgagaattatgcgatggtgccacttgagatgaggacagtgccgagccaagtggctgcaatgaaggcgttgaaggagtcgctgaaaattcctgccaggatgggttggaatggtgacccttgtgcaccgagggcatgggatgcatgggagggagttacttgccatcgcggtgacaaagggcttgtgataacacaactggatctggcgagtcaaggactaaaaggttacatcaccgatgaaataagtcatcttaaagacttggtaagcttgaatttgagctataattcactgactggaagcttaccacctggtttaggtcaaccttcacttgtgtcactggatatttcatcaaatgagtttactggaagcattcctggaaccataggttcatccaagttacagactgcattactaaacaacaatcaactcgatgggcaagttccagaaagactttactcaattggcgtgcatggtggcgtgatagacctctcaggtaataaaggtttgtgtggcgtgcctaccttacctgcttgtgcattattctgggagaaaggagggttgaacaaaactggcaaaattgcacttggagcatcgtttgggtttgttctgctcgtcatacttatagtggtctacatactgtgcatcagaagggggccatatgactatgattttgacttccctcaagatttgacctccatatcagcaatatcagcgaaaaggaataggtaccagagggcaaaatccgtgatgcttgctgagatggaggcacataacccggatggtttctacacaaacgggagccctcactaaatggcatgctcagaagttggtcgccctgatggccatattctttgaggaagcactcaccgtggtcttgcatcttcactcaggttccatgccatggcaggtccgcaggtaatgaagaacactgaacaacactgcgaatataaggaagcattgttagtagagagagccaatagcactgaatgacagaaaaatagtaatgcattgaaatcctgcgatgaagaatctttgtaaaggatgaatccttggtggttaccatgctttggaacgtcaaaaaaaataaatctttgaacactcttcatgac

SEQ ID NO: 29494 - DNA, 2796 bp, Zea Mays
gcgacacccatggttcttcaatgtcaccgcatcgcctccctgtctgtccgcttccgccgcgcccgattccttccccgatcccgcacggccgtccgatcacggatcatcgtacgggtacggcgtacgccatcaggttccagcgttcttccccccgcttcaccttgtccccttcccttccccaccactattcctccaccacctccatccgccactctaaagtctccaagcttccccactccaccgcagcgaagaaatttctctacccccgcaacccccctaaaatcctcgtcgctacgacaggggatccctcccccaatgcggctgctcccgctcctcctgctcctcctcgccggcgccggcgcccgcgcctccgacgaccccttcctctccggcggtaggcgctccctagctcggcccctcctcccccttacataatacaagttttttcgttcgattcgcggctgcaatgcagacggcgcgagcgagtgctaacgccgtgtggtctcctccgtctctccccgggccgggcgcagcggcgaaccacagctacaacatcgactgcggcggcgcggcggacttcacctcggccttggggcgccggtggctcgccgaccggttcttctccgcgggcggggccgccggcatggtggcggagccgcaccgcttcccgcagccgcaggagcgcacgctccgcttcttcccgccctcctcggccggcaagtcctcctgctactcgctcccgcttccccccggccgctactacctccgcctcttctccgtctacgacaactacgactccaagctgcgcacgccctccttcgacgtctccgccgccgccacgctcgtgctctccttccgctcgccctggcccgagcccgccgcgcgctacggggcctactccgacctcatcttcccctccgccaccgagcccgcctccgacctctgcttctactcgctctccaccgacgcgcccgccgtcgcctccatcgaggtctcccccgtccacccgctcgcctacgacggcgccaccaccggcgccgacctcgtcctcgtcaactacggccgcgtcacctgcgggaacagcctcttcggccccggattcaccagggacgccgacgccttctcgcgggtgtggcaggcggacgtcgatttccggaacaacgacctcagctacgacgccatcactgcgggcgggaggaaggtctttggcagcaaccagccgcccaactacttccccaccaagctgtacgagtcggcggtcaccacgggcggtgacgccgccaatgagatcgagtacctcatgccggtcgacacgaggctgtcctacatggtctggctccatttcgccgagatcgatgctgggatcggctcacctggccagagggtgttcgacgtagtgctggctggggagaacgtcacgaggatcgacatcttcaagcaggtcggaggcttcacggcgttcaagtggacctacattgtcaagaatctgacaagctcgacgttgagcgtcaggcttgtgccagtggtgggacggccgattctgtgcggccttgagaattatgcgatggtgccacttgagatgaggacagtgccgagccaagtggctgcaatgaaggcgttgaaggagtcgctgaaaattcctgccaggatgggttggaatggtgacccttgtgcaccgagggcatgggatgcatgggagggagttacttgccatcgcggtgacaaagggcttgtgataacacaactggatctggcgagtcaaggactaaaaggttacatcaccgatgaaataagtcatcttaaagacttggtaagcttgaatttgagctataattcactgactggaagcttaccacctggtttaggtcaaccttcacttgtgtcactggatatttcatcaaatgagtttactggaagcattcctggaaccataggttcatccaagttacagactgcattactaaacaacaatcaactcgatgggcaagttccagaaagactttactcaattggcgtgcatggtggcgtgatagacctctcaggtaataaaggtttgtgtggcgtgcctaccttacctgcttgtgcattattctgggagaaaggagggttgaacaaaactggcaaaattgcacttggagcatcgtttgggtttgttctgctcgtcatacttatagtggtctacatactgtgcatcagaagggggccatatgactatgattttgacttccctcaagatttgacctccatatcagcaatatcagcgaaaaggaataggtaccagagggcaaaatccgtgatgcttgctgagatggaggcacataacccggatggtttctacacaaacgggagccctcactaaatggcatgctcagaagttggtcgccctgatggccatattctttgaggaagcactcaccgtggtcttgcatcttcactcaggttccatgccatggcaggtccgcagggccggctgccgcagaggatttgtttcatctcttgagtgcaggtgtggccgtgtgggttgccaataattggtttcagaccgaactgatgcctgacttccatcgacgttgcattttatatcatttcgtaatattagccatgaacattccttcttttatcaaaaaaacacttctggtctttgtagcaactaacaggcaaattacattaatctcactagtcaaatatatccagccaataatatgttgttctgtctgcataccaacaaactaattgctcacgagatcccgcccactgtggatggaagcgtgccgggagatgtttaaaagacaaatg

SEQ ID NO: 29495 - DNA, 2686 bp, Zea Mays
tgtcaccgcatcgcctccctgtctgtccgcttccgccgcgcccgattccttccccgatcccgcacggccgtccgatcacggatcatcgtacgggtacggcgtacgccatcaggttccagcgttcttccccccgcttcaccttgtccccttcccttccccaccactattcctccaccacctccatccgccactctaaagtctccaagcttccccactccaccgcagcgaagaaatttctctacccccgcaacccccctaaaatcctcgtcgctacgacaggggatccctcccccaatgcggctgctcccgctcctcctgctcctcctcgccggcgccggcgcccgcgcctccgacgaccccttcctctccggcgcggcgaaccacagctacaacatcgactgcggcggcgcggcggacttcacctcggccttggggcgccggtggctcgccgaccggttcttctccgcgggcggggccgccggcatggtggcggagccgcaccgcttcccgcagccgcaggagcgcacgctccgcttcttcccgccctcctcggccggcaagtcctcctgctactcgctcccgcttccccccggccgctactacctccgcctcttctccgtctacgacaactacgactccaagctgcgcacgccctccttcgacgtctccgccgccgccacgctcgtgctctccttccgctcgccctggcccgagcccgccgcgcgctacggggcctactccgacctcatcttcccctccgccaccgagcccgcctccgacctctgcttctactcgctctccaccgacgcgcccgccgtcgcctccatcgaggtctcccccgtccacccgctcgcctacgacggcgccaccaccggcgccgacctcgtcctcgtcaactacggccgcgtcacctgcgggaacagcctcttcggccccggattcaccagggacgccgacgccttctcgcgggtgtggcaggcggacgtcgatttccggaacaacgacctcagctacgacgccatcactgcgggcgggaggaaggtctttggcagcaaccagccgcccaactacttccccaccaagctgtacgagtcggcggtcaccacgggcggtgacgccgccaatgagatcgagtacctcatgccggtcgacacgaggctgtcctacatggtctggctccatttcgccgagatcgatgctgggatcggctcacctggccagagggtgttcgacgtagtgctggctggggagaacgtcacgaggatcgacatcttcaagcaggtcggaggcttcacggcgttcaagtggacctacattgtcaagaatctgacaagctcgacgttgagcgtcaggcttgtgccagtggtgggacggccgattctgtgcggccttgagaattatgcgatggtgccacttgagatgaggacagtgccgagccaagtggctgcaatgaaggcgttgaaggagtcgctgaaaattcctgccaggatgggttggaatggtgacccttgtgcaccgagggcatgggatgcatgggagggagttacttgccatcgcggtgacaaagggcttgtgataacacaactggatctggcgagtcaaggactaaaaggttacatcaccgatgaaataagtcatcttaaagacttggaatttgagctataattcactgactggaagcttaccacctggtttaggtcaaccttcacttgtgtcactggatatttcatcaaatgagtttactggaagcattcctggaaccataggttcatccaagttacagactgcattactaaacaacaatcaactcgatgggcaagttccagaaagactttactcaattggcgtgcatggtggcgtgatagacctctcaggtaataaaggtttgtgtggcgtgcctaccttacctgcttgtgcattattctgggagaaaggagggttgaacaaaactggcaaaattgcacttggagcatcgtttgggtttgttctgctcgtcatacttatagtggtctacatactgtgcatcagaagggggccatatgactatgattttgacttccctcaagatttgacctccatatcagcaatatcagcgaaaaggaataggtaccagagggcaaaatccgtgatgcttgctgagatggaggcacataacccggatggtttctacacaaacgggagccctcactaaatggcatgctcagaagttggtcgccctgatggccatattctttgaggaagcactcaccgtggtcttgcatcttcactcaggttccatgccatggcaggtccgcaggtatatatgttttgaatcaattttgcacgtgtcaccagcatggcggccttgcattttcactcaggttccataccataccatggcagttacactcacagtttgagatattcgaaatgtagttcgtgtagcgcatatgtgcttgtatcctgtaatatgggggcatatgaggcagtcatttagtagttcgtgtagcgcaccgattcttttttacttttgaccgaggggtctccagatagtttagcttacgcttgtgctcaatgaatcatgtcaaggctttctattgattttttttttgtatagaacctgacatggtgttactaaccgactttgggcagtgagaggttcattaggttgcatatcttacttggcccgtttgcctgtgaatggttc

SEQ ID NO: 29496 - DNA, 2490 bp, Zea Mays
tgtcaccgcatcgcctccctgtctgtccgcttccgccgcgcccgattccttccccgatcccgcacggccgtccgatcacggatcatcgtacgggtacggcgtacgccatcaggttccagcgttcttccccccgcttcaccttgtccccttcccttccccaccactattcctccaccacctccatccgccactctaaagtctccaagcttccccactccaccgcagcgaagaaatttctctacccccgcaacccccctaaaatcctcgtcgctacgacaggggatccctcccccaatgcggctgctcccgctcctcctgctcctcctcgccggcgccggcgcccgcgcctccgacgaccccttcctctccggcgcggcgaaccacagctacaacatcgactgcggcggcgcggcggacttcacctcggccttggggcgccggtggctcgccgaccggttcttctccgcgggcggggccgccggcatggtggcggagccgcaccgcttcccgcagccgcaggagcgcacgctccgcttcttcccgccctcctcggccggcaagtcctcctgctactcgctcccgcttccccccggccgctactacctccgcctcttctccgtctacgacaactacgactccaagctgcgcacgccctccttcgacgtctccgccgccgccacgctcgtgctctccttccgctcgccctggcccgagcccgccgcgcgctacggggcctactccgacctcatcttcccctccgccaccgagcccgcctccgacctctgcttctactcgctctccaccgacgcgcccgccgtcgcctccatcgaggtctcccccgtccacccgctcgcctacgacggcgccaccaccggcgccgacctcgtcctcgtcaactacggccgcgtcacctgcgggaacagcctcttcggccccggattcaccagggacgccgacgccttctcgcgggtgtggcaggcggacgtcgatttccggaacaacgacctcagctacgacgccatcactgcgggcgggaggaaggtctttggcagcaaccagccgcccaactacttccccaccaagctgtacgagtcggcggtcaccacgggcggtgacgccgccaatgagatcgagtacctcatgccggtcgacacgaggctgtcctacatggtctggctccatttcgccgagatcgatgctgggatcggctcacctggccagagggtgttcgacgtagtgctggctggggagaacgtcacgaggatcgacatcttcaagcaggtcggaggcttcacggcgttcaagtggacctacattgtcaagaatctgacaagctcgacgttgagcgtcaggcttgtgccagtggtgggacggccgattctgtgcggccttgagaattatgcgatggtgccacttgagatgaggacagtgccgagccaagtggctgcaatgaaggcgttgaaggagtcgctgaaaattcctgccaggatgggttggaatggtgacccttgtgcaccgagggcatgggatgcatgggagggagttacttgccatcgcggtgacaaagggcttgtgataacacaactggatctggcgagtcaaggactaaaaggttacatcaccgatgaaataagtcatcttaaagacttggaatttgagctataattcactgactggaagcttaccacctggtttaggtcaaccttcacttgtgtcactggatatttcatcaaatgagtttactggaagcattcctggaaccataggttcatccaagttacagactgcattactaaacaacaatcaactcgatgggcaagttccagaaagactttactcaattggcgtgcatggtggcgtgatagacctctcaggtaataaaggtttgtgtggcgtgcctaccttacctgcttgtgcattattctgggagaaaggagggttgaacaaaactggcaaaattgcacttggagcatcgtttgggtttgttctgctcgtcatacttatagtggtctacatactgtgcatcagaagggggccatatgactatgattttgacttccctcaagatttgacctccatatcagcaatatcagcgaaaaggaataggtaccagagggcaaaatccgtgatgcttgctgagatggaggcacataacccggatggtttctacacaaacgggagccctcactaaatggcatgctcagaagttggtcgccctgatggccatattctttgaggaagcactcaccgtggtcttgcatcttcactcaggttccatgccatggcaggtccgcaggtaatgaagaacactgaacaacactgcgaatataaggaagcattgttagtagagagagccaatagcactgaatgacagaaaaatagtaatgcattgaaatcctgcgatgaagaatctttgtaaaggatgaatccttggtggttaccatgctttggaacgtcaaaaaaaataaatctttgaacactcttcatgac

SEQ ID NO: 29497 - DNA, 1706 bp, Zea Mays
ctcacgcgcgggcgtggggcatgtcgcacacctgccctcacggctcacgctcatgacgagccagccagccaggagccagccaaaccgcctccacgccgcgttttcccgatctggaaatttaccacgagagcgtcgtgactgccacaaacatacgagcactgggcactggtgaatgaacgagagtgacctgacccccgtgcggccgtccgccgtcaccgaccgagcgccgggtcccaccactccccgtccccaacccctcgcgctcgctccagcctccagcaaccgcgctccctgttcctttccttcccaggcggccaggcccagcagcgtgaagtgaggccagctagcctattatcagcctatggcggctcggattggagcggacgggaaggcgatggcacgccgcggccgcgtggagctgcggcggatcgaggaccgggtgagccggcaggtgcgcttctccaagcgccgctcggggctcttcaagaaggccttcgagctctccctgctctgcgacgccgaggtcgccctcatcgtcttctcccccgccggcaagctctacgagtacgcctccaccagcatagaggatacatataaccgctatcagcaattttctggagaaggaaggaatataaatgacgatcgaaatagaaacgataacaaggatgaagcttcttcagatttgcagttgatgctgagcaagattgcgacctggtctccccagagcaatgctgacgaatcagatgtagatgagctggagaagctggaaaatcttctgagaaatgctttgaaggatacgagatccaggaagattcagatgttggcgaaacaaaacagcggagctagtacaagcggccagaaaagtccggagcaaggaacggcgtgagcacggatctgtccagcgtccacctacctgggattgctcttgcttccccttgccgatggatgcttgtactgattatgaccttgtgggttgcgagaccctgtgctagctttgggcctgccaacctgcagtgtccctggaggggacggagctagtgtatgtagtttgatgttccctttgtgtgttgtgatatgcagcctacctaatggccagagcttggtgctgcaaatcctgcagctgatctggttgcgtttcatgcttgacagtatatacagcatactactgtgttttagttcctacagacacttgctcagatgaaacaactgggctaggaaaatctatcgagcaaaatgatggtattgcataatagttcttgggtgttcactaggtttgtgaaacgtggtgccttgacctggtatgtgatttgtgcgatgatgtcgtctatccatgctggagtggagttcatgccagcgcgtggtttatatgtagaagtagaagtagcagctggctgtcgacatgccgagccactttgctgttgtttttgcatacccactggtcttgcctgaacatgtctggttttctgaagatgtacacgaccataactgaatgaagcagtaaaagctgcatgtaggtaacaactgggtacaaaaagagatgcattttcatatggacgaacaaataatggatcgtcggagatgggccgggtttggggggaatcgaagaacctcactcacctgcaactacgtgcagcgaggccgtgggcggcgagccggagaattttaaaccaccacagccgcgtcgaagtggccggccgggtggccgg

SEQ ID NO: 29498 - DNA, 6789 bp, Zea Mays
cgcgcgggcgtggggcatgtcgcacacctgccctcacggctcacgctcatgacgagccagccagccaggagccagccaaaccgcctccacgccgcgttttcccgatctggaaatttaccacgagagcgtcgtgactgccacaaacatacgagcactgggcactggtgaatgaacgagagtgacctgacccccgtgcggccgtccgccgtcaccgaccgagcgccgggtcccaccactccccgtccccaacccctcgcgctcgctccagcctccagcaaccgcgctccctgttcctttccttcccaggcggccaggcccagcagcgtgaagtgaggccagctagcctattatcagcctatggcggctcggattggagcggacgggaaggcgatggcacgccgcggccgcgtggagctgcggcggatcgaggaccgggtgagccggcaggtgcgcttctccaagcgccgctcggggctcttcaagaaggccttcgagctctccctgctctgcgacgccgaggtcgccctcatcgtcttctcccccgccggcaagctctacgagtacgcctccaccaggcaaaaggcgtggtgcgtcacttatccattcaaacacaggaatttgttgcaatcacgggattgtagaagaaaactacaagatgtgatgatgctgatgctacataagtcatgctaaaatgtctcgtttattgaagtattgtatctcaaatatattattttttaatttctttatcttgtagtttatatttgagattttattattatatttagtcactgcacactctcattaaaagagtaacgacctttttggtgactaaagatgcttatgaagaagggagattgctattaaagatttatgtattacattgagcccttatacgatttatatagagtacatgacataagagacaaggcaacccatagatacatgtggcaattcgagacacaatatctagactatcaaatatactctaacactccacaatcatagagggagcatggtagacgtttagactatagaagtctatatggactaaaatcccccatagtcgtgacgttgtcggagtgcagatgcaacgacttggagaagaaaccgacgagaagctgatgtagacgatagttctctgtgtcgatgttgaggtagcctagtacaaggatgaacagttgtggtcgataatcttgcaaaggatagttgtggtcgatgaaagctatcgaggtcactaagaagtaggagccacacaagtcgtgtgcttgatgtgttgtggtgatggtggcgaatagaaggaagcaccatagacaaagatggtgatgcagtcaaggcagtcaatggagaaggtcgatggcgaagtcgacattgtcgaatcaacgtggctgaggcatgtgtgaggtttactagctaagcccaaaaacacaccggggatgaaggtacgcaccagtgttgctagcaaaagacatactaggtagaggaccccaaccatacgtcagtgtctaaagtgactagcagagaaggcctccgcgatagttgcaatgtgtagaagaacaacgaggaagcatgtgtcaatgcaccaatggttgtcggtgtggatgaagtagacgaggacagaggacgacactggcaacgagattgtgatggacgaagtcaaagaagtagatggttgacacatctagggacccagagtggcagtggtgagatctgcattgcgcaaggagtcatggtggtgctagagtgttgcaacagtggtgcttaaagaagatgacgaagagcatgaacggtccaggtataccatgtgagagaggcgcacaacgacgtagtcgacggtgatgtaggggcaatacaaggatgaaaataggcgacgatggcgcaaaacccgaccaattaggaagaaaaagggacccacaacaacaacaaattttgttacatcaccaagtacccacaaatagtccattctcctaactcaactcaccctccttatcctcgatcagaagactgaaagagggagaaagagataaaccacgatcacaaaggctcgacttggctaacagggagaggcacatagcctagcacaaccaacatcctctttttctttggcaggggtcttaatggctttgttgcttttctcctcaaataaatctccaaagatcgcatccattggattcactatgcaggggaggctaggcaatgcctctttgagcttgtcgcctgatgtatcctcctaggcgggctttttctcgacctacttcgacatagaatcaaagttaacaaggtcgaccccgaaaggacttaaaaataccatgatgtttgttttgtcattacctcaattttctgagcgttcagaacaagactcttcaacaacagctcgtacatgttcttcagtggtaggggtctttgcaatgccagcaggcttctctgaggcaaccttagaggcctcgacctagaccttctacttctcaccttcatggtgtttcctttcaaagcgcttgggtgctagcaacttttcctttgccacaatctcactacccttgtattttgcctttggcttcaaggactttgtcggagggccccctctagcctccttttcactaatcactcaacccctatctataattcttactttgcatttcctctgcaatctagcatcatgatcgacaatgaggttggggtagtctagatattctaagtcatatgctttgatcacacgattatgtattctctttattgccactcactatcgcactaagtagatgatctctttcacaatatagttgcataaaactttgttagcaactgtctccaccataatgagccactcattgctcggctttatgaagatgctgaagggattgaatttataaggtaactgaatcatctctcgagcttcaatctccttcgtgttgtcctcatcttttggcttaggtatctcctagccaactttcataggaaatacatggtaggcaatatgctcttgaattcgtctcttagcaccctaggggtcaagggtgacaaagcccatgggctcacacggcctctccagaatcgtcaccacgacaacacgtggatgtcgtctgccccacaaccatcaccatgattgcatgcacaaaggacaaaggcatgatccaaccggtaggagagcccaacaaccaccatgacatgtagagaaaccagcgagcctctgatttgttgaagcttgacaatacaataacgacgatgaacgcgacaaatcagaaggattagtcatgcatcctaactacgagagcgcaactcttgatggagatcaatttcctcgaggcagcgcgacgacgacagcagaaggggaagcctaagtcatagcctaaactcgttataccatgttaggggggtttgccatcaaggattgatgtattgcattaagcccttaggcagtttatatagagcacatgagtaagagacaaggcaaatcatggatatatatgacagtagacgagacacaatatctagactaccaaatatacttttaacaacttctaacaactaaatataaaatatctaaaatatttgttgagaagttaacatatgagagagaacctataactgtgcaactaatataagaaaaataacataaacatataacaatgggaaaattatgacacgctaataagtcacaaacaaaaataacaactaattatgaaattgacatgtagttgagtatttatacaatgatatatataatatcgaaagtgctttcgataatattatgttagttgatcaaccgtgctcataacttggttggagataaatcataaattcacattctttgtcacaatttattacaagtttctattgtccaaaatattatggtttaaacaattcaatttctatagtgcatgggcatgatgcctaaaagcttactagactctcttctcttatcattttttcctagagcatatcttttgttgccctaaaaggtaaaaacctatcacttgggggtcgctctcaagttttgaatgtatactccacttatttcatttgttcgatgtcctctcagctttcattctcaactgagcatatttagccttcaaggaagggaaagaaaaagaggagacaagaaaaacttggctatcaacttcacttatatatcaatggaagaaaaccaacttctattgggcagggccatgtgcatcaactagactctagcacccccaacacaaaacctgtcatgaaaaaaaggcgtgcccatactgtgtctagtagattcagaacatttgaagatggaaacttcttgttgggagtgtgtggaagaaaacttagaaagctaaatccaactcgggaaacatggggaaattaattacaaatatttagaaagagtgcaaaaagcccaaccaaacatttagctaacgactgcgccttcttagaacccaccctacacgccctgaaacttcttggcttttccacatggagcatatagagctagtcactttgacttctctagtacctaatcataacttcagaacctagacagcctagatggttgtctcggtatgtagtggtccaaactctacagtcagatacaaggaacatcacattacattaataaatatgatagggcatatatggtagagaaaagtctattattcaaacagttaacttggacatctggaatctagatgacatcatatcgagaactctcaaaggtatacattatctttcattcattcttcaactgaatagatttgaagcccatgaatgcatattttttctaatctgtatcacccatcggaagtccatgtttttcctttaaaatccttgtccatagaaagtctatttttattgcctttttggtttgatcctagaccttcatataaatatccgaaccttttttcccagtgatctacttctaaatacacaccctttatttttgaaattatgataacaaacccacataccagatttatccgcattatgattcaagggaagaaaaggtaaaagaatataaataaggagttcgtaaacaaaaaatgtcctaggtatttacatttacttgtgtaattgcttgatacaagcatttcattggttatccacttgcgtatatgactagtagctcctctttgatacaacatgtcattttaggacaaaatttggtcaaaccttgaaaactacgaagatcaataacttttaaatctttaggtttggatacatgatatatttgcatatttgtataataaaatagttataaaatcttgaaaatatattctagatgatattggtggtccaagatatgcatcaaagaccatgtaaagttagatgtgacagataggttgtatcatggctcagttctgatgtttttatatgatcaagaatatagcaacgaaaactcttaaaacatctagagaaacagtggtccgaaacctttatgagaactaagtagagtagaatagtagtatggaatgtgatggaccagggcatgaactcaatatcatgaggaaaaaggacatcatactaataaactgtatttgactgtaagattcaggatgtaattcataataatatactcacctccaataaaactgcctgcatttttgttccacgtgaggtgaatatatagatgttgattgtccaagagtacattatgcaaggagctaatatcatattcattttttttctcctttttcagcatagaggatacatataaccgctatcagcaattttctggagaaggaaggaatataaatgacgatcgaaatagaaacgataacaaggatgaagcttcttcagatttgcagttgatgctgagcaagattgcgacctggtctccccagagcaatgctgacgaatcagatgtagatgagctggagaagctggaaaatcttctgagaaatgctttgaaggatacgagatccaggaagattcagatgttggcgaaacaaaacagcggagctagtacaagcggccagaaaagtccggagcaaggaacggcgtgagcacggatctgtccagcgtccacctacctgggattgctcttgcttccccttgccgatggatgcttgtactgattatgaccttgtgggttgcgagaccctgtgctagctttgggcctgccaacctgcagtgtccctggaggggacggagctagtgtatgtagtttgatgttccctttgtgtgttgtgatatgcagcctacctaatggccagagcttggtgctgcaaatcctgcagctgatctggttgcgtttcatgcttgacagtatatacagcatactactgtgttttagttcctacagacacttgctcagatgaaacaactgggctaggaaaatctatcgagcaaaatgatggtattgcataatagttcttgggtgttcactaggtttgtgaaacgtggtgccttgacctggtatgtgatttgtgcgatgatgtcgtctatccatgctggagtggagttcatgccagcgcgtggtttatatgtagaagtagaagtagcagctggctgtcgacatgccgagccactttgctgttgtttttgcatacccactggtcttgcctgaacatgtctggttttctgaagatgtacacgaccataactgaatgaagcagtaaaagctgcatgtaggtaacaactgggtacaaaaagagatgcattttcatatggacgaacaaataatggatcgtcggagatgggccgggtttggggggaatcgaagaacctcactcacctgcaactacgtgcagcgaggccgtgggcggcgagccggagaattttaaaccaccacagccgcgtcgaagtggccggccgggtggccgg

SEQ ID NO: 29499 - DNA, 3138 bp, Zea Mays
atctaaataaaatccccacccagaaacccacggaggagacaagcgtagccagagcagcaaaccaccccccttcctcgcccgttcgcttcctcatggagccgctgccgtcggcgacggccgccggcgtgggggggcctgggcccgggtaccccgagtccacggagtcttctccacgcagccggggtggggattcgtgggacgagcctttcccgtcctccgcggcggcggcggccgctgctgccggcggtgggggccggctccgcctgatgtgcagcttcgggggacggatcgtcccgcgcccgaccgataagtcgctctgctaccttggcggggagaccaggatcgtggccgtggaccggcacgcttcgctcgccgatgtccacgcgcgcctctcgcggtcgctgctgggcggccgccccttcacgctcaagtatcagctacccaacgaggacctggactccctcatctccgtctctacggacgaggacctcgacaacctcgtcgacgagtacgaccgcatcgctgcgacctcctccggcggaggaacctcgcgcacctcccggatccgcctcttcctcttccccgccaagcccgagtcctcgtcctcgctcggctccctgctcgacgactcttcaaagtccgagaactggttcgtcgacgccctcaacagcgccatctccggctccctcgacggtatcccgaggggaatctccaccgattcagcctccgtcaactgccttctcggcctcgaggacgactcctccgtgcactcccgtagcggagtaaccaactcggctcccacggaggaccagcgcgccagccagccgaagctccaggcgggcgccgccgctgccgccgtcggtaccgggaggcacccgcacgacgtccagtccgtgccagactcgccgatgctggataagaactcctcgttcgggtctacctcctcggccccgtcgctatcgaatcttccgcctatacgcgtgcggccggaggaccgcccgtcggacgcccgcatcatgcaacctaccgccgtcgaggaccacttcgcgcagatgggaatctccgagcagcagctgcccatgtatatacaagctcaacagcaggtgccgatccctgctatgaccggcatgtcgccatctgaggcgtccagccgaatgttctctgacgatgataagtccgatcacggtggtggcggaggtcggaaaccacaacctcccaagcaggacgttccgccggttgttgatcccaccaatagatctcctccggctgaattgaagcgagacatgccggtgggaactgaagctgccagctaccgcctccccgtttcagctccggacgctgctgcggcagctgcagccaccgccgcgacacaggcccctcctggatatgtgcttgcccagatgcatgcgcctccgccaccgcagcaacctccaccacagcagcaaccacaacagccagctcctcagcagattgttgctgctgggaatcaacatttcatccacaaccctgccactggcacctttattccaatccagtcctattaccaccatcctgtccatcagcaggcaccccagaccatgcaaaggcagcaacaggcacctacgttcgacccaaatacagggatgtattatgttcctatgcagcagaacgcacatcaggcatatggcgtgcctcctggtgcacaagtcactttgccacctccgacccttgttgacacaacgccaaagccaaccgtgccaattcctcagatggcagtaaggcctgaattgcaacaacctggtgtctaccgaacaacagctgcggctacccctgctccagcgcctaatgcagcacctggatatgctgggatggcctaccaccatgtcatccaatcccaccaccaccaccaccctgcgccgcagcctgtagcaaacatggctggcaactacgggtatgagtttgctgatcctacgcgcccgcaagtctactactcacaggcagctgcacctccaacattgccacagtatccgcccattgtctctcctgatgctggccaggctgaaaaacattaagcagactgagcattggtgaattcaggtatgcctcaaattctagaggccttgttatccgtctgttacttatcattattgttgctaccgcatgttacatgaatccgcgtcaaagagtgaagatgttgctattaggcaactgtgcatttgcattgggatcaaaacaagcatgcatcatccaaggataggttcaacataaggtttttattggatggttcttgtgttggtgagagacagaagggtgccggattagtttgggggagtgaagtgttggatccctgttccaaattggtctctttttttttccctttcttcttattttgaataaaatatagtgtccaaaagaacctggtggtaacgaagaactcatcatcatcatcatcatttgtgtagccctctgtatatttgatctcatggatgtcattcaggttgaggtgcagataagtgtgttattagcttgcttgtagaaaccttatgcgagttaaatatatatatacatcgaaatgaagatgaaatacaagtgatagaagtgagcttcatcgaagcattgctgtgcattccgtaatgcactgttccactggacaatcatcacataaccggaatcacacaagcgatcgcaagcatatagccatataggaccatttagtcagcctgtagatagacattcagaaggctgttgcaagtccagtcaggcctggagcactggactatttggtcagcctgtagatatagatattcagaaggctgttcccgctggctctgttgttttatccagacattctatgcaataaatacatctggttgtaaatgtcaacacatgcagccctgagccgtcgtaagcctttgttgttctatagctgttcagtataattaaggctttccttaattacgctgaagcgaacgtatgtaggagcaaatttaacaatagagccaactattggctgcaagattcttataatatactactccctccgtttctttttagttgtcgctggatagttcaattttgcactatccagcgacaactaaaacgaaatggagggagtacgtatttagcttattcgtgagctctttagtatcaatgcagaat

SEQ ID NO: 29500 - DNA, 595 bp, Zea Mays
tgtgtctgtttcacttatgtcatgttagtagatctattttccaatgttttttctcctctatattagaggagtttttatgttaatctttgtatccctaatcctaaattcctaacatgtaataacttcaaatttaaaatatctcacatatatacatacagaagtttaatgtcgaatttcgatgttgtaaggtatcattttacagagttgttggtaatattggtaaggtaactgtcatataaattttgaattcaaagtgcttatctcttcatctttgcgaaagggtctctagcctagtggttaatcttcaagtcccagattcgattaccctcaggacgaattttcgggcttagttaaaaaaatctcgtattgtgcctcgtccgctctctggttacgatatcttgttagtgatgggaggccagtggtcggagattttctcggtcgggaccgttgtttgggtcattttgatggtcatccctccctgaccgaatttttatctcttcatctttgtgttttggtaccactgctagtgctcatattttctgcgttgaaattgtaagtcggatcttcactgcaaaagaatgaaaagttattgcgt

SEQ ID NO: 29501 - DNA, 812 bp, Zea Mays
gcgattttccctgccgcatgccatccttcttccggctccccgctccaccgctccagtacccagtgctcccggccgcggaccgcgggccgttatagctccacttcgcgtcagatcaacccgcccttcggcttcaagcacagggtcaccggcaacctccataggtgcctctccctcatcgctacgcttcatatctctttcctcacgaagcaatccctgtggtgcggggtctttattggtgaagctgagatagatgccgctggaacgctcgcccgttgttgccccctcctagaggatgtggctttcctccattgcagcaccgtggatgaggccgatcttgctggtatgcaatctctcaggttactttcgtccactccccctccacaccaacctgtgatgtttgggatggcgaacgggcgagggaaaaaacattccgaggctgcactgctctgcctccagacgctgtgatccttatcggctcctctggcgcctctccggcgagctacctcgattccaggtgagtctacgcgcattgcctcctccaacggtcggaccccttaacgacctgacgcgattcatggatccaagcatcgaggtatgccgtatgcgccgtccacagcagtaccgctcctcccctctcctggttcttgctctggcagcgcaaccatgaacgtcgtcgtccatcggcatcttgctctggcactcgcccattactgctattgtattgtaagtttgagcagaataaagttggggcgtgttcttggtctttgccttcagcttcctcctgacattgttaggtaaaagaaatctaccga

SEQ ID NO: 29502 - DNA, 2364 bp, Zea Mays
cgcttctttcttctagctgcttgtgatgccatgctccctcccccatgactgcgacggcgactcggcccgtgccgtggctctccctcgtctcctcgctctggacggcatgggtggcgtggacgttgcctgtggtgctcgcgacggcggcgccaccggaccggcaaggagcagagccggcctgctccccgacgctatgcggcggcgtgaacatctccttcccgttctggatcgtcgccgaccacgccacggagaccagctgtggactgatcgggttccaggaccaaaaggcaggacaagtaaggtagtcggaattgtatgtggagtagtagccgtcagtctattggcagcgtgcttcttttttgtctggcacaagcgcaagaggaggaaacaagctagagcaccaaatggcttcatgcatagtgaatcttcattgcaatcatacagcaaagaccttgagttgggtggctctccacagattttcacttatgaggagcttgaagaagctactgatggatttagtgactcgagggaacttggtgatggtggttttggaactgtttacaaagggaaactccaggatgggagagtagttgcggttaagcgcctctacaagaacaactacaaacgggttgaacagttcaaaaatgaggtagacattttgtcccgcctcctccaccagaacctagtcatcctatatggctgcacgtcgcgtagcagccgtgaccttatgctcgtgtacgagttcgtccctaacgggacagtcgcagaccatcttcatggatcccgtgcgtcagaacgcgaccttacatggcctctaagggtgaacattgccatagaaacagctgaagcacttgcatacctccatgcggtcgaaatcatacaccgcgatgtcaagaccaacaacatactgctggacaacagcttccacgtcaaagtcgccgactttgggttgtcgcgtctgtgccctcctgaagtcacacacgtatcaactgtcccgcagggcacaccaggctatgttgacccggtgtaccaccagtgctacaagctaactgagaagagcgacgtgtacagcttcggcgttgtgttggtggagctcatctcctctaaaccagctgttgacatgagcaggacccacagcgatatcaacctggccaacatggctctcaacagaatccagaaccacgaagttgatcggctggttgaccctgagcttggatatgagactgacgatggaacaaagaaatcgatagatctcgtcatggagttggcatttcagtgtttgcagttagaaagggattcaaggccgtcaatgaaggaagtagtggtggccctgaactgtatcaagaatggggattccccagagaataagatggacaggagctcctcatctcctaaggaagacgcacacttgctgaccaatagcatacagtattcgcctgactctgtaatccacagattccatagccaatcgactacgcactcggcagcatcaaatgctagtggatgagataccttgtatatatactgatcctgaagaaataaagccccatcggacgaattgtaaacagtatagagatttgttagtgaactgattcatctgggtaagttgtttcttctttgttaactggctcgtagtacaaagccgggttgtatgtgaccacagcaggagcttggcataatcttaaacattagggaaagtagtagaatcagtctcaggccaaaaaatctacaagctttttttttcattttgacaaaagaaggggggggggggctgccgatgacagtaatggagcaacacgaaacaaacaaatcaagctcgtactcattggctgacagtccagttccagtatttggtctatcatgtttaagttatcttgaccatgcactttgtggtcttttaggcgtgatcacttccattttatattaccacattcgcacttacccctgcagtcaatttttgtgagtggacatgattttcgggatgtgtatgagtgatgttggcgtccctgggtttgcgacactgctcttatccctggcaatttaagacatcttctagttttgctatcagtgtggaaattatcaggcatatatcttctgatggaagttcaggcctgaaccgctgtactcctagtcctaggcaatacaaggaagtaaattgcatatgcgtacctgaatgagcagacggcaaccagccgggtctccgctctcgccaggcgaggcggcagcttgtgcgacgccacagccacgatgggcaatcgcctcctcgccgccgtcagacggtagtccagttcgcggttgccggttgctgtcaggctcccggccccgaatcccgaacggattcgccctcctcgccctaggccgttt

SEQ ID NO: 29503 - DNA, 2859 bp, Zea Mays
atcatatccgtcttccggccgcctcgtcctattccattccttgttcactgttcggtcgggccaggaggtccctggccgccgaactaccgactccaaaacccaagccactctccatccccaatccgctatgcaaccggctcctcctcctcctactgctcgcttccttcctcctcccgccgccggcggccagcacggcaggctgctggcccaaggaatgcgggggggctcaacatcacgtacccgttctggctggaggagcccgggcagccgccgtgcgggccgccgtccttccggctccggtgcagcagcggcggcggctcgttcctgagcatcttccccggcaaccgctccttccacgttgtggaccacaacctcccgctcgccaccggctgcccgccgccgacggtgaacgtctcgctcctctcgccggccgggacgtttgccttcagccgagccaacagggagctgctcttcctcgggaagtgcacggcgttcccgccgccggattcggccgggtttcgcagcctgccttgcgacaaccgctccttcgtcagggtaggcgtcggccgggatttgtcgatcccgcacggctgcctcttcacggtagtgccgatcctccgggttcccgagggaggtgaggaggacggctacgtcgcgagcatggagaacgggtttctcgtggagtggacagcggtgccggacgattgccccaagtgcatggtacggctacggcgacacgaagttcgcctgtgattgctccggcgacaagtgcggaccaaaaggcaggacaagtaaggtagtcggaattgtatgtggagtagtagccgtcagtctattggcagcgtgcttcttttttgtctggcacaagcgcaagaggaggaaacaagctagagcaccaaatggcttcatgcatagtgaatcttcattgcaatcatacagcaaagaccttgagttgggtggctctccacagattttcacttatgaggagcttgaagaagctactgatggatttagtgactcgagggaacttggtgatggtggttttggaactgtttacaaagggaaactccaggatgggagagtagttgcggttaagcgcctctacaagaacaactacaaacgggttgaacagttcaaaaatgaggtagacattttgtcccgcctcctccaccagaacctagtcatcctatatggctgcacgtcgcgtagcagccgtgaccttatgctcgtgtacgagttcgtccctaacgggacagtcgcagaccatcttcatggatcccgtgcgtcagaacgcgaccttacatggcctctaagggtgaacattgccatagaaacagctgaagcacttgcatacctccatgcggtcgaaatcatacaccgcgatgtcaagaccaacaacatactgctggacaacagcttccacgtcaaagtcgccgactttgggttgtcgcgtctgtgccctcctgaagtcacacacgtatcaactgtcccgcagggcacaccaggctatgttgacccggtgtaccaccagtgctacaagctaactgagaagagcgacgtgtacagcttcggcgttgtgttggtggagctcatctcctctaaaccagctgttgacatgagcaggacccacagcgatatcaacctggccaacatggctctcaacagaatccagaaccacgaagttgatcggctggttgaccctgagcttggatatgagactgacgatggaacaaagaaatcgatagatctcgtcatggagttggcatttcagtgtttgcagttagaaagggattcaaggccgtcaatgaaggaagtagtggtggccctgaactgtatcaagaatggggattccccagagaataagatggacaggagctcctcatctcctaaggaagacgcacacttgctgaccaatagcatacagtattcgcctgactctgtaatccacagattccatagccaatcgactacgcactcggcagcatcaaatgctagtggatgagataccttgtatatatactgatcctgaagaaataaagccccatcggacgaattgtaaacagtatagagatttgttagtgaactgattcatctgggtaagttgtttcttctttgttaactggctcgtagtacaaagccgggttgtatgtgaccacagcaggagcttggcataatcttaaacattagggaaagtagtagaatcagtctcaggccaaaaaatctacaagctttttttttcattttgacaaaagaaggggggggggggctgccgatgacagtaatggagcaacacgaaacaaacaaatcaagctcgtactcattggctgacagtccagttccagtatttggtctatcatgtttaagttatcttgaccatgcactttgtggtcttttaggcgtgatcacttccattttatattaccacattcgcacttacccctgcagtcaatttttgtgagtggacatgattttcgggatgtgtatgagtgatgttggcgtccctgggtttgcgacactgctcttatccctggcaatttaagacatcttctagttttgctatcagtgtggaaattatcaggcatatatcttctgatggaagttcaggcctgaaccgctgtactcctagtcctaggcaatacaaggaagtaaattgcatatgcgtacctgaatgagcagacggcaaccagccgggtctccgctctcgccaggcgaggcggcagcttgtgcgacgccacagccacgatgggcaatcgcctcctcgccgccgtcagacggtagtccagttcgcggttgccggttgctgtcaggctcccggccccgaatcccgaacggattcgccctcctcgccctaggccgttt

SEQ ID NO: 29504 - DNA, 2234 bp, Zea Mays
gttcaatgctggctgtaggacactgagaatttgcaggtttatcattagcaaaacattgcgaatatacctatttgacatctgcaagtacatctatgttgtacatccgtacaggcttatttgttctcctgccactcaaagatgcaaaatggaccaaaaggcaggacaagtaaggtagtcggaattgtatgtggagtagtagccgtcagtctattggcagcgtgcttcttttttgtctggcacaagcgcaagaggaggaaacaagctagagcaccaaatggcttcatgcatagtgaatcttcattgcaatcatacagcaaagaccttgagttgggtggctctccacagattttcacttatgaggagcttgaagaagctactgatggatttagtgactcgagggaacttggtgatggtggttttggaactgtttacaaagggaaactccaggatgggagagtagttgcggttaagcgcctctacaagaacaactacaaacgggttgaacagttcaaaaatgaggtagacattttgtcccgcctcctccaccagaacctagtcatcctatatggctgcacgtcgcgtagcagccgtgaccttatgctcgtgtacgagttcgtccctaacgggacagtcgcagaccatcttcatggatcccgtgcgtcagaacgcgaccttacatggcctctaagggtgaacattgccatagaaacagctgaagcacttgcatacctccatgcggtcgaaatcatacaccgcgatgtcaagaccaacaacatactgctggacaacagcttccacgtcaaagtcgccgactttgggttgtcgcgtctgtgccctcctgaagtcacacacgtatcaactgtcccgcagggcacaccaggctatgttgacccggtgtaccaccagtgctacaagctaactgagaagagcgacgtgtacagcttcggcgttgtgttggtggagctcatctcctctaaaccagctgttgacatgagcaggacccacagcgatatcaacctggccaacatggctctcaacagaatccagaaccacgaagttgatcggctggttgaccctgagcttggatatgagactgacgatggaacaaagaaatcgatagatctcgtcatggagttggcatttcagtgtttgcagttagaaagggattcaaggccgtcaatgaaggaagtagtggtggccctgaactgtatcaagaatggggattccccagagaataagatggacaggagctcctcatctcctaaggaagacgcacacttgctgaccaatagcatacagtattcgcctgactctgtaatccacagattccatagccaatcgactacgcactcggcagcatcaaatgctagtggatgagataccttgtatatatactgatcctgaagaaataaagccccatcggacgaattgtaaacagtatagagatttgttagtgaactgattcatctgggtaagttgtttcttctttgttaactggctcgtagtacaaagccgggttgtatgtgaccacagcaggagcttggcataatcttaaacattagggaaagtagtagaatcagtctcaggccaaaaaatctacaagctttttttttcattttgacaaaagaaggggggggggggctgccgatgacagtaatggagcaacacgaaacaaacaaatcaagctcgtactcattggctgacagtccagttccagtatttggtctatcatgtttaagttatcttgaccatgcactttgtggtcttttaggcgtgatcacttccattttatattaccacattcgcacttacccctgcagtcaatttttgtgagtggacatgattttcgggatgtgtatgagtgatgttggcgtccctgggtttgcgacactgctcttatccctggcaatttaagacatcttctagttttgctatcagtgtggaaattatcaggcatatatcttctgatggaagttcaggcctgaaccgctgtactcctagtcctaggcaatacaaggaagtaaattgcatatgcgtacctgaatgagcagacggcaaccagccgggtctccgctctcgccaggcgaggcggcagcttgtgcgacgccacagccacgatgggcaatcgcctcctcgccgccgtcagacggtagtccagttcgcggttgccggttgctgtcaggctcccggccccgaatcccgaacggattcgccctcctcgccctaggccgttt

SEQ ID NO: 29505 - DNA, 1607 bp, Zea Mays
tgatcccttcatttttcttcccctgatttgccagctccataattgcctccatttgttccttggttagaggcctagagaaatgcctcgcaagttgctcaaccaaatccacctggtcattagaaaatgaagcctttgaattttgaaaatgtgatgaagcagaattatttaacttagcaactagaatttcttgtgccttaacaatggcatttctatttctcccaatcttcaattttttctttgcagccaacctagcactagatctcttgccaatagaagatgggatcacacccacctcataaacagactgcgctgaccctccctcaaccaagaaatttggcactaagctacactgagtgatcactgatcagacatcagactatcagaggggccaatttgctattggagcctcggagggacggggagaataatggccgtaaagctcaacaagccgcccaaggcgaagagcctgtggatcctcgtgcggcgcctcctccgcaggagtcgcaacccgccgccgccggcctcggccgcgctggaggacggcgagggggagaagagcggcctcctcagccgaagctccttggagcagctgctcgtgatgacggacgactgcgcccctggcgacgatggcgacggcgacggcgacgtctgccggtgcgccaagaagccgcacggccagccggtggccgtgctgctgccggcgctggcccggccagaggcgtccgcggctgcggtgccgtcggcagcaggtgccgcgcaccggaggttcgtgttcggcgggttccggcggcggctgctcattcgcaggccgtggcggcctatgctggtcgccatcccggagtgaccgatcgattaatcgcgtgtccggtgagttggtggcgtgaattagaggcgctgggggtatgattcggcattcgagtgcgtgagtcagtccgatcaacttcgaagcaattgggggtatgattcggcatttttctggggtgcgcttgtgatctgtctgtaactttgcgtgctcgctggttcttccctgttccttcctaagtcctaatcctaactagaaggttccgttcttttttctttctcaccattgaacatacaaagttatttgatccgaaaaggaatttatagcggaggatcggagtatgtttcatgttggtgtagtgaaacgcggtctgcaacgacctcggtccccgatacagcaaacccaatgttggttggtgtagtgaaacggtctgcagcttccctgccaatatttcagttcaaatttgtaaaatttctcaaacggtgtgactgagcttctttgcagtatctctggatagccgcgcccaagcttatcggtaaaggcaaagctgctttgcttttacttttgcactagttgccaaatgttcattgaaaccggggtcacgtctgttttggatcttcgccatcctatgtaggagtcactatagattaaatgggaaaaatatgtataagagatagaagagacagtgaaaaaaatgagagagaaaatagaacaggaagagttttgatttagatcttcggggttcatactgaagggtttgtctctgcatattgtccgcgaagagttcatctctactaattgtccc

SEQ ID NO: 29506 - DNA, 1314 bp, Zea Mays
cacgtttcttctcgcgtcatctccgcttgcgccgcccctagccccaccgtcgtcctccccgtgaagccgccggttgagccgcccccctctcgtgttgcctccatgtccgcgcagatatgcctcgctcgccaccccgtcgtgttcctccccgagacaccgtggccagcgtctagcccgcgctcttcatcgtcacggcgatgccggcttcccggaccccttccggcttgcttccatgccttcgcttcggtttgttctgagaggctacacttcctctatgagtcaaggttggccgtcggcaagagctccgaagggttccaggcgctgcagcaatctacaccagggccagcttcgcgtccacttctgcacaggcgagtgcggctaattgttccaagatgggcgagcgcccttgtgctttctctattcgctaaaattcttgaaaagcatgtaagcttttcgcaagtcatgggtaaagagaagttacacatcaacattgtggttaatggccatgtcgactctggcaagtcgaccaccactggccacctgatctacaagcttggaggcattgacaagcgtgtgattgagagttcattatcctggagctgcagagggactttatgtagcatgatccatgctcagaattttccagcaacttcgatgggaggaattttgtttgagcttgtgggcccaattcatatcagtcgcgaccctgggactatctcacgtcctgcggcgagcttgcagcgctgctgtgcctcggatacgcggacaagtcactacttgggactatttacacccctaaaagggaaacacacagatgaagttgctaaatccaagcaatcaactgtctccacaaaaacaaagaagtttaaggaaattcaatttcagaaacttcagagattgccagatgggtgccatcctgattttgataatgatcatctgtgttctgtaaataatcatgacctgcttcctgaaatgagtactctaagtgctgaccttcatctacttcgtgagacaggagtggaaaacatgaggacacctaaaagtcttcacgctgaacttaagcgtgagctgttaaagctaaatacggtgttaaagctaccagataatgtactctttctggccaaccagttccttgaatatcttttaaataatcatttagttgtgcgggagccacggagcatactgcatgtgttcaacatagccttgtgttggcgtgctgcttcttttctgaaatacactgagttggatcgtcgagaatcacttgcccttgcttcagatggattgaattatgaatgcaatgaggctccatcatag

SEQ ID NO: 29507 - DNA, 1508 bp, Zea Mays
gtttcttctcgcgtcatctccgcttgcgccgcccctagccccaccgtcgtcctccccgtgaagccgccggttgagccgcccccctctcgtgttgcctccatgtccgcgcagatatgcctcgctcgccaccccgtcgtgttcctccccgagacaccgtggccagcgtctagcccgcgctcttcatcgtcacggcgatgccggcttcccggaccccttccggcttgcttccatgccttcgcttcggtttgttctgtaagtgttcttctttcccatcctttcctccagaatttttccttctctcggttggatctgccagagtggtcagtctgtcggtttgcgtcgattcaatggggtttggcccatattgctggtacatggcgcaggagaggctacacttcctctatgagtcaaggttggccgtcggcaagagctccgaagggttccaggcgctgcagcaatctacaccagggccagcttcgcgtccacttctgcacaggcgagtgcggctaattgttccaagatgggcgagcgcccttgtgctttctctattcgctaaaattcttgaaaagcatgtaagcttttcgcaagtcatgggtaaagagaagttacacatcaacattgtggttaatggccatgtcgactctggcaagtcgaccaccactggccacctgatctacaagcttggaggcattgacaagcgtgtgattgagaggttcaggatcttcaggttgagttcgagaaggagaagcaagaaaaaacaaaactttgacaagtgttggataacttgaagacggaatcagaaacttcaagggtgttgtactgtttcttagaattttccagcaacttcgatgggaggaattttgtttgagcttgtgggcccaattcatatcagtcgcgaccctgggactatctcacgtcctgcggcgagcttgcagcgctgctgtgcctcggatacgcggacaagtcactacttgggactatttacacccctaaaagggaaacacacagatgaagttgctaaatccaagcaatcaactgtctccacaaaaacaaagaagtttaaggaaattcaatttcagaaacttcagagattgccagatgggtgccatcctgattttgataatgatcatctgtgttctgtaaataatcatgacctgcttcctgaaatgagtactctaagtgctgaccttcatctacttcgtgagacaggagtggaaaacatgaggacacctaaaagtcttcacgctgaacttaagcgtgagctgttaaagctaaatacggtgttaaagctaccagataatgtactctttctggccaaccagttccttgaatatcttttaaataatcatttagttgtgcgggagccacggagcatactgcatgtgttcaacatagccttgtgttggcgtgctgcttcttttctgaaatacactgagttggatcgtcgagaatcacttgcccttgcttcagatggattgaattatgaatgcaatgaggctccatcatag

SEQ ID NO: 29508 - DNA, 677 bp, Zea Mays
ggctcagccgcggcgcgatgcctggcagattcgccgaccaaggcagccgacacgaagacccgtctcgcgatacgagaagtcgttgccctgccgctccgtgcgtgtcaacagcgcgtggtcgtcagtgtgcctgctctggcgccctattaataccttctgcatccacgacgccacaagctcacattcacatcgcactctcctccagcctccaggcttggcaagcgtgcttcacatgaccacatccatgtcgaacagcgccgctagcgagaagcaatcgcagcaggcaggccacaggcaccggcgccgccgggcgggacaaggcagaggccgaggccgaggacaaggaggagtgacgggtgtagtcaggggggaacgggaacggctggagttgtttgcgtctcgcgttcttttcacctgtacgcaggaaatactcctcctgcataagactactgtacttttggataaaaaattttatttctacatgactatcacgtagatgtaggagcagtatctataactgtaggagtatatactagcacctattatctacagtattgtacgccctctgtgcgtgagtcgctctctgtgtctgtacggtgtaggtgtaggggaccgaattttttgtattttagcccttaaacagaagtaaatttacgtttagacctaaaaaaatttta

SEQ ID NO: 29509 - DNA, 541 bp, Zea Mays
aagaagcgttggatcaagtcatgtgtcgtcagatctcgccactgcgaggggaaagatgagtgcttatatatttttttcattaggatatgtttggacacaagaagaatctgattgggtacctaaccaggttattctaaagttaaatcgtgcaacttttttgtgttatgtggatcccaaaaggttagttagttcccttcctatttttgtcacatttatacatttcctcactctattggtgaactaaaacaattaccaagcacacatgctctcatagttttgattccatacacacgtcatgaaactaagacatttttttagttgacaacatagccccaaaataataatgaacacaattccaaaatctttcatacttttccccctttttagacaaatagagatttactccctgaagcattgtgttacatacatattacattttgtgttctggatgtgagtactcatacatttcttatttctcttcatgtcgacgatttccatggagctgtgactactcatctcgcaatttctaaatgtgactttt

SEQ ID NO: 29510 - DNA, 798 bp, Zea Mays
aaacaaccatgaaatacatatctataaattcttcacaaacaagtgggagaaacttcatgatctgccaaaggggaaagatgagtgcttatatatttttttcattaggatatgtttggacacaagaagaatctgattgggtacctaaccaggttattctaaagttaaatcgtgcaacttttttgtgttatgtggatcccaaaaggttagttagttcccttcctatttttgtcacatttatacatttcctcactctattggtgaactaaaacaattaccaagcacacatgctctcatagttttgattccatacacacgtcatgaaactaagacatttttttagttgacaacatagccccaaaataataatgaacacaattccaaaatctttcatacttttccccctttttagacaaatagagatttactccctgaagcattgtgttacatacatattacattttgtgttctggatgtgagtactcatacatttcttatttctcttcatgtcgacgatttccatggagctgtgactactcatctcgcaatttctaaatgtgacttttttctcctttgtaaggttgtgacgacccatgtgttgtcacggagcgtttcatcatcagttcggctgatagagaggaatttgggatgagagagactcaaactctagacctcattatattaggatggcttagcaagctatgagccaactgcgccacgaccccgttgtgactgttttccagatgaaagcatgttgacacaatgttgaacgtaacatcctggacaggaagcacatgattg

SEQ ID NO: 29511 - DNA, 2312 bp, Zea Mays
aaaaaactaaaaagtgggggaaggagaggattcggcaagttccggcctcatccgctgctttcctcgcaactatcggatcttgcgaggaacaatcaccaatcaccatccttaagaagatgatgcgatgcactgtaacgggcggcgggtgcgttgcttcgtggattggtgatcggaggtcgccggcggtcaaccccttcagcgtgcggatgtcgacgggcaacggtgggtggtgcggcggcctgaggtcgcgggcggcggaactctccggcctcgagatggcccatctacgtggcggcatcggggggctcttccgcgcgagcccgcgctatgggcgcttgcaagccacggccgcagttgaccctgaagatattccactggagaaggttcaagttaaatcctcaggacatgttatgccatatgttggtgttgcttgtttgggggctattctgtttggttatcatcttggtgtggtcaatggtgcgcttgaatatcttgcgaaggatcttggaattgctgaaaatgccgtcttacagggtatgacatatttttacatgctcaacttactcataccttttccccgtgtttgtaaaggaacatctaacacttcgattgactgtgcagtgcaatgctttctttgccaaggcatacaataggatgggtggttagcacatccctagctggtgcaacactaggttcctttaccgggggatctttggcagataaatttgggcggacaagaacattcatcctggatgcagccccactggctgtaggtgcattcttgagcgcaacagctcaagatatccgcaccatgattattggtcggttgcttgctggaattggtattgggatctcatctgcacttgtacccctttacatatctgagatatcaccaactgaaattcgtggaacacttggttccgttaatcaactttttatctgcattggaattcttgcagctttgttagctggattgcctttggcaggaaatcctgcctggtggaggacaatgtttggaattgctgtagttccatccattttgctggctgtaggaatggccttttcgcctgaaagccctcgatggctattccagcaaggaaaggttattcaagcagaatcggctgtaaaaagactatatggaaaagaaatggttaccgaaattatgtatgatctgagagctagtggccaaagttcttctgagaccgaagctggctggtttgatcttttcagcaagcgttactggaaagttgtgagtgtgggggcagcactgtttttgttccagcagcttgctggtataaacgctgttgtatattactctacatcggtgttccgtaatgcaggcattacatctgatgttgctgctagtgctcttgttggagcagccaatgtttttggcaccatggttgcatcttctctaatggacaagcaaggaaggaaaagccttctgatgacaagcttttctggaatgggtgcttcaatgctactcctagcattgtccttcacctggaaagctctggcaccttattctggtattcttgctgttgttggcactgttctgtatgtgctgtcttttgctctaggagctggtcctgttcctgccctgcttcttcctgaaatatttgcctccagaataagggccaaggctgttgcattatctctaggcatgcactgggtatccaacttttttattggcctgtacttcttgagtgttgtcaacaagtttgggatcagcaatgtatatttgggatttgcatcagtgtgcgtccttgcagttctctacatagctgggaatgtggtcgagaccaaggggcgatcacttgaagagattgaacgggaactaagtgtagcagaatgatgtgcttttgctagtcatgctgcggcgccgttttggtgattttgagaatgcaaccaagcacacaaccgagcatccttggacctggagactttctagtttcatgtagcagttaccaatcagattcagaaacaatgaactcgtcaatgtttctggagataagttttcattttttgttctaaaatttcttgtttctcttgtataggagactttgagatagtttcagctctaaagacgtgaatatggagcagctccgctaacgaatctaggattcactagtaaaatgtttagctatacactagctctagatttacgaaacagaggtctcccttggaatgacttgttttgctcttgatgttggctgacatatccttcgaagcaatttggagtaaaaatacacaatgaaataactgccatgttctcaatatggactatataggcctatgccgtgtgtgcattg

SEQ ID NO: 29512 - DNA, 2266 bp, Zea Mays
aaaaaactaaaaagtgggggaaggagaggattcggcaagttccggcctcatccgctgctttcctcgcaactatcggatcttgcgaggcatcgtcctcctatcctataatcgcatttcgaatcgcaaacggagacttcgcccctcttcacagattctaatcgaatttgccaatctgcaagctaacgtagaacaatcaccaatcaccatccttaagaagatgatgcgatgcactgtaacgggcggcgggtgcgttgcttcgtggattggtgatcggaggtcgccggcggtcaaccccttcagcgtgcggatgtcgacgggcaacggtgggtggtgcggcggcctgaggtcgcgggcggcggaactctccggcctcgagatggcccatctacgtggcggcatcggggggctcttccgcgcgagcccgcgctatgggcgcttgcaagccacggccgcagttgaccctgaagatattccactggagaaggttcaagttaaatcctcaggacatgttatgccatatgttggtgttgcttgtttgggggctattctgtttggttatcatcttggtgtggtcaatggtgcgcttgaatatcttgcgaaggatcttggaattgctgaaaatgccgtcttacagggatgggtggttagcacatccctagctggtgcaacactaggttcctttaccgggggatctttggcagataaatttgggcggacaagaacattcatcctggatgcagccccactggctgtaggtgcattcttgagcgcaacagctcaagatatccgcaccatgattattggtcggttgcttgctggaattggtattgggatctcatctgcacttgtacccctttacatatctgagatatcaccaactgaaattcgtggaacacttggttccgttaatcaactttttatctgcattggaattcttgcagctttgttagctggattgcctttggcaggaaatcctgcctggtggaggacaatgtttggaattgctgtagttccatccattttgctggctgtaggaatggccttttcgcctgaaagccctcgatggctattccagcaaggaaaggttattcaagcagaatcggctgtaaaaagactatatggaaaagaaatggttaccgaaattatgtatgatctgagagctagtggccaaagttcttctgagaccgaagctggctggtttgatcttttcagcaagcgttactggaaagttgtgagtgtgggggcagcactgtttttgttccagcagcttgctggtataaacgctgttgtatattactctacatcggtgttccgtaatgcaggcattacatctgatgttgctgctagtgctcttgttggagcagccaatgtttttggcaccatggttgcatcttctctaatggacaagcaaggaaggaaaagccttctgatgacaagcttttctggaatgggtgcttcaatgctactcctagcattgtccttcacctggaaagctctggcaccttattctggtatgtgctgtcttttgctctaggagctggtcctgttcctgccctgcttcttcctgaaatatttgcctccagaataagggccaaggctgttgcattatctctaggcatgcactgggtatccaacttttttattggcctgtacttcttgagtgttgtcaacaagtttgggatcagcaatgtatatttgggatttgcatcagtgtgcgtccttgcagttctctacatagctgggaatgtggtcgagaccaaggggcgatcacttgaagagattgaacgggaactaagtgtagcagaatgatgtgcttttgctagtcatgctgcggcgccgttttggtgattttgagaatgcaaccaagcacacaaccgagcatccttggacctggagactttctagtttcatgtagcagttaccaatcagattcagaaacaatgaactcgtcaatgtttctggagataagttttcattttttgttctaaaatttcttgtttctcttgtataggagactttgagatagtttcagctctaaagacgtgaatatggagcagctccgctaacgaatctaggattcactagtaaaatgtttagctatacactagctctagatttacgaaacagaggtctcccttggaatgacttgttttgctcttgatgttggctgacatatccttcgaagcaatttggagtaaaaatacacaatgaaataactgccatgttctcaatatggactatataggcctatgccgtgtgtgcattg

SEQ ID NO: 29513 - DNA, 2286 bp, Zea Mays
aaaaaactaaaaagtgggggaaggagaggattcggcaagttccggcctcatccgctgctttcctcgcaactatcggatcttgcgaggcatcgtcctcctatcctataatcgcatttcgaatcgcaaacggagacttcgcccctcttcacagattctaatcgaatttgccaatctgcaagctaacgtagaacaatcaccaatcaccatccttaagaagatgatgcgatgcactgtaacgggcggcgggtgcgttgcttcgtggattggtgatcggaggtcgccggcggtcaaccccttcagcgtgcggatgtcgacgggcaacggtgggtggtgcggcggcctgaggtcgcgggcggcggaactctccggcctcgagatggcccatctacgtggcggcatcggggggctcttccgcgcgagcccgcgctatgggcgcttgcaagccacggccgcagttgaccctgaagatattccactggagaaggttcaagttaaatcctcaggacatgttatgccatatgttggtgttgcttgtttgggggctattctgtttggttatcatcttggtgtggtcaatggtgcgcttgaatatcttgcgaaggatcttggaattgctgaaaatgccgtcttacagggatgggtggttagcacatccctagctggtgcaacactaggttcctttaccgggggatctttggcagataaatttgggcggacaagaacattcatcctggatgcagccccactggctgtaggtgcattcttgagctcaagatatccgcaccatgattattggtcggttgcttgctggaattggtattgggatctcatctgcacttgtacccctttacatatctgagatatcaccaactgaaattcgtggaacacttggttccgttaatcaactttttatctgcattggaattcttgcagctttgttagctggattgcctttggcaggaaatcctgcctggtggaggacaatgtttggaattgctgtagttccatccattttgctggctgtaggaatggccttttcgcctgaaagccctcgatggctattccagcaaggaaaggttattcaagcagaatcggctgtaaaaagactatatggaaaagaaatggttaccgaaattatgtatgatctgagagctagtggccaaagttcttctgagaccgaagctggctggtttgatcttttcagcaagcgttactggaaagttgtgagtgtgggggcagcactgtttttgttccagcagcttgctggtataaacgctgttgtatattactctacatcggtgttccgtaatgcaggcattacatctgatgttgctgctagtgctcttgttggagcagccaatgtttttggcaccatggttgcatcttctctaatggacaagcaaggaaggaaaagccttctgatgacaagcttttctggaatgggtgcttcaatgctactcctagcattgtccttcacctggaaagctctggcaccttattctggtattcttgctgttgttggcactgttctgtatgtgctgtcttttgctctaggagctggtcctgttcctgccctgcttcttcctgaaatatttgcctccagaataagggccaaggctgttgcattatctctaggcatgcactgggtatccaacttttttattggcctgtacttcttgagtgttgtcaacaagtttgggatcagcaatgtatatttgggatttgcatcagtgtgcgtccttgcagttctctacatagctgggaatgtggtcgagaccaaggggcgatcacttgaagagattgaacgggaactaagtgtagcagaatgatgtgcttttgctagtcatgctgcggcgccgttttggtgattttgagaatgcaaccaagcacacaaccgagcatccttggacctggagactttctagtttcatgtagcagttaccaatcagattcagaaacaatgaactcgtcaatgtttctggagataagttttcattttttgttctaaaatttcttgtttctcttgtataggagactttgagatagtttcagctctaaagacgtgaatatggagcagctccgctaacgaatctaggattcactagtaaaatgtttagctatacactagctctagatttacgaaacagaggtctcccttggaatgacttgttttgctcttgatgttggctgacatatccttcgaagcaatttggagtaaaaatacacaatgaaataactgccatgttctcaatatggactatataggcctatgccgtgtgtgcattg

SEQ ID NO: 29514 - DNA, 2293 bp, Zea Mays
aaaaaactaaaaagtgggggaaggagaggattcggcaagttccggcctcatccgctgctttcctcgcaactatcggatcttgcgaggcatcgtcctcctatcctataatcgcatttcgaatcgcaaacggagacttcgcccctcttcacagattctaatcgaatttgccaatctgcaagctaacgtagaacaatcaccaatcaccatccttaagaagatgatgcgatgcactgtaacgggcggcgggtgcgttgcttcgtggattggtgatcggaggtcgccggcggtcaaccccttcagcgtgcggatgtcgacgggcaacggtgggtggtgcggcggcctgaggtcgcgggcggcggaactctccggcctcgagatggcccatctacgtggcggcatcggggggctcttccgcgcgagcccgcgctatgggcgcttgcaagccacggccgcagttgaccctgaagatattccactggagaaggttcaagttaaatcctcaggacatgttatgccatatgttggtgttgcttgtttgggggctattctgtttggttatcatcttggtgtggtcaatggtgcgcttgaatatcttgcgaaggatcttggaattgctgaaaatgccgtcttacaggatgggtggttagcacatccctagctggtgcaacactaggttcctttaccgggggatctttggcagataaatttgggcggacaagaacattcatcctggatgcagccccactggctgtaggtgcattcttgagcgcaacagctcaagatatccgcaccatgattattggtcggttgcttgctggaattggtattgggatctcatctgcacttgtacccctttacatatctgagatatcaccaactgaaattcgtggaacacttggttccgttaatcaactttttatctgcattggaattcttgcagctttgttagctggattgcctttggcaggaaatcctgcctggtggaggacaatgtttggaattgctgtagttccatccattttgctggctgtaggaatggccttttcgcctgaaagccctcgatggctattccagcaaggaaaggttattcaagcagaatcggctgtaaaaagactatatggaaaagaaatggttaccgaaattatgtatgatctgagagctagtggccaaagttcttctgagaccgaagctggctggtttgatcttttcagcaagcgttactggaaagttgtgagtgtgggggcagcactgtttttgttccagcagcttgctggtataaacgctgttgtatattactctacatcggtgttccgtaatgcaggcattacatctgatgttgctgctagtgctcttgttggagcagccaatgtttttggcaccatggttgcatcttctctaatggacaagcaaggaaggaaaagccttctgatgacaagcttttctggaatgggtgcttcaatgctactcctagcattgtccttcacctggaaagctctggcaccttattctggtattcttgctgttgttggcactgttctgtatgtgctgtcttttgctctaggagctggtcctgttcctgccctgcttcttcctgaaatatttgcctccagaataagggccaaggctgttgcattatctctaggcatgcactgggtatccaacttttttattggcctgtacttcttgagtgttgtcaacaagtttgggatcagcaatgtatatttgggatttgcatcagtgtgcgtccttgcagttctctacatagctgggaatgtggtcgagaccaaggggcgatcacttgaagagattgaacgggaactaagtgtagcagaatgatgtgcttttgctagtcatgctgcggcgccgttttggtgattttgagaatgcaaccaagcacacaaccgagcatccttggacctggagactttctagtttcatgtagcagttaccaatcagattcagaaacaatgaactcgtcaatgtttctggagataagttttcattttttgttctaaaatttcttgtttctcttgtataggagactttgagatagtttcagctctaaagacgtgaatatggagcagctccgctaacgaatctaggattcactagtaaaatgtttagctatacactagctctagatttacgaaacagaggtctcccttggaatgacttgttttgctcttgatgttggctgacatatccttcgaagcaatttggagtaaaaatacacaatgaaataactgccatgttctcaatatggactatataggcctatgccgtgtgtgcattg

SEQ ID NO: 29515 - DNA, 2326 bp, Zea Mays
aaaaaactaaaaagtgggggaaggagaggattcggcaagttccggcctcatccgctgctttcctcgcaactatcggatcttgcgaggcatcgtcctcctatcctataatcgcatttcgaatcgcaaacggagacttcgcccctcttcacagattctaatcgaatttgccaatctgcaagctaacgtagaacaatcaccaatcaccatccttaagaagatgatgcgatgcactgtaacgggcggcgggtgcgttgcttcgtggattggtgatcggaggtcgccggcggtcaaccccttcagcgtgcggatgtcgacgggcaacggtgggtggtgcggcggcctgaggtcgcgggcggcggaactctccggcctcgagatggcccatctacgtggcggcatcggggggctcttccgcgcgagcccgcgctatgggcgcttgcaagccacggccgcagttgaccctgaagatattccactggagaaggttcaagttaaatcctcaggacatgttatgccatatgttggtgttgcttgtttgggggctattctgtttggttatcatcttggtgtggtcaatggtgcgcttgaatatcttgcgaaggatcttggaattgctgaaaatgccgtcttacaggtgcaatgctttctttgccaaggcatacaataggatgggtggttagcacatccctagctggtgcaacactaggttcctttaccgggggatctttggcagataaatttgggcggacaagaacattcatcctggatgcagccccactggctgtaggtgcattcttgagcgcaacagctcaagatatccgcaccatgattattggtcggttgcttgctggaattggtattgggatctcatctgcacttgtacccctttacatatctgagatatcaccaactgaaattcgtggaacacttggttccgttaatcaactttttatctgcattggaattcttgcagctttgttagctggattgcctttggcaggaaatcctgcctggtggaggacaatgtttggaattgctgtagttccatccattttgctggctgtaggaatggccttttcgcctgaaagccctcgatggctattccagcaaggaaaggttattcaagcagaatcggctgtaaaaagactatatggaaaagaaatggttaccgaaattatgtatgatctgagagctagtggccaaagttcttctgagaccgaagctggctggtttgatcttttcagcaagcgttactggaaagttgtgagtgtgggggcagcactgtttttgttccagcagcttgctggtataaacgctgttgtatattactctacatcggtgttccgtaatgcaggcattacatctgatgttgctgctagtgctcttgttggagcagccaatgtttttggcaccatggttgcatcttctctaatggacaagcaaggaaggaaaagccttctgatgacaagcttttctggaatgggtgcttcaatgctactcctagcattgtccttcacctggaaagctctggcaccttattctggtattcttgctgttgttggcactgttctgtatgtgctgtcttttgctctaggagctggtcctgttcctgccctgcttcttcctgaaatatttgcctccagaataagggccaaggctgttgcattatctctaggcatgcactgggtatccaacttttttattggcctgtacttcttgagtgttgtcaacaagtttgggatcagcaatgtatatttgggatttgcatcagtgtgcgtccttgcagttctctacatagctgggaatgtggtcgagaccaaggggcgatcacttgaagagattgaacgggaactaagtgtagcagaatgatgtgcttttgctagtcatgctgcggcgccgttttggtgattttgagaatgcaaccaagcacacaaccgagcatccttggacctggagactttctagtttcatgtagcagttaccaatcagattcagaaacaatgaactcgtcaatgtttctggagataagttttcattttttgttctaaaatttcttgtttctcttgtataggagactttgagatagtttcagctctaaagacgtgaatatggagcagctccgctaacgaatctaggattcactagtaaaatgtttagctatacactagctctagatttacgaaacagaggtctcccttggaatgacttgttttgctcttgatgttggctgacatatccttcgaagcaatttggagtaaaaatacacaatgaaataactgccatgttctcaatatggactatataggcctatgccgtgtgtgcattg

SEQ ID NO: 29516 - DNA, 2222 bp, Zea Mays
aaaaaactaaaaagtgggggaaggagaggattcggcaagttccggcctcatccgctgctttcctcgcaactatcggatcttgcgaggcatcgtcctcctatcctataatcgcatttcgaatcgcaaacggagacttcgcccctcttcacagattctaatcgaatttgccaatctgcaagctaacgtagaacaatcaccaatcaccatccttaagaagatgatgcgatgcactgtaacgggcggcgggtgcgttgcttcgtggattggtgatcggaggtcgccggcggtcaaccccttcagcgtgcggatgtcgacgggcaacggtgggtggtgcggcggcctgaggtcgcgggcggcggaactctccggcctcgagatggcccatctacgtggcggcatcggggggctcttccgcgcgagcccgcgctatgggcgcttgcaagccacggccgcagttgaccctgaagatattccactggagaaggttcaagttaaatcctcaggacatgttatgccatatgttggtgttgcttgtttgggggctattctgtttggttatcatcttggtgtggtcaatggtgcgcttgaatatcttgcgaaggatcttggaattgctgaaaatgccgtcttacagtggacatctgcttattgctcaggatgggtggttagcacatccctagctggtgcaacactaggttcctttaccgggggatctttggcagataaatttgggcggacaagaacattcatcctggatgcagccccactggctgtaggtgcattcttgagcgcaacagctcaagatatccgcaccatgattattggtcggttgcttgctggaattggtattgggatctcatctgcacttgtacccctttacatatctgagatatcaccaactgaaattcgtggaacacttggttccgttaatcaactttttatctgcattggaattcttgcagctttgttagctggattgcctttggcaggaaatcctgcctggtggaggacaatgtttggaattgctgtagttccatccattttgctggctgtaggaatggccttttcgcctgaaagccctcgatggctattccagcaaggaaaggttattcaagcagaatcggctgtaaaaagactatatggaaaagaaatggttaccgaaattatgtatgatctgagagctagtggccaaagttcttctgagaccgaagctggctggtttgatcttttcagcaagcgttactggaaaggcattacatctgatgttgctgctagtgctcttgttggagcagccaatgtttttggcaccatggttgcatcttctctaatggacaagcaaggaaggaaaagccttctgatgacaagcttttctggaatgggtgcttcaatgctactcctagcattgtccttcacctggaaagctctggcaccttattctggtattcttgctgttgttggcactgttctgtatgtgctgtcttttgctctaggagctggtcctgttcctgccctgcttcttcctgaaatatttgcctccagaataagggccaaggctgttgcattatctctaggcatgcactgggtatccaacttttttattggcctgtacttcttgagtgttgtcaacaagtttgggatcagcaatgtatatttgggatttgcatcagtgtgcgtccttgcagttctctacatagctgggaatgtggtcgagaccaaggggcgatcacttgaagagattgaacgggaactaagtgtagcagaatgatgtgcttttgctagtcatgctgcggcgccgttttggtgattttgagaatgcaaccaagcacacaaccgagcatccttggacctggagactttctagtttcatgtagcagttaccaatcagattcagaaacaatgaactcgtcaatgtttctggagataagttttcattttttgttctaaaatttcttgtttctcttgtataggagactttgagatagtttcagctctaaagacgtgaatatggagcagctccgctaacgaatctaggattcactagtaaaatgtttagctatacactagctctagatttacgaaacagaggtctcccttggaatgacttgttttgctcttgatgttggctgacatatccttcgaagcaatttggagtaaaaatacacaatgaaataactgccatgttctcaatatggactatataggcctatgccgtgtgtgcattg

SEQ ID NO: 29517 - DNA, 668 bp, Zea Mays
agattctatatgtaatcctttatagctggtatccaacttttttattggcctgtacttcttgagtgttgtcaacaagtttgggatcagcaatgtatatttgggatttgcatcagtgtgcgtccttgcagttctctacatagctgggaatgtggtcgagaccaaggggcgatcacttgaagagattgaacgggaactaagtgtagcagaatgatgtgcttttgctagtcatgctgcggcgccgttttggtgattttgagaatgcaaccaagcacacaaccgagcatccttggacctggagactttctagtttcatgtagcagttaccaatcagattcagaaacaatgaactcgtcaatgtttctggagataagttttcattttttgttctaaaatttcttgtttctcttgtataggagactttgagatagtttcagctctaaagacgtgaatatggagcagctccgctaacgaatctaggattcactagtaaaatgtttagctatacactagctctagatttacgaaacagaggtctcccttggaatgacttgttttgctcttgatgttggctgacatatccttcgaagcaatttggagtaaaaatacacaatgaaataactgccatgttctcaatatggactatataggcctatgccgtgtgtgcattg

SEQ ID NO: 29518 - DNA, 1365 bp, Zea Mays
ccaccataaaacacccgcacaccaccactctcactctcgcagtcgcagcaaccaactcggtcggtccgcgcccgcccgcccgcccgcctccgttggccatttgaatgtgagaaagagagggaccagtgatccgtcgtcggtcgccggccatgccgagatcctcctccagccccggctccggctccaagcgcatcctggggagggcgatggccgcgatcctggcgctgccgctgaccccgatcaccaaggccaagctcggcctgctgctcttcaagaagcgcgcctccgccgccgcgggcaggcgccgctgctacaagccgttccgccactacaactacgcctacgtgggcgagtaccagttctcgccctcccgctccccgctgctcccggccccgccccccggcgtcaccacctggcggagggccgccgccgccgccgccaggaggcgccggggcagggccaggatggtcctcgcctccctcttctgtggcggcggcggcgccgacgagctcgacgtcgccgtgctggacggcctcgcgcgtcgcaccgacgggcgcgcggagagggaccagctggtggtgctcgccccggctctcgagtgggcgcgcggccgcgacgacggtgcagcctacgcctgcagcagcaacgacgaggatgaggaggtggcggttgtggactacggggaggaaggcgacgtggaagtggacgaccgcgccgagcgcttcatcgagcggttctaccaggagatgaggctgcagaggcagcgctctctggtccagcgcctgctctagagacattcgtccgttgctgctgcttcaattccttggtcgatcgggcagaaccagtcgtggttgtcgctgctatcttagctgcacttcggttaaatctctccgtatcttgcatttgcgtcgttccatgtttttttgcttctcatgtggcaattctcttgtctgtggaaggagacattcgtctcccctgctgttgtactgttacttctagtccttacctatataatccatccttgtgttgcaatgttcatttttttttggggggtagtgttttgagtttgtacaattattacaaagcatgcgtgctacacacctgtttctattagcacaaaatgccaacttctgatttcaaaatcgacatcgtggattctttaattcggaactggaaaggagcggctaccagagcaaatcatggaaaacgatcaggatatataatgtggggatgacaagtcgaagagcagctgacggtcagctgtctcgtatcctggatagattaagcgaatcgaggagtgccttttcgacagagtactgcttcgagaactggctctgatttgttctctaattcctgcttgtttcc

SEQ ID NO: 29519 - DNA, 1050 bp, Zea Mays
ataacaattacattcattcctttttccttctaatctgaattagaattttaatttcctatgattctatcttctcttctgtaaactatttatccttaaattattaagaacaaataaaaaattatgctagataaataatcaaatagatatacgactttatgaattatgcatcatgcacctatatatatatatatgtaaagcacgatacaactagcactgagattaaatcattccacataacattaacactgctacaacttagtgatactccaatgatagaacaaacagtcgctgttaaaccatatgtgaaatgagtgcatattggaaacacaagaaattttatcctggaatgataagattaacctcaatcataggatggtgatcgcacaacatatgagtagtagtgtgcctctagctccttgaggctcgctgctacctcctgcccaatcctttccagcattctctcagttcccttagcttgctgacccagcacttcaatccccctataacagtatcacattttgcacttcatatcaccatggagtatccaatttaatattacagacatacatctatcttcacatattacttccactgttcagagacttctttaattttgagtataaatatttatatagatatattaccttaaatacaagagagttatacatatcataaaatatcctttagttttaataatgtgtgttgtcaatatatagaaaactttagaatttagatattggtggtcaaaggtaaaagagtttgactttgtacaaacctatgagaactaatcttcaccgaacgaaggaagcatatcctttatggttctacagtctgtattctcaagcagtcaaactataataagattacatcatccaacatcttatatgttgtgcatgatataaactgatgacaataaaggacagctggttgaatccaacacctccttgtctagtaaattaactagattggagccaagttgagcttgttggaacttaaaacatggaagaatcacattcatttgttttatagtatagtatgtttggaacaaat

SEQ ID NO: 29520 - DNA, 331 bp, Zea Mays
caccaatattcgatcaattaataacaattaccagcaaaagacgagttaaagaaagaactattcaatcaactaataacaattactgatagctactagctgactatcaattaataacaattactgatagctactactagctgattagctcatggtaacatcactagcagaagacgagttaaaagaaggaatgacagcaccggatattgtgaatttggacaatttgcctttcagggttcctgcgccctcgccgatgggacgacggctccacggtgcttgatgggccggcaacgcagtctctcaccggtggtcaggcacccggtaggcttgccgc

SEQ ID NO: 29521 - DNA, 3537 bp, Zea Mays
cattatctcagtgtttgacaaaccagcgcgcgttaggcgcgcgttatccactagtacgttaacaattgatatcagattcatcgattctcgactccacgttcaaggcacctactgctgatgcgtcgctcacgctcgcccttgagaatcagactcgagctctgctggcggaattggatgttcgcctccaatccattgatggcaagtgggagacgcgcgtcaatgcgttggagtctcaagtgtcggagacgactcgatccctcaccgagcgttcgtccgccctccgcgctgacgtcgaggcgcatatcaccgcctcgaacgtctcgacggattcgcggatccgccaactcgaggtcgatgtgggtggtcgcctcacggctctggaatcaaacgcccagatgttggattactggaggctgcaggtggattcctcgatccacaccctccagacctccatggattgggtgtgttctgaggctgccaggcgtgagattccactctcccctgcgccgcccttaggaggttccgacgcgccgggcattctcggtgcacctggagtcttcgccccaaccggatcggtgccgcggcgcccaccagccggcgtgaactaaaccgacggccctcgtttcggccaccgcttcgacaattacctccgggacagtgaattggggcctctagatccctctattcattgcccggtcatgggaagaagctgattcgtccaagcgacgtgattctcgtggattggatgcatcttggagtggtcgttctcagatgaaacaactccaagcacctcctcccaggtgggataaatcactggggggagagccggttatctccaagcagacacatgccaatgccactcctactgctcctgattcagtaacttctgacagtcgggtggcatcccttcgtgcatatcgtctcgcccatggactctaccggttttgtgctgaaaaatgggtaaagggacacatatgctcttctactgtgcagctttatgcgatgcaagaattgtgggacatgttacttcctgacaagcaagaatcagaattcagaaggcgaatttgaagactctgctgaacagtttatgatctgtctgtctcaagaggctgcttcacccaaggttgctgctaaaacattcaggctgcaaggctatcttcaaggtgtggagttgctcattgcaggtggttaatggtcagaccctctagtgtacccaacatattccagatgttgaatggtctgttcaagggttcacttgttgttcaacattcaagctgctccctctgcctacttatgatgcaattttgggaatagactggttgacccaatatagtccgatgtatgttgattggaagcacacgtggctgtcctttcctcatggtaaccaatcagtggtgcttcgtggtctgactccattaatgccatcagggtcattgctgcagattcagcttgtatgcactttatatggggaaccattgtgtgctgtcaccgatctgtctattccaccttcagttcaacaactgctatacacatatgcatatttgtttgaagaaccaaaaaccttgcccccgagtcgattttgtgaccactccattcctcttatccaaggtgtcaggccagtcaatattcagccttaccgccttacaccggccctcaaggatgaagttgagtcccaggtgactgacatgttgaacaatggaattattcaacacagcaacagtgccttttctttcccagttctgttggtgaagaaaaaggataactcttggcgcttatgtgttgactatcggcacctaaatgctcttactgtcaaatctaagtacacagtacctgttattgacgaattgctagatgagctatttggagcatcgtggttttctatattggatttaagggctggtttccaccaaattcttttgcaccagggtgaagaatacaagacggcattccaaacatatctgggccactatgagttccgagttatggctttcggccttacgggtgctcctggcacatttcaaaaggccatgaatcatacattagctccaatgctccgtaaatgcgctcttgtgttctttgatgacatattagtgtacaatgtatccttggagagtcacctcaaccatttgcagcaggtgtttgagctgttagccaaagaacaatggaaaattaagctatccaagtgttcctttgctcagaatcaggtttcttaccttggccatgttgtcagttctaagggggttactacagatcctactaaaatccaagcaatagttgattggcctactccacaatgcctcaaggaattacgtagttttctcggtcttgctggttattacaggaaatttattcgctattttggaattatttgccagcccttgacatccctcttaaaaaagggagtgctctttgtttggacagcggaccacgacttggcttttcacaccttacaacaagccttggtgtcggcccctgtacttgccttgccggatttctcctcgcaattcaccattgaaacagatgccagtgacctcgacattggggcagtattaatgcagcatggtcaccctctagcgttcctcagcaaggccttgggtcctaaatctcggggtctatccacctacgaaaaagagtatatggccattattgttgctgtccaacaatggcttcctatcttcaacacagagagtttgtgatagtcactgaccataaaaacctaacgagcagcgacttcacactccttggcaacataaagtcttcactaaattgcatggacttcagtaccggatccaatatcgtaaaggcaatgaaaatcgtgctgcggatgccttgtctcgacgtggccatgttgaactccatgttgggcgtgtttggttcggcttttttctgaccagcttttctgaaaagctggctgtggggaaaagctagctgttgggaaaagctggtggttagaatttaggtgtttggttcgccagctgtgcagaaaagttgttcgtgagaatctacgtgtttggataatcagattctcatattgcagattctgttcgaacaaacgataaaatgaaacccataacgaacaaaaggtcattacacaataattagtggagttgattacatcataagtactgttacattgacatacttaactacgacactaatgcattagcaattgcatctcgaaaagcactcatgtctaactcatcagatgtgctactactactctcacctaaaggtacatcatgactgatgctattaggtcctagttcatcaaagtctctatcgtgtaactgtgttgtccaatataattatggcttgctctgaggccgggactgccgctggaaagtgactaccataatactgaacagaagcctctgttgtcggacgaccagcatctaagtgccctttcattaagagttttccactgtgtgaacattctctttaaggagtcccacctattcttcatttgatccctactgtaaggagaatacaagcaagagtacaatgaagcaagggagtaactacctacctgaaggacag

SEQ ID NO: 29522 - DNA, 3631 bp, Zea Mays
gcgttatccactagtacgttaacaattgatatcagattcatcgattctcgactccacgttcaaggcacctactgctgatgcgtcgctcacgctcgcccttgagaatcagactcgagctctgctggcggaattggatgttcgcctccaatccattgatggcaagtgggagacgcgcgtcaatgcgttggagtctcaagtgtcggagacgactcgatccctcaccgagcgttcgtccgccctccgcgctgacgtcgaggcgcatatcaccgcctcgaacgtctcgacggattcgcggatccgccaactcgaggtcgatgtgggtggtcgcctcacggctctggaatcaaacgcccagatgttggattactggaggctgcaggtggattcctcgatccacaccctccagacctccatggattgggtgtgttctgaggctgccaggcgtgagattccactctcccctgcgccgcccttaggaggttccgacgcgccgggcattctcggtgcacctggagtcttcgccccaaccggatcggtgccgcggcgcccaccagccggcgtgaactaaaccgacggccctcgtttcggccaccgcttcgacaattacctccgggacagtgaattggggcctctagatccctctattcattgcccggtcatggcctggagatttggatactgcatgcgctcttgccctgttgcaggaagaagctgattcgtccaagcgacgtgattctcgtggattggatgcatcttggagtggtcgttctcagatgaaacaactccaagcacctcctcccaggtgggataaatcactggggggagagccggttatctccaagcagacacatgccaatgccactcctactgctcctgattcagtaacttctgacagtcgggtggcatcccttcgtgcatatcgtctcgcccatggactctaccggttttgtgctgaaaaatgggtaaagggacacatatgctcttctactgtgcagctttatgcgatgcaagaattgtgggacatgttacttcctgacaagcaagaatcagaattcagaaggcgaatttgaagactctgctgaacagtttatgatctgtctgtctcaagaggctgcttcacccaaggttgctgctaaaacattcaggctgcaaggctatcttcaaggtgtggagttgctcatgtaagtggactcgggtagttctcattgtttcctgagctctacagtgggttcctctctatccgttgtccaacctttggagcaacaaatctcagtgcaggtggttaatggtcagaccctctagtgtacccaacatattccagatgttgaatggtctgttcaagggttcacttgttgttcaacattcaagctgctccctctgcctacttatgatgcaattttgggaatagactggttgacccaatatagtccgatgtatgttgattggaagcacacgtggctgtcctttcctcatggtaaccaatcagtggtgcttcgtggtctgactccattaatgccatcagggtcattgctgcagattcagcttgtatgcactttatatggggaaccattgtgtgctgtcaccgatctgtctattccaccttcagttcaacaactgctatacacatatgcatatttgtttgaagaaccaaaaaccttgcccccgagtcgattttgtgaccactccattcctcttatccaaggtgtcaggccagtcaatattcagccttaccgccttacaccggccctcaaggatgaagttgagtcccaggtgactgacatgttgaacaatggaattattcaacacagcaacagtgccttttctttcccagttctgttggtgaagaaaaaggataactcttggcgcttatgtgttgactatcggcacctaaatgctcttactgtcaaatctaagtacacagtacctgttattgacgaattgctagatgagctatttggagcatcgtggttttctatattggatttaagggctggtttccaccaaattcttttgcaccagggtgaagaatacaagacggcattccaaacatatctgggccactatgagttccgagttatggctttcggccttacgggtgctcctggcacatttcaaaaggccatgaatcatacattagctccaatgctccgtaaatgcgctcttgtgttctttgatgacatattagtgtacaatgtatccttggagagtcacctcaaccatttgcagcaggtgtttgagctgttagccaaagaacaatggaaaattaagctatccaagtgttcctttgctcagaatcaggtttcttaccttggccatgttgtcagttctaagggggttactacagatcctactaaaatccaagcaatagttgattggcctactccacaatgcctcaaggaattacgtagttttctcggtcttgctggttattacaggaaatttattcgctattttggaattatttgccagcccttgacatccctcttaaaaaagggagtgctctttgtttggacagcggaccacgacttggcttttcacaccttacaacaagccttggtgtcggcccctgtacttgccttgccggatttctcctcgcaattcaccattgaaacagatgccagtgacctcgacattggggcagtattaatgcagcatggtcaccctctagcgttcctcagcaaggccttgggtcctaaatctcggggtctatccacctacgaaaaagagtatatggccattattgttgctgtccaacaatggcttcctatcttcaacacagagagtttgtgatagtcactgaccataaaaacctaacgagcagcgacttcacactccttggcaacataaagtcttcactaaattgcatggacttcagtaccggatccaatatcgtaaaggcaatgaaaatcgtgctgcggatgccttgtctcgacgtggccatgttgaactccatgttgggcgtgtttggttcggcttttttctgaccagcttttctgaaaagctggctgtggggaaaagctagctgttgggaaaagctggtggttagaatttaggtgtttggttcgccagctgtgcagaaaagttgttcgtgagaatctacgtgtttggataatcagattctcatattgcagattctgttcgaacaaacgataaaatgaaacccataacgaacaaaaggtcattacacaataattagtggagttgattacatcataagtactgttacattgacatacttaactacgacactaatgcattagcaattgcatctcgaaaagcactcatgtctaactcatcagatgtgctactactactctcacctaaaggtacatcatgactgatgctattaggtcctagttcatcaaagtctctatcgtgtaactgtgttgtccaatataattatggcttgctctgaggccgggactgccgctggaaagtgactaccataatactgaacagaagcctctgttgtcggacgaccagcatctaagtgccctttcattaagagttttccactgtgtgaacattctctttaaggagtcccacctattcttcatttgatccctactgtaaggagaatacaagcaagagtacaatgaagcaagggagtaactacctacctgaaggacag

SEQ ID NO: 29523 - DNA, 4022 bp, Zea Mays
atcagattcatcgattctcgactccacgttcaaggcacctactgctgatgcgtcgctcacgctcgcccttgagaatcagactcgagctctgctggcggaattggatgttcgcctccaatccattgatggcaagtgggagacgcgcgtcaatgcgttggagtctcaagtgtcggagacgactcgatccctcaccgagcgttcgtccgccctccgcgctgacgtcgaggcgcatatcaccgcctcgaacgtctcgacggattcgcggatccgccaactcgaggtcgatgtgggtggtcgcctcacggctctggaatcaaacgcccagatgttggattactggaggctgcaggtggattcctcgatccacaccctccagacctccatggattgggtgtgttctgaggctgccaggcgtgagattccactctcccctgcgccgcccttaggaggttccgacgcgccgggcattctcggtgcacctggagtcttcgccccaaccggatcggtgccgcggcgcccaccagccggcgtgaactaaaccgacggccctcgtttcggccaccgcttcgacaattacctccgggacagtgaattggggcctctagatccctctattcattgcccggtcatgggtatgtgggatgttcactcttcaccttcatttgcgtttgctcagaccagcggttcccaccatcagagtccacacggtcgtcccctcgacggcctgcctaagcttagttttccctcctttgatgggactaacccgaagctgtggcagaagaggtgtgaagattatttcgatatgtatgatactgagcagattgtgtgggtgaaagcagccacaatgcacttgtcggggtggctgtgcgatggcttcagtcaattgagcctcgcctcccatcctggtcatggcagcgtttttgtcacgcagtgcacgaacgctttggtcgcgaacaacatgaactcctcatccgtaaactattccacattaggcaaaccccacagtccatgactatgtcgatcgtttttcagaattagttgatgtattagtgacatatgagcacaccacagaccctatttattataccatgcattttatagatgggttgcgcgatgatagtaagtctgatatacttgtccaacagcctggagatttggatactgcatgcgctcttgccctgttgcaggaagaagctgattcgtccaagcgacgtgattctcgtggattggatgcatcttggagtggtcgttctcagatgaaacaactccaagcacctcctcccaggtgggataaatcactggggggagagccggttatctccaagcagacacatgccaatgccactcctactgctcctgattcagtaacttctgacagtcgggtggcatcccttcgtgcatatcgtctcgcccatggactctaccggttttgtgctgaaaaatgggtaaagggacacatatgctcttctactgtgcagctttatgcgatgcaagaattgtgggacatgttacttcctgacaagcaagaatcagaattcagaaggcgaatttgaagactctgctgaacagtttatgatctgtctgtctcaagaggctgcttcacccaaggttgctgctaaaacattcaggctgcaaggctatcttcaaggtgtggagttgctcattgcaggtggttaatggtcagaccctctagtgtacccaacatattccagatgttgaatggtctgttcaagggttcacttgttgttcaacattcaagctgctccctctgcctacttatgatgcaattttgggaatagactggttgacccaatatagtccgatgtatgttgattggaagcacacgtggctgtcctttcctcatggtaaccaatcagtggtgcttcgtggtctgactccattaatgccatcagggtcattgctgcagattcagcttgtatgcactttatatggggaaccattgtgtgctgtcaccgatctgtctattccaccttcagttcaacaactgctatacacatatgcatatttgtttgaagaaccaaaaaccttgcccccgagtcgattttgtgaccactccattcctcttatccaaggtgtcaggccagtcaatattcagccttaccgccttacaccggccctcaaggatgaagttgagtcccaggtgactgacatgttgaacaatggaattattcaacacagcaacagtgccttttctttcccagttctgttggtgaagaaaaaggataactcttggcgcttatgtgttgactatcggcacctaaatgctcttactgtcaaatctaagtacacagtacctgttattgacgaattgctagatgagctatttggagcatcgtggttttctatattggatttaagggctggtttccaccaaattcttttgcaccagggtgaagaatacaagacggcattccaaacatatctgggccactatgagttccgagttatggctttcggccttacgggtgctcctggcacatttcaaaaggccatgaatcatacattagctccaatgctccgtaaatgcgctcttgtgttctttgatgacatattagtgtacaatgtatccttggagagtcacctcaaccatttgcagcaggtgtttgagctgttagccaaagaacaatggaaaattaagctatccaagtgttcctttgctcagaatcaggtttcttaccttggccatgttgtcagttctaagggggttactacagatcctactaaaatccaagcaatagttgattggcctactccacaatgcctcaaggaattacgtagttttctcggtcttgctggttattacaggaaatttattcgctattttggaattatttgccagcccttgacatccctcttaaaaaagggagtgctctttgtttggacagcggaccacgacttggcttttcacaccttacaacaagccttggtgtcggcccctgtacttgccttgccggatttctcctcgcaattcaccattgaaacagatgccagtgacctcgacattggggcagtattaatgcagcatggtcaccctctagcgttcctcagcaaggccttgggtcctaaatctcggggtctatccacctacgaaaaagagtatatggccattattgttgctgtccaacaatggcttcctatcttcaacacagagagtttgtgatagtcactgaccataaaaacctaacgagcagcgacttcacactccttggcaacataaagtcttcactaaattgcatggacttcagtaccggatccaatatcgtaaaggcaatgaaaatcgtgctgcggatgccttgtctcgacgtggccatgttgaactccatgttgggcgtgtttggttcggcttttttctgaccagcttttctgaaaagctggctgtggggaaaagctagctgttgggaaaagctggtggttagaatttaggtgtttggttcgccagctgtgcagaaaagttgttcgtgagaatctacgtgtttggataatcagattctcatattgcagattctgttcgaacaaacgataaaatgaaacccataacgaacaaaaggtcattacacaataattagtggagttgattacatcataagtactgttacattgacatacttaactacgacactaatgcattagcaattgcatctcgaaaagcactcatgtctaactcatcagatgtgctactactactctcacctaaaggtacatcatgactgatgctattaggtcctagttcatcaaagtctctatcgtgtaactgtgttgtccaatataattatggcttgctctgaggccgggactgccgctggaaagtgactaccataatactgaacagaagcctctgttgtcggacgaccagcatctaagtgccctttcattaagagttttccactgtgtgaacattctctttaaggagtcccacctattcttcatttgatccctactgtaaggagaatacaagcaagagtacaatgaagcaagggagtaactacctacctgaaggacag

SEQ ID NO: 29524 - DNA, 3815 bp, Zea Mays
tccgccctccgcgctgacgtcgaggcgcatatcaccgcctcgaacgtctcgacggattcgcggatccgccaactcgaggtcgatgtgggtggtcgcctcacggctctggaatcaaacgcccagatgttggattactggaggctgcaggtggattcctcgatccacaccctccagacctccatggattgggtgtgttctgaggctgccaggcgtgagattccactctcccctgcgccgcccttaggaggttccgacgcgccgggcattctcggtgcacctggagtcttcgccccaaccggatcggtgccgcggcgcccaccagccggcgtgaactaaaccgacggccctcgtttcggccaccgcttcgacaattacctccgggacagtgaattggggcctctagatccctctattcattgcccggtcatgggtatgtgggatgttcactcttcaccttcatttgcgtttgctcagaccagcggttcccaccatcagagtccacacggtcgtcccctcgacggcctgcctaagcttagttttccctcctttgatgggactaacccgaagctgtggcagaagaggtgtgaagattatttcgatatgtatgatactgagcagattgtgtgggtgaaagcagccacaatgcacttgtcggggtggctgtgcgatggcttcagtcaattgagcctcgcctcccatcctggtcatggcagcgtttttgtcacgcagtgcacgaacgctttggtcgcgaacaacatgaactcctcatccgtaaactattccacattaggcaaaccccacagtccatgactatgtcgatcgtttttcagaattagttgatgtattagtgacatatgagcacaccacagaccctatttattataccatgcattttatagatgggttgcgcgatgatagtaagtctgatatacttgtccaacagcctggagatttggatactgcatgcgctcttgccctgttgcaggaagaagctgattcgtccaagcgacgtgattctcgtggattggatgcatcttggagtggtcgttctcagatgaaacaactccaagcacctcctcccaggtgggataaatcactggggggagagccggttatctccaagcagacacatgccaatgccactcctactgctcctgattcagtaacttctgacagtcgggtggcatcccttcgtgcatatcgtctcgcccatggactctaccggttttgtgctgaaaaatgggtaaagggacacatatgctcttctactgtgcagctttatgcgatgcaagaattgtgggacatgttacttcctgacaagcaagaatcagaattcagaaggcgaatttgaagactctgctgaacagtttatgatctgtctgtctcaagaggctgcttcacccaaggttgctgctaaaacattcaggctgcaaggctatcttcaaggtgtggagttgctcatgtggttaatggtcagaccctctagtgtacccaacatattccagatgttgaatggtctgttcaagggttcacttgttgttcaacattcaagctgctccctctgcctacttatgatgcaattttgggaatagactggttgacccaatatagtccgatgtatgttgattggaagcacacgtggctgtcctttcctcatggtaaccaatcagtggtgcttcgtggtctgactccattaatgccatcagggtcattgctgcagattcagcttgtatgcactttatatggggaaccattgtgtgctgtcaccgatctgtctattccaccttcagttcaacaactgctatacacatatgcatatttgtttgaagaaccaaaaaccttgcccccgagtcgattttgtgaccactccattcctcttatccaaggtgtcaggccagtcaatattcagccttaccgccttacaccggccctcaaggatgaagttgagtcccaggtgactgacatgttgaacaatggaattattcaacacagcaacagtgccttttctttcccagttctgttggtgaagaaaaaggataactcttggcgcttatgtgttgactatcggcacctaaatgctcttactgtcaaatctaagtacacagtacctgttattgacgaattgctagatgagctatttggagcatcgtggttttctatattggatttaagggctggtttccaccaaattcttttgcaccagggtgaagaatacaagacggcattccaaacatatctgggccactatgagttccgagttatggctttcggccttacgggtgctcctggcacatttcaaaaggccatgaatcatacattagctccaatgctccgtaaatgcgctcttgtgttctttgatgacatattagtgtacaatgtatccttggagagtcacctcaaccatttgcagcaggtgtttgagctgttagccaaagaacaatggaaaattaagctatccaagtgttcctttgctcagaatcaggtttcttaccttggccatgttgtcagttctaagggggttactacagatcctactaaaatccaagcaatagttgattggcctactccacaatgcctcaaggaattacgtagttttctcggtcttgctggttattacaggaaatttattcgctattttggaattatttgccagcccttgacatccctcttaaaaaagggagtgctctttgtttggacagcggaccacgacttggcttttcacaccttacaacaagccttggtgtcggcccctgtacttgccttgccggatttctcctcgcaattcaccattgaaacagatgccagtgacctcgacattggggcagtattaatgcagcatggtcaccctctagcgttcctcagcaaggccttgggtcctaaatctcggggtctatccacctacgaaaaagagtatatggccattattgttgctgtccaacaatggcttcctatcttcaacacagagagtttgtgatagtcactgaccataaaaacctaacgagcagcgacttcacactccttggcaacataaagtcttcactaaattgcatggacttcagtaccggatccaatatcgtaaaggcaatgaaaatcgtgctgcggatgccttgtctcgacgtggccatgttgaactccatgttgggcgtgtttggttcggcttttttctgaccagcttttctgaaaagctggctgtggggaaaagctagctgttgggaaaagctggtggttagaatttaggtgtttggttcgccagctgtgcagaaaagttgttcgtgagaatctacgtgtttggataatcagattctcatattgcagattctgttcgaacaaacgataaaatgaaacccataacgaacaaaaggtcattacacaataattagtggagttgattacatcataagtactgttacattgacatacttaactacgacactaatgcattagcaattgcatctcgaaaagcactcatgtctaactcatcagatgtgctactactactctcacctaaaggtacatcatgactgatgctattaggtcctagttcatcaaagtctctatcgtgtaactgtgttgtccaatataattatggcttgctctgaggccgggactgccgctggaaagtgactaccataatactgaacagaagcctctgttgtcggacgaccagcatctaagtgccctttcattaagagttttccactgtgtgaacattctctttaaggagtcccacctattcttcatttgatccctactgtaaggagaatacaagcaagagtacaatgaagcaagggagtaactacctacctgaaggacag

SEQ ID NO: 29525 - DNA, 3731 bp, Zea Mays
aaattatggaccgttctgggccgactcatgtggtcctagtcctgagtcctagtcctgtcatcctgtgcagctgcccgtagccttatctgctttcgttcgaccaggtgtcgttcgctttgccttgccccggcaaagcaatggcgctccgtctctctgctccgttcctcacctcgcgctttacgccgtcgcaagcgttggccccgcgcaggcgcacccgggcccgctctttctctccgtcagccgatgcgcgagccgcgtgcttcaagagaccctacacgtccgttctaattatccccacgggcgtcggcgcggccgtcgggggcttcgccggcgacgcccttccggttgcgcgagccgtcgccggcgtcgctgactgtgtcatatcccacccaaacgtgctgaacgctgcgatgctatactggccgatgcccaatacactttacgtggaagggtacgcccttgacaggttcgcagaaggatcctgggctctccaacctgttcaccagaacaaggtaggtttggtgctggattctggaatcgaggaagacctccggctgcgccacttgcagattgcagatgccactagggcttctcttggcttgcctgtagtggagtacattgttacagatgctcctctggagatcaagacatggtttgatcccaggtgtgggaagtcaacagggagtgttggtaactctgattctcttctgagagcagttgacgcactagtgaaacattcagatgtgaatgctgtggctgtagttgcacgctttccagatgatgacccagaagattcagattgttaccgggaaggaaagggtgttgatctattggcaggagttgaagcaattatcagtcatttagttgtgaaagaattcaaaatcccttctgcacatgctcctgcagtgttacccccaccactcagcccattagtatgccctagatctgctgctgaagaggtatatgtctatcgttgtgtaacaacatcagggtacacgtacacagagtactagaaagagagaattaggagatagcatggcacaattcggtggtcatgttgaacctgatcacgagtgagagtcaacatgcggttagttagagaggtttaggctgcagtgtacgtccccttgcatcaattgatgagcacaaaggagaaaaaaattacaagctcaaacaccagtgagtatcaagaccttctagctcctcctcacctcctaattgtggtggtagcctaatggttctaatccccctttatgcctgcctgtgctgtagaatgaattctatcgacttttgatagatttgggtcaacccttttctccgttggaattcccttaaatgtagctcactccctcttgcaagggggagagaggttacatgaacatcggattctatcggctaagacccaactaccttgttcttatcatgttcttggagccataccagggctcatgtcccgaatgtggcatagtgtgagaggtgtcctttcttcaggcggttgccatacctaccatgtcgtgtcctctggcgtcggggtccataggtacaatttagctggtaaccggggcaaccttttatacttgatagtgatttatgggcccgtcgggctccccccccttgtgggggaggcttgagggtttggtcttggtgttgtaattcggaccactttggacctttcctttcttaatttaatgatgcgtagctctcctgcgctttcgaaaaaaaatacttgatagtgatttatggtacacttcacgtgtgcacgcttggctataggatcgatgcacatacaattagtgatcttgaccgtactgcatcctaagtcgtggcaatagcacaaatgtcaggtttgtagtggtgtccatcatatattcaatgtgttgtacctgagacttatccattaagctttcgctatggacttatcttcaagtccttagtcatgggacccatttctaggggttgtattgtcttcggtgggcctagacacatccttctaccatgagacaatattgcacttagacatgtcgtgttctttgtcttctcggtgcactgggctttgaaaggcttagacctggtcacctccactaggcaaggctagggtgcttaaggacctccggtctagcgagggtccacaacgctcaagtaccaatgtgtgttttggggcccggaccgccctggacacttatctttcataatgccctggggtgtgaggggcctcgggaacttaggcttattctcatgaataccctaggacctgaggggccaaagggcttattctcatgagcgccttgggcacgagaggccctaggggctttaaactgataactaccccttcggggcacaaggtttccaagggctgatattatttcttctctaggattttctcagggcactacgtgcctcgggcccttcgatcggcccggaggccagtgcgccctaggtctctttgtgactttacaagtcttagcgcgtagttatccattcggggtgctctgatgtaaaatctcctgaagctcctcctctggccagggctaagggaggtctccgaggtgcggtggtcctatcttagtgggtcccgcgacaactttctgtactgggatcattgaatgcatcttagcagctgctgcaggtatgcacttcctcgggcgctgacaatgttcatgtggactcgtgcatatcttagttaagtaattatcaatttactagtgatatgtttcacaatcacactactattacaaggcttatattagactagtgctatgcgatcagttttaagttataatttttccgcctttttgcctctttggtcaatattttttctttttatttttaacctgattgcttattacttctgtatgttgtttgtttattcataatatgtctttaccaagtagattggacatacatttctgccttgtgtgcttgctgggttaagcaatgctccacaatatgtcatgaggagcggaaccttggaccatggttgcatagtggctggtgatgttgacagtgttattcttcccaaggactcctgtggaggagatggtacacttgcttttgctcgagctgcaagaaaggacaagcccttaatcattaccgtgcaggaaaatgagacagtgcttgatgatactccagacaagttcggcatagaagtgctgaatgtccgaaactactgggaagcaattggagtcatcgctgctcacaaagcaggtgtcaatccacatgctcttagaagacgagggattgatcatcttaagagccctcaacgatcatattctgcctactctgcaagtcctaaaccatctgcccgtcctccagtgcacgataaagtacagagacagcagctagttaggcaaatttagtactaaaaagagcactagcagcagtagaaattactttagatagtcgtgattaggaacttccaaaattttgaagcccagatacatatttttcagaccgtcctgaagtgtaggaccatagcatcacacgaattttgtcgtgttatccagtctggacttcgctgacatgagtctttctccactgccttacatttctccaatctctagtcggtttgtcaatcatttacatcattattttgccaaggtatacacagcgctggtaatcattttcgtccgacaatattttagtaagttgggtagaagcagtagtactgttttgtttcccactgaacatgaaagtttatgctgaaatgccaagctgttatggcctggtttagg

SEQ ID NO: 29526 - DNA, 2160 bp, Zea Mays
aaattatggaccgttctgggccgactcatgtggtcctagtcctgagtcctagtcctgtcatcctgtgcagctgcccgtagccttatctgctttcgttcgaccaggtgtcgttcgctttgccttgccccggcaaagcaatggcgctccgtctctctgctccgttcctcacctcgcgctttacgccgtcgcaagcgttggccccgcgcaggcgcacccgggcccgctctttctctccgtcagccgatgcgcgagccgcgtgcttcaagagaccctacacgtccgttctaattatccccacgggcgtcggcgcggccgtcgggggcttcgccggcgacgcccttccggttgcgcgagccgtcgccggcgtcgctgactgtgtcatatcccacccaaacgtgctgaacgctgcgatgctatactggccgatgcccaatacactttacgtggaagggtacgcccttgacaggttcgcagaaggatcctgggctctccaacctgttcaccagaacaaggtttggtgctggattctggaatcgaggaagacctccggctgcgccacttgcagattgcagatgccactagggcttctcttggcttgcctgtagtggagtacattgttacagatgctcctctggagatcaagacatggtttgatcccaggtgtgggaagtcaacagggagtgttggtaactctgattctcttctgagagcagttgacgcactagtgaaacattcagatgtgaatgctgtggctgtagttgcacgctttccagatgatgacccagaagattcagattgttaccgggaaggaaagggtgttgatctattggcaggagttgaagcaattatcagtcatttagttgtgaaagaattcaaaatcccttctgcacatgctcctgcagtgttacccccaccactcagcccattagtatgccctagatctgctgctgaagagggctaagggaggtctccgaggtgcggtggtcctatcttagtgggtcccgcgacaactttctgtactgggatcattgaatgcatcttagcagctgctgcaggtatgcacttcctcgggcgctgacaatgttcatgtggactcgtgcatatcttagttaagtaattatcaatttactagtgatatgtttcacaatcacactactattacaaggcttatattagactagtgctatgcgatcagttttaagttataatttttccgcctttttgcctctttggtcaatattttttctttttatttttaacctgattgcttattacttctgtatgttgtttgtttattcataatatgtctttaccaagtagattggacatacatttctgccttgtgtgcttgctgggttaagcaatgctccacaatatgtcatgaggagcggaaccttggaccatggttgcatagtggctggtgatgttgacagtgttattcttcccaaggactcctgtggaggagatggtacacttgcttttgctcgagctgcaagaaaggacaagcccttaatcattaccgtgcaggaaaatgagacagtgcttgatgatactccagacaagttcggcatagaagtgctgaatgtccgaaactactgggaagcaattggagtcatcgctgctcacaaagcaggtgtcaatccacatgctcttagaagacgagggattgatcatcttaagagccctcaacgatcatattctgcctactctgcaagtcctaaaccatctgcccgtcctccagtgcacgataaagtacagagacagcagctagttaggcaaatttagtactaaaaagagcactagcagcagtagaaattactttagatagtcgtgattaggaacttccaaaattttgaagcccagatacatatttttcagaccgtcctgaagtgtaggaccatagcatcacacgaattttgtcgtgttatccagtctggacttcgctgacatgagtctttctccactgccttacatttctccaatctctagtcggtttgtcaatcatttacatcattattttgccaaggtatacacagcgctggtaatcattttcgtccgacaatattttagtaagttgggtagaagcagtagtactgttttgtttcccactgaacatgaaagtttatgctgaaatgccaagctgttatggcctggtttagg

SEQ ID NO: 29527 - DNA, 2015 bp, Zea Mays
aaattatggaccgttctgggccgactcatgtggtcctagtcctgagtcctagtcctgtcatcctgtgcagctgcccgtagccttatctgctttcgttcgaccaggtgtcgttcgctttgccttgccccggcaaagcaatggcgctccgtctctctgctccgttcctcacctcgcgctttacgccgtcgcaagcgttggccccgcgcaggcgcacccgggcccgctctttctctccgtcagccgatgcgcgagccgcgtgcttcaagagaccctacacgtccgttctaattatccccacgggcgtcggcgcggccgtcgggggcttcgccggcgacgcccttccggttgcgcgagccgtcgccggcgtcgctgactgtgtcatatcccacccaaacgtgctgaacgctgcgatgctatactggccgatgcccaatacactttacgtggaagggtacgcccttgacaggttcgcagaaggatcctgggctctccaacctgttcaccagaacaaggtttggtgctggattctggaatcgaggaagacctccggctgcgccacttgcagattgcagatgccactagggcttctcttggcttgcctgtagtggagtacattgttacagatgctcctctggagatcaagacatggtttgatcccaggtgtgggaagtcaacagggagtgttggtaactctgattctcttctgagagcagttgacgcactagtgaaacattcagatgtgaatgctgtggctgtagttgcacgctttccagatgatgacccagaagattcagattgttaccgggaaggaaagggtgttgatctattggcaggagttgaagcaattatcagtcatttagttgtgaaagaattcaaaatcccttctgcacatgctcctgcagtgttacccccaccactcagcccattagtatgccctagatctgctgctgaagaggtatatgtctatcgttgtgtaacaacatcagggtacacgtacacagagtactagaaagagagaattaggagatagcatggcacaattcggtggtcatgttgaacctgatcacgagtgagagtcaacatgcggttagttagagaggtttaggctgcagtgtacgtccccttgcatcaattgatgagcacaaaggagaaaaaaattacaagctcaaacaccaattggacatacatttctgccttgtgtgcttgctgggttaagcaatgctccacaatatgtcatgaggagcggaaccttggaccatggttgcatagtggctggtgatgttgacagtgttattcttcccaaggactcctgtggaggagatggtacacttgcttttgctcgagctgcaagaaaggacaagcccttaatcattaccgtgcaggaaaatgagacagtgcttgatgatactccagacaagttcggcatagaagtgctgaatgtccgaaactactgggaagcaattggagtcatcgctgctcacaaagcaggtgtcaatccacatgctcttagaagacgagggattgatcatcttaagagccctcaacgatcatattctgcctactctgcaagtcctaaaccatctgcccgtcctccagtgcacgataaagtacagagacagcagctagttaggcaaatttagtactaaaaagagcactagcagcagtagaaattactttagatagtcgtgattaggaacttccaaaattttgaagcccagatacatatttttcagaccgtcctgaagtgtaggaccatagcatcacacgaattttgtcgtgttatccagtctggacttcgctgacatgagtctttctccactgccttacatttctccaatctctagtcggtttgtcaatcatttacatcattattttgccaaggtatacacagcgctggtaatcattttcgtccgacaatattttagtaagttgggtagaagcagtagtactgttttgtttcccactgaacatgaaagtttatgctgaaatgccaagctgttatggcctggtttagg

SEQ ID NO: 29528 - DNA, 3466 bp, Zea Mays
aaattatggaccgttctgggccgactcatgtggtcctagtcctgagtcctagtcctgtcatcctgtgcagctgcccgtagccttatctgctttcgttcgaccaggtgtcgttcgctttgccttgccccggcaaagcaatggcgctccgtctctctgctccgttcctcacctcgcgctttacgccgtcgcaagcgttggccccgcgcaggcgcacccgggcccgctctttctctccgtcagccgatgcgcgagccgcgtgcttcaagagaccctacacgtccgttctaattatccccacgggcgtcggcgcggccgtcgggggcttcgccggcgacgcccttccggttgcgcgagccgtcgccggcgtcgctgactgtgtcatatcccacccaaacgtgctgaacgctgcgatgctatactggccgatgcccaatacactttacgtggaagggtacgcccttgacaggttcgcagaaggatcctgggctctccaacctgttcaccagaacaaggtaggtttggtgctggattctggaatcgaggaagacctccggctgcgccacttgcagattgcagatgccactagggcttctcttggcttgcctgtagtggagtacattgttacagatgctcctctggagatcaagacatggtttgatcccaggtgtgggaagtcaacagggagtgttggtaactctgattctcttctgagagcagttgacgcactagtgaaacattcagatgtgaatgctgtggctgtagttgcacgctttccagatgatgacccagaagattcagattgttaccgggaaggaaagggtgttgatctattggcaggagttgaagcaattatcagtcatttagttgtgaaagaattcaaaatcccttctgcacatgctcctgcagtgttacccccaccactcagcccattagtatgccctagatctgctgctgaagaggtatatgtctatcgttgtgtaacaacatcagggtacacgtacacagagtactagaaagagagaattaggagatagcatggcacaattcggtggtcatgttgaacctgatcacgagtgagagtcaacatgcggttagttagagaggtttaggctgcagtgtacgtccccttgcatcaattgatgagcacaaaggagaaaaaaattacaagctcaaacaccagtgagtatcaagaccttctagctcctcctcacctcctaattgtggtggtagcctaatggttctaatccccctttatgcctgcctgtgctgtagaatgaattctatcgacttttgatagatttgggtcaacccttttctccgttggaattcccttaaatgtagctcactccctcttgcaagggggagagaggttacatgaacatcggattctatcggctaagacccaactaccttgttcttatcatgttcttggagccataccagggctcatgtcccgaatgtggcatagtgtgagaggtgtcctttcttcaggcggttgccatacctaccatgtcgtgtcctctggcgtcggggtccataggtacaatttagctggtaaccggggcaaccttttatacttgatagtgatttatgggcccgtcgggctccccccccttgtgggggaggcttgagggtttggtcttggtgttgtaattcggaccactttggacctttcctttcttaatttaatgatgcgtagctctcctgcgctttcgaaaaaaaatacttgatagtgatttatggtacacttcacgtgtgcacgcttggctataggatcgatgcacatacaattagtgatcttgaccgtactgcatcctaagtcgtggcaatagcacaaatgtcaggtttgtagtggtgtccatcatatattcaatgtgttgtacctgagacttatccattaagctttcgctatggacttatcttcaagtccttagtcatgggacccatttctaggggttgtattgtcttcggtgggcctagacacatccttctaccatgagacaatattgcacttagacatgtcgtgttctttgtcttctcggtgcactgggctttgaaaggcttagacctggtcacctccactaggcaaggctagggtgcttaaggacctccggtctagcgagggtccacaacgctcaagtaccaatgtgtgttttggggcccggaccgccctggacacttatctttcataatgccctggggtgtgaggggcctcgggaacttaggcttattctcatgaataccctaggacctgaggggccaaagggcttattctcatgagcgccttgggcacgagaggccctaggggctttaaactgataactaccccttcggggcacaaggtttccaagggctgatattatttcttctctaggattttctcagggcactacgtgcctcgggcccttcgatcggcccggaggccagtgcgccctaggtctctttgtgactttacaagtcttagcgcgtagttatccattcggggtgctctgatgtaaaatctcctgaagctcctcctctggccagggctaagggaggtctccgaggtgcggtggtcctatcttagtgggtcccgcgacaactttctgtactgggatcattgaatgcatcttagcagctgctgcagattggacatacatttctgccttgtgtgcttgctgggttaagcaatgctccacaatatgtcatgaggagcggaaccttggaccatggttgcatagtggctggtgatgttgacagtgttattcttcccaaggactcctgtggaggagatggtacacttgcttttgctcgagctgcaagaaaggacaagcccttaatcattaccgtgcaggaaaatgagacagtgcttgatgatactccagacaagttcggcatagaagtgctgaatgtccgaaactactgggaagcaattggagtcatcgctgctcacaaagcaggtgtcaatccacatgctcttagaagacgagggattgatcatcttaagagccctcaacgatcatattctgcctactctgcaagtcctaaaccatctgcccgtcctccagtgcacgataaagtacagagacagcagctagttaggcaaatttagtactaaaaagagcactagcagcagtagaaattactttagatagtcgtgattaggaacttccaaaattttgaagcccagatacatatttttcagaccgtcctgaagtgtaggaccatagcatcacacgaattttgtcgtgttatccagtctggacttcgctgacatgagtctttctccactgccttacatttctccaatctctagtcggtttgtcaatcatttacatcattattttgccaaggtatacacagcgctggtaatcattttcgtccgacaatattttagtaagttgggtagaagcagtagtactgttttgtttcccactgaacatgaaagtttatgctgaaatgccaagctgttatggcctggtttagg

SEQ ID NO: 29529 - DNA, 2164 bp, Zea Mays
aaattatggaccgttctgggccgactcatgtggtcctagtcctgagtcctagtcctgtcatcctgtgcagctgcccgtagccttatctgctttcgttcgaccaggtgtcgttcgctttgccttgccccggcaaagcaatggcgctccgtctctctgctccgttcctcacctcgcgctttacgccgtcgcaagcgttggccccgcgcaggcgcacccgggcccgctctttctctccgtcagccgatgcgcgagccgcgtgcttcaagagaccctacacgtccgttctaattatccccacgggcgtcggcgcggccgtcgggggcttcgccggcgacgcccttccggttgcgcgagccgtcgccggcgtcgctgactgtgtcatatcccacccaaacgtgctgaacgctgcgatgctatactggccgatgcccaatacactttacgtggaagggtacgcccttgacaggttcgcagaaggatcctgggctctccaacctgttcaccagaacaaggtaggtttggtgctggattctggaatcgaggaagacctccggctgcgccacttgcagattgcagatgccactagggcttctcttggcttgcctgtagtggagtacattgttacagatgctcctctggagatcaagacatggtttgatcccaggtgtgggaagtcaacagggagtgttggtaactctgattctcttctgagagcagttgacgcactagtgaaacattcagatgtgaatgctgtggctgtagttgcacgctttccagatgatgacccagaagattcagattgttaccgggaaggaaagggtgttgatctattggcaggagttgaagcaattatcagtcatttagttgtgaaagaattcaaaatcccttctgcacatgctcctgcagtgttacccccaccactcagcccattagtatgccctagatctgctgctgaagagggctaagggaggtctccgaggtgcggtggtcctatcttagtgggtcccgcgacaactttctgtactgggatcattgaatgcatcttagcagctgctgcaggtatgcacttcctcgggcgctgacaatgttcatgtggactcgtgcatatcttagttaagtaattatcaatttactagtgatatgtttcacaatcacactactattacaaggcttatattagactagtgctatgcgatcagttttaagttataatttttccgcctttttgcctctttggtcaatattttttctttttatttttaacctgattgcttattacttctgtatgttgtttgtttattcataatatgtctttaccaagtagattggacatacatttctgccttgtgtgcttgctgggttaagcaatgctccacaatatgtcatgaggagcggaaccttggaccatggttgcatagtggctggtgatgttgacagtgttattcttcccaaggactcctgtggaggagatggtacacttgcttttgctcgagctgcaagaaaggacaagcccttaatcattaccgtgcaggaaaatgagacagtgcttgatgatactccagacaagttcggcatagaagtgctgaatgtccgaaactactgggaagcaattggagtcatcgctgctcacaaagcaggtgtcaatccacatgctcttagaagacgagggattgatcatcttaagagccctcaacgatcatattctgcctactctgcaagtcctaaaccatctgcccgtcctccagtgcacgataaagtacagagacagcagctagttaggcaaatttagtactaaaaagagcactagcagcagtagaaattactttagatagtcgtgattaggaacttccaaaattttgaagcccagatacatatttttcagaccgtcctgaagtgtaggaccatagcatcacacgaattttgtcgtgttatccagtctggacttcgctgacatgagtctttctccactgccttacatttctccaatctctagtcggtttgtcaatcatttacatcattattttgccaaggtatacacagcgctggtaatcattttcgtccgacaatattttagtaagttgggtagaagcagtagtactgttttgtttcccactgaacatgaaagtttatgctgaaatgccaagctgttatggcctggtttagg

SEQ ID NO: 29530 - DNA, 679 bp, Zea Mays
atattaattagtgatggaagatgaacccttaatcattaccgtgcaggaaaatgagacagtgcttgatgatactccagacaagttcggcatagaagtgctgaatgtccgaaactactgggaagcaattggagtcatcgctgctcacaaagcaggtgtcaatccacatgctcttagaagacgagggattgatcatcttaagagccctcaacgatcatattctgcctactctgcaagtcctaaaccatctgcccgtcctccagtgcacgataaagtacagagacagcagctagttaggcaaatttagtactaaaaagagcactagcagcagtagaaattactttagatagtcgtgattaggaacttccaaaattttgaagcccagatacatatttttcagaccgtcctgaagtgtaggaccatagcatcacacgaattttgtcgtgttatccagtctggacttcgctgacatgagtctttctccactgccttacatttctccaatctctagtcggtttgtcaatcatttacatcattattttgccaaggtatacacagcgctggtaatcattttcgtccgacaatattttagtaagttgggtagaagcagtagtactgttttgtttcccactgaacatgaaagtttatgctgaaatgccaagctgttatggcctggtttagg

SEQ ID NO: 29531 - DNA, 639 bp, Zea Mays
gtgcaagcaagcagccaggcgcgtgcccaggcaacgcagccgccagccgagcaggagcagcgcgcgcccgagaagcaagcaggagcggcacgccggcaagcaagcagttgcaggcttgcagcgcgcgcgcacccgagcagcgagcggccaagcgactggagcgagaaagctgcaagcagcagggcagcaggccgccgtccgctggctggctgggcatttgggcaagcaaccgaagcaatcagccaaggaggcaatcaggcaagcaattaagcaaagcaagagcggccagcaagcagcgatttgagtcgcgcaacaagcaagcagaccagcgcaggcgcagcaagcagcaagcagtgtacaatatgaagagagttcgaacaattgcatcattttatcaagtcgcgtcaaatcaagaatcgaatgaaatcattcaaaacgtacaaattgggactaatttggatgaaaatgaaaacaatcaagaatcactagatgttgggactgcacaaaataatacggaatcaatagatagtgagattgttggtgatcctggacttcgaaaaccaattgaagagttagatgtgaacattcgagatgttgttagaagagagtatttattgttaggcccttgtcaaccaaaag

SEQ ID NO: 29532 - DNA, 1895 bp, Zea Mays
gacagatagacatactgtattcccattggtttatcgtctaattgaattggctttgattttgcctgttgcaactgcaactgtagaaagagcattttcagccatgaaaatcatcaagacagatttgcgaaataagatgggtgatgaatggatgagtcattgtatgatttgctatatcgagagggatatatttgcaagtattgaagatcgtcaaattatagagcattatcaagccatgagaacacgaagggagcaaataccaaagacaagaaatatttctattgttgatgaaagcaatctaagtaattgatgaattggtcattgagacaaagatctataattttcttaattaggtaaccacttgttttagtcaattttacgttattttagaattgttgtgttcatatgaatcttatatgtgtcattatctatgcatttttatggtttaaaatttttagccgatacaaatattttttagtgttattttcggccctacccttagaagtatgctggctccgccactggctacacgcctcctccacggtaaaagcaagccgacccggaacaagaagctagtctatggacgtcggatcggacaagaagtgccatgcatgcgctatggctgatcgtcaaagtttcacgtccggtccggaggatattggacgagaaaacggcaaaggatcctgccctgccagccattggcgtaggtaggtgaccgaccgggcgcgagtgagatcaacttggcgatttcgggtgcgaaatttgcaccccaaggaccacgtacggccccaacctgtccgggaccgggggtgctctggagtctggcctctggggctctttgcagctctcccgctctatttatccgtttctctcccaaccccctccgctccggagtccggactctccaactgatctcgcactgacagtcctgtcacaccgccaatggaagaagccccggagctgatcagccccaggatctccttctcgcacgacctagcagccgcgacaccgccgccagcgccagcgccagccctgcttgccggccggcggtcggacgcgtcgctgctcgggtcacgcccgcgcctcccggagccggacttcgacttcgacttcgacttcgccaacgccacggccgccgccgacgtcgccccggccgaccgcctcttcgccggcggcaagctgctgccgctgccgccgcttccgcccgctccgaagcccaacaacccgtgcaagccacaggcttgcagcagcagcagcaccagtgtcaagcaggcgcagcagcaggcgtgccaacagaggcggccggggtcgtgggcgtcctcgttctcacgcagcagcagcgccaactcggccacgacgggcgcgccgcggtccgcggggaggttcggatgcccgccgttcccgctgatgcgcagctggtcagtcggctcggcggcgagcgtggcgcggggtgctgctgctgccaccttgggtgatgatggcgcggccccggacgccgccgccgccagccatcggcctcatcatcaccagtaccacaagaaattcggcatcgtcgctggggctgctactagcaacaacggtggtagctcaagaacttactactatggaggtagcagaaaaggcggcggcggcggcggcagtagcggtagccatggtgttagggttcggccggtgctgaacgtgccgttcatcggcacaagtgtgtccaacgtgctcagctacttgctctgtgactgtagccacgggaccaagaagagtaggggcttgtagagttaactggcctggtgctggtgcctcagctaatacgttgaatgtagagggctcgtgtttggaacataaaccactacccaataacccaacggacatccaacagttccttccgacataattgaactcgc

SEQ ID NO: 29533 - DNA, 1591 bp, Zea Mays
tactagtcaaacgtcaaagattcaatcttttattgttgcagcaatgttgtactctgctccttgcacagagcaccccctgatgacagatttttcagaatatggattctgactgcacatcagcatggcaggatctacccatctaaatcagaaacggaacacgactttaagcaaattcatggagacggaagcacagcatcactcgacctatgcttcgatccgcatgttccatgtcatggtgaagctcttcccgagcggcaatgccagcccgccgatctccaccatgacgccgttcttactatcctcgacgccttcttccccctgcagcttcgcgttgccacctgctgcaaagtaagggctcgacgtcgcgacggcagtggcgtccgtgccgtccacctggatggcaaggtccttgccggtaccctccagacccagcaccgagagcttctcgacgaccagccccttgtgcaggctgtagcttcccatcagcacctccgaccgcaccgtcacggcctttccgcgcacgctcgcgtggaaacgcacgtacgacgcctggccttccgcgagcaccatctccgggcgctcgtcgtcgtccacgtacaccgcgccctccgcgtcggcctgcgtcgccccgaacgggaacgcgaccacgagcgtgaacggcgtcgcccgggcgtccttggagacgaacccgccgcgctgcatcggcaggatcgtgttctggtacacgtgcacgttgatctcgttcagcggcgcgtccagcttcactggggccccgctcctggacaccaccaccttactcatgtcgaacaggttgtaccaggtgcccggcgggaacatggcgctcaccgaagtggcgccctgctcgaggaccggggacaccatgacgccgggaccgagcaggaactgcgtgctcagcccgtagcacggcgtgaagtcggggaaggagaagaacaccggccgcgccacgggggccccggtcaggtgcgcctggtagttgagcgtgtacaggtaggggagcagcttgtaccgcatgccgagcgcgttccgagcagacttcgccacggagtcccagacatacagctcctgcctcggtgacgcgaagttggcatggtccctggagaaggggtagaaggccccgagctcaatccacctgttgcagagctcctcagtcggcgacgggtagaaaccgcagatgtcagagccaaccatgggcatgccgaagatgccaaagttgagcatggttgagatcgagtaacggagattttcccacgtgcccttgttgtctccggtccagtgcgcggcatacgcccccgacccgacgaacgtggagcgggtcaggatgaacggcctcttcccctgcagcccttgcagcgccgtatgcgtggcaatggcctgcgagaagccatacagactgtgcgcattgtactccaggatgccgttgtagtgtgtagcgctggttgcgatggtgttgaagccgagacgggcagtctgcccggaggcgttgatcttgtacggcggctcatcccacctcgtgtttgtaaggttcttgcaatccaagcaacagagccatggtgtcttggtgtcaggaata

SEQ ID NO: 29534 - DNA, 1295 bp, Zea Mays
ctccatcgcccggagaagtttcaaagaaaaagaacatatttccgcataattgctctttccgccttataaaccagcggtcctttttcttttcttcgaaaacactcctctaagccaccaaacacttgctatgcccgctcctccccgcgcactgctcagcacgccgtgcccgtgagaccatggacgcgagcgcggccaccgccaggcgcaagcgcaagcgccccgacgccgacatcaccggcgacgccgacgccgccgccgccgctgccgctgccgccgccccggtcgccgtcgacgaggcctcggacgccgaggtcgaggagttctacgccatcctgcggcgcatccgcgacgcctcccgccggctgtgcggcgccggcgcccggcccgccccgcgcgcgccggcgtggcggcccagcttctcctgggaggacttcgcgaccccggcccctggcgcgccggcgcctgagaccccgacccccacgcagcaggagccggcgcagccgcggcccgacgagcctgtagccgtcgtccgcgctaccgccccgtcgccgcgtgccgggctggacctgaacgcggagccggagccggaggcgccggccacccctcgctcggcgcgcgtccaggcgtagcgtagcgtagcgcgcggcgcatcgtcacctgcctcctgcaccgcgccagccaaggagagccgtagcgtggggccgttgggcgtgcgcgtcagctcggctgctgctgggaggtggctggcccggtgagtcggtgatgtcatgtcagccgagagccgacggtggtcgcaatcgtccgcgggcggcacagcacagcacacacagtgagactggttcgttgctttggttgcaggaaaataccttttaatcggagcagttgatgtaccgtccgaaaaaatgacgtgtttaactattcgttgcgttttatgtattatttttaacctatgactgctaacgatggcatgtttattagttttatgtatacagtattatattaatgatatatactattaatatagcatagcttttggacttgaatggatctgtccgttcgcacacatattattgtagcacatttcttctgtgatgaacaaactgtaattctttttcttaccgatttggaaggttaattaattaggatagtgtttcgtaaaaaagaagagtacctctgttgtcatagcatcttcatgagtacccaataaaaatttgcagcatatatatttttggactaaaaagcatcgtcaacaattaccaatcccacctgctactatcttgtagcgctggaaaaac

SEQ ID NO: 29535 - DNA, 1304 bp, Zea Mays
cccggagaagtttcaaagaaaaagaacatatttccgcataattgctctttccgccttataaaccagcggtcctttttcttttcttcgaaaacactcctctaagccaccaaacacttgctatgcccgctcctccccgcgcactgctcagcacgccgtgcccgtgagaccatggacgcgagcgcggccaccgccaggcgcaagcgcaagcgccccgacgccgacatcaccggcgacgccgacgccgccgccgccgctgccgctgccgccgccccggtcgccgtcgacgaggcctcggacgccgaggtcgaggagttctacgccatcctgcggcgcatccgcgacgcctcccgccggctgtgcggcgccggcgcccggcccgccccgcgcgcgccggcgtggcggcccagcttctcctgggaggacttcgcgaccccggcccctggcgcgccggcgcctgagaccccgacccccacgcagcaggagccggcgcagccgcggcccgacgagcctgtagccgtcgtccgcgctaccgccccgtcgccgcgtgccgggctggacctgaacgcggagccggagccggaggcgccggccacccctcgctcggcgcgcgtccaggcgtagcgtagcgtagcgcgcggcgcatcgtcacctgcctcctgcaccgcgccagccaaggagagccgtagcgtggggccgttgggcgtgcgcgtcagctcggctgctgctgggaggtggctggcccggtgagtcggtgatgtcatgtcagccgagagccgacggtggtcgcaatcgtccgcgggcggcacagcacagcacacacagtgcgtaccttcccctcggtgaattactgatccgaatccccatcatgaaaataccttttaatcggagcagttgatgtaccgtccgaaaaaatgacgtgtttaactattcgttgcgttttatgtattatttttaacctatgactgctaacgatggcatgtttattagttttatgtatacagtattatattaatgatatatactattaatatagcatagcttttggacttgaatggatctgtccgttcgcacacatattattgtagcacatttcttctgtgatgaacaaactgtaattctttttcttaccgatttggaaggttaattaattaggatagtgtttcgtaaaaaagaagagtacctctgttgtcatagcatcttcatgagtacccaataaaaatttgcagcatatatatttttggactaaaaagcatcgtcaacaattaccaatcccacctgctactatcttgtagcgctggaaaaac

SEQ ID NO: 29536 - DNA, 1290 bp, Zea Mays
ttccgcataattgctctttccgccttataaaccagcggtcctttttcttttcttcgaaaacactcctctaagccaccaaacacttgctatgcccgctcctccccgcgcactgctcagcacgccgtgcccgtgagaccatggacgcgagcgcggccaccgccaggcgcaagcgcaagcgccccgacgccgacatcaccggcgacgccgacgccgccgccgccgctgccgctgccgccgccccggtcgccgtcgacgaggcctcggacgccgaggtcgaggagttctacgccatcctgcggcgcatccgcgacgcctcccgccggctgtgcggcgccggcgcccggcccgccccgcgcgcgccggcgtggcggcccagcttctcctgggaggacttcgcgaccccggcccctggcgcgccggcgcctgagaccccgacccccacgcagcaggagccggcgcagccgcggcccgacgagcctgtagccgtcgtccgcgctaccgccccgtcgccgcgtgccgggctggacctgaacgcggagccggagccggaggcgccggccacccctcgctcggcgcgcgtccaggcgtagcgtagcgtagcgcgcggcgcatcgtcacctgcctcctgcaccgcgccagccaaggagagccgtagcgtggggccgttgggcgtgcgcgtcagctcggctgctgctgggaggtggctggcccggtgagtcggtgatgtcatgtcagccgagagccgacggtggtcgcaatcgtccgcgggcggcacagcacagcacacacatggctctctttggtgcgctgctccgtgtggacaggtgagactggttcgttgctttggttgcaggaaaataccttttaatcggagcagttgatgtaccgtccgaaaaaatgacgtgtttaactattcgttgcgttttatgtattatttttaacctatgactgctaacgatggcatgtttattagttttatgtatacagtattatattaatgatatatactattaatatagcatagcttttggacttgaatggatctgtccgttcgcacacatattattgtagcacatttcttctgtgatgaacaaactgtaattctttttcttaccgatttggaaggttaattaattaggatagtgtttcgtaaaaaagaagagtacctctgttgtcatagcatcttcatgagtacccaataaaaatttgcagcatatatatttttggactaaaaagcatcgtcaacaattaccaatcccacctgctactatcttgtagcgctggaaaaac

SEQ ID NO: 29537 - DNA, 1661 bp, Zea Mays
cgccgtcccagccacctgccgttgtgcatgcgctctcaatctctgatctagtcatctgatctgtgcgggagtgtggccgccaccaccacgaccaccaccataactgctcatctatatataaaacacccccaccacaccgttctcccccactgtcctgccgccgtccgatcctgtggttgcgccgactctctggccgcgctagtccccattccttcatccgacgaatctaccctcgatcggatcctctggccggcggcatgggcgacgacgacgaccacaatgaggggctgagggcggggccgacggcgtcgtggcggctcaacgtcagcgacttccacatgccggagcggcccaaggagccgcccttcgtcgccagggtcttcctccgcagccacgggaagcagaggaagatcgcgaagtactacaagaaacaagagaatctactgaaggatttcagcgaaatggagaccatgaacgaaatgggtggcctagatcagaatgctcctaccgaggaagagcagaagcagttggcgaagagcgagaggtttgccatcaacctgtcgaatgcagtcaacctggtcctcttcgtaacaaaagtcgtcgcttcagtcgaaagcgcgtccatggcggttatagcgtcgacgctggactctctgttggacctgctgtcagggttcatactttggttcactgcgtacaagatgaaaaagccgaacaagtacaactatccaattggaaagaggcgcatgcagccagtgggaataatagttttcgcatcagtgatgggcacacttggcttccaagtgctgatcgaatcagggcgccagctcataactcaggagcacgcggatttcaagttcaagcaagagctgtggatggtcattagcatgtcctctgttgcggtcgtgagttcttcctcatgctctactgcagaacgttcaagaatgagatcgtgagggcctacgcccaggaccatttcttcgacgtaatcacaaactcggtcggcctggtctcggcgctgctcgctgtccggttcaaatggtggatggaccctgttggcgccatactgatcgcgttgtacacgatcacgacgtgggcgcgaacagtgctggagaacgtaggcacactgataggcaagtcggcgccggcagagtacctgacgaagctcacgtacttgatctggaaccaccatgaggagatccagcacatcgacacggtgcgagcctacaccttcggcacgcactacttcgtcgaggtggacatcgttctctcgggcgacatgccgctgagtcaggcacatgacatcggcgagtcgctgcaggagaagctggagcagctgaccgaggtcgagcgcgccttcgtccatgtggatttcgagttcacgcaccggcccgagcacaaggccgaggtctgagtgcgtggttagtggttactgcagagttcagaccagctgtagcgctactgcagatttgacttcatatgctattagttcgtaagatgaatgctatattcatttcccacaactcttcaaaaagaatctagatattttttgtcatgtacgtgcagactggaataaaattttgtatagtcgttcatgaaccggtgaaaaatatattttttaatacatttgactaataaagaattattcatattagtttctt

SEQ ID NO: 29538 - DNA, 1578 bp, Zea Mays
caatctctgatctagtcatctgatctgtgcgggagtgtggccgccaccaccacgaccaccaccataactgctcatctatatataaaacacccccaccacaccgttctcccccactgtcctgccgccgtccgatcctgtggttgcgccgactctctggccgcgctagtccccattccttcatccgacgaatctaccctcgatcggatcctctggccggcggcatgggcgacgacgacgaccacaatgaggggctgagggcggggccgacggcgtcgtggcggctcaacgtcagcgacttccacatgccggagcggcccaaggagccgcccttcgtcgccagggtcttcctccgcagccacgggaagcagaggaagatcgcgaagtactacaagaaacaagagaatctactgaaggatttcagcgaaatggagaccatgaacgaaatgggtggcctagatcagaatgctcctaccgaggaagagcagaagcagttggcgaagagcgagaggtttgccatcaacctgtcgaatgcagtcaacctggtcctcttcgtaacaaaagtcgtcgcttcagtcgaaagcgcgtccatggcggttatagcgtcgacgctggactctctgttggacctgctgtcagggttcatactttggttcactgcgtacaagatgaaaaagccgaacaagtacaactatccaattggaaagaggcgcatgcagccagtgggaataatagttttcgcatcagtgatgggcacacttggcttccaagtgctgatcgaatcagggcgccagctcataactcagcatgtcctctgttgcggtcgtgagttcttcctcatgctctactgcagaacgttcaagaatgagatcgtgagggcctacgcccaggaccatttcttcgacgtaatcacaaactcggtcggcctggtctcggcgctgctcgctgtccggttcaaatggtggatggaccctgttggcgccatactgatcgcgttgtacacgatcacgacgtgggcgcgaacagtgctggagaacgtaggcacactgataggcaagtcggcgccggcagagtacctgacgaagctcacgtacttgatctggaaccaccatgaggagatccagcacatcgacacggtgcgagcctacaccttcggcacgcactacttcgtcgaggtggacatcgttctctcgggcgacatgccgctgagtcaggcacatgacatcggcgagtcgctgcaggagaagctggagcagctgaccgaggtcgagcgcgccttcgtccatgtggatttcgagttcacgcaccggcccgagcacaaggccgaggtctgagtgcgtggttagtggttactgcagagttcagaccagctgtagcgctactgcagatttgacttcatatgctattagttcgtaagatgaatgctatattcatttcccacaactcttcaaaaagaatctagatattttttgtcatgtacgtgcagactggaataaaattttgtatagtcgttcatgaaccggtgaaaaatatattttttaatacatttgactaataaagaattattcatattagtttctt

SEQ ID NO: 29539 - DNA, 1567 bp, Zea Mays
ccacgaccaccaccataactgctcatctatatataaaacacccccaccacaccgttctcccccactgtcctgccgccgtccgatcctgtggttgcgccgactctctggccgcgctagtccccattccttcatccgacgaatctaccctcgatcggatcctctggccggcggcatgggcgacgacgacgaccacaatgaggggctgagggcggggccgacggcgtcgtggcggctcaacgtcagcgacttccacatgccggagcggcccaaggagccgcccttcgtcgccagggtcttcctccgcagccacgggaagcagaggaagatcgcgaagtactacaagaaacaagagaatctactgaaggatttcagcgaaatggagaccatgaacgaaatgggtggcctagatcagaatgctcctaccgagaagcagttggcgaagagcgagaggtttgccatcaacctgtcgaatgcagtcaacctggtcctcttcgtaacaaaagtcgtcgcttcagtcgaaagcgcgtccatggcggttatagcgtcgacgctggactctctgttggacctgctgtcagggttcatactttggttcactgcgtacaagatgaaaaagccgaacaagtacaactatccaattggaaagaggcgcatgcagccagtgggaataatagttttcgcatcagtgatgggcacacttggcttccaagtgctgatcgaatcagggcgccagctcataactcaggagcacgcggatttcaagttcaagcaagagctgtggatggtcattagcatgtcctctgttgcggtcgtgagttcttcctcatgctctactgcagaacgttcaagaatgagatcgtgagggcctacgcccaggaccatttcttcgacgtaatcacaaactcggtcggcctggtctcggcgctgctcgctgtccggttcaaatggtggatggaccctgttggcgccatactgatcgcgttgtacacgatcacgacgtgggcgcgaacagtgctggagaacgtaggcacactgataggcaagtcggcgccggcagagtacctgacgaagctcacgtacttgatctggaaccaccatgaggagatccagcacatcgacacggtgcgagcctacaccttcggcacgcactacttcgtcgaggtggacatcgttctctcgggcgacatgccgctgagtcaggcacatgacatcggcgagtcgctgcaggagaagctggagcagctgaccgaggtcgagcgcgccttcgtccatgtggatttcgagttcacgcaccggcccgagcacaaggccgaggtctgagtgcgtggttagtggttactgcagagttcagaccagctgtagcgctactgcagatttgacttcatatgctattagttcgtaagatgaatgctatattcatttcccacaactcttcaaaaagaatctagatattttttgtcatgtacgtgcagactggaataaaattttgtatagtcgttcatgaaccggtgaaaaatatattttttaatacatttgactaataaagaattattcatattagtttctt

SEQ ID NO: 29540 - DNA, 2259 bp, Zea Mays
gaaataacatattacatatccatataactaaaatgaccaattcaagacaactaaattcactccatagtttagataattatagaacaacaactaaaacatgctagaagaagacatattcatgtatgaaaaaaaaacaaatcaccatcttttggagaacgtccatgtaaataaaaacatgagcatactccttcgtcggatgacatctgtgtggcctcggactgtcgtatgtagtggtgggtaatctaaatacacgaaatagaactgtcgtatgtgagccattgtctattagacctatagccgtatgtcgccgttaccagcagcggccacatgggcggggcaggtgggcttatgttgctgcgcgcgcggtgccgtctccaactctgtctcggcctctcgcgtggaggtggaggtggaggcggagccgatgagatcgatcgcccgacccccgtcacgtccggggtcgcattctctttccgtcccggggaaaaaagaaggaaaccgaaccttggcagcggcgtgccggcaggcatgtcagcgacggtagccggccacaggtccagattccggaaccgaaccaccgtcccccgcgaaccacggaacagcgaagacacctgggccagggctagtgaggccaagccgatccgaaacatcgcgttgcgtcccgcacaatcccgtcccgatctgggccgggggcacgcgagcgacgataaacttcctcgtggcggtgagggccggcttggagtcggcgcagagctggacgagttgcacttgcaccttgcacgcgacagccacgcactagcctgcagctgcagggcaggggcggagaccatggggagcccgcaccatggacacggcgttgacggtggcggccgcagcgacgacgaggagggcgacgccgggtcgtggcggctgcgcatggacagcggcttcagcgtcccggaccggttccaccgccagccgcccttctacgccaggatcttcggcggctcgcacgggaagcagaggaagatcgcgaagtactacaagaaacaagagaatctactgaaggatttcagcgaaatggagaccatgaacgaaatgggtggcctagatcagaatgctcctaccgaggaagagcagaagcagttggcgaagagcgagaggtttgccatcaacctgtcgaatgcagtcaacctggtcctcttcgtaacaaaagtcgtcgcttcagtcgaaagcgcgtccatggcggttatagcgtcgacgctggactctctgttggacctgctgtcagggttcatactttggttcactgcgtacaagatgaaaaagccgaacaagtacaactatccaattggaaagaggcgcatgcagccagtgggaataatagttttcgcatcagtgatgggcacacttggcttccaagtgctgatcgaatcagggcgccagctcataactcaggagcacgcggatttcaagttcaagcaagagctgtggatggtcattagcatgtcctctgttgcggtcgtgagttcttcctcatgctctactgcagaacgttcaagaatgagatcgtgagggcctacgcccaggaccatttcttcgacgtaatcacaaactcggtcggcctggtctcggcgctgctcgctgtccggttcaaatggtggatggaccctgttggcgccatactgatcgcgttgtacacgatcacgacgtgggcgcgaacagtgctggagaacgtaggcacactgataggcaagtcggcgccggcagagtacctgacgaagctcacgtacttgatctggaaccaccatgaggagatccagcacatcgacacggtgcgagcctacaccttcggcacgcactacttcgtcgaggtggacatcgttctctcgggcgacatgccgctgagtcaggcacatgacatcggcgagtcgctgcaggagaagctggagcagctgaccgaggtcgagcgcgccttcgtccatgtggatttcgagttcacgcaccggcccgagcacaaggccgaggtctgagtgcgtggttagtggttactgcagagttcagaccagctgtagcgctactgcagatttgacttcatatgctattagttcgtaagatgaatgctatattcatttcccacaactcttcaaaaagaatctagatattttttgtcatgtacgtgcagactggaataaaattttgtatagtcgttcatgaaccggtgaaaaatatattttttaatacatttgactaataaagaattattcatattagtttctt

SEQ ID NO: 29541 - DNA, 1885 bp, Zea Mays
atgggcggggcaggtgggcttatgttgctgcgcgcgcggtgccgtctccaactctgtctcggcctctcgcgtggaggtggaggtggaggcggagccgatgagatcgatcgcccgacccccgtcacgtccggggtcgcattctctttccgtcccggggaaaaaagaaggaaaccgaaccttggcagcggcgtgccggcaggcatgtcagcgacggtagccggccacaggtccagattccggaaccgaaccaccgtcccccgcgaaccacggaacagcgaagacacctgggccagggctagtgaggccaagccgatccgaaacatcgcgttgcgtcccgcacaatcccgtcccgatctgggccgggggcacgcgagcgacgataaacttcctcgtggcggtgagggccggcttggagtcggcgcagagctggacgagttgcacttgcaccttgcacgcgacagccacgcactagcctgcagctgcagggcaggggcggagaccatggggagcccgcaccatggacacggcgttgacggtggcggccgcagcgacgacgaggagggcgacgccgggtcgtggcggctgcgcatggacagcggcttcagcgtcccggaccggttccaccgccagccgcccttctacgccaggatcttcggcggctcgcacgggaagcagaggaagatcgcgaagtactacaagaaacaagagaatctactgaaggatttcagcgaaatggagaccatgaacgaaatgggtggcctagatcagaatgctcctaccgaggaagagcagaagcagttggcgaagagcgagaggtttgccatcaacctgtcgaatgcagtcaacctggtcctcttcgtaacaaaagtcgtcgcttcagtcgaaagcgcgtccatggcggttatagcgtcgacgctggactctctgttggacctgctgtcagggttcatactttggttcactgcgtacaagatgaaaaagccgaacaagtacaactatccaattggaaagaggcgcatgcagccagtgggaataatagttttcgcatcagtgatgggcacacttggcttccaagtgctgatcgaatcagggcgccagctcataactcagcatgtcctctgttgcggtcgtgagttcttcctcatgctctactgcagaacgttcaagaatgagatcgtgagggcctacgcccaggaccatttcttcgacgtaatcacaaactcggtcggcctggtctcggcgctgctcgctgtccggttcaaatggtggatggaccctgttggcgccatactgatcgcgttgtacacgatcacgacgtgggcgcgaacagtgctggagaacgtaggcacactgataggcaagtcggcgccggcagagtacctgacgaagctcacgtacttgatctggaaccaccatgaggagatccagcacatcgacacggtgcgagcctacaccttcggcacgcactacttcgtcgaggtggacatcgttctctcgggcgacatgccgctgagtcaggcacatgacatcggcgagtcgctgcaggagaagctggagcagctgaccgaggtcgagcgcgccttcgtccatgtggatttcgagttcacgcaccggcccgagcacaaggccgaggtctgagtgcgtggttagtggttactgcagagttcagaccagctgtagcgctactgcagatttgacttcatatgctattagttcgtaagatgaatgctatattcatttcccacaactcttcaaaaagaatctagatattttttgtcatgtacgtgcagactggaataaaattttgtatagtcgttcatgaaccggtgaaaaatatattttttaatacatttgactaataaagaattattcatattagtttctt

SEQ ID NO: 29542 - DNA, 1559 bp, Zea Mays
atgggcggggcaggtgggcttatgttgctgcgcgcgcggtgccgtctccaactctgtctcggcctctcgcgtggaggtggaggtggaggcggagccgatgagatcgatcgcccgacccccgtcacgtccggggtcgcattctctttccgtcccggggaaaaaagaaggaaaccgaaccttggcagcggcgtgccggcaggcatgtcagcgacggtagccggccacaggtccagattccggaaccgaaccaccgtcccccgcgaaccacggaacagcgaagacacctgggccaggggaagcagaggaagatcgcgaagtactacaagaaacaagagaatctactgaaggatttcagcgaaatggagaccatgaacgaaatgggtggcctagatcagaatgctcctaccgaggaagagcagaagcagttggcgaagagcgagaggtttgccatcaacctgtcgaatgcagtcaacctggtcctcttcgtaacaaaagtcgtcgcttcagtcgaaagcgcgtccatggcggttatagcgtcgacgctggactctctgttggacctgctgtcagggttcatactttggttcactgcgtacaagatgaaaaagccgaacaagtacaactatccaattggaaagaggcgcatgcagccagtgggaataatagttttcgcatcagtgatgggcacacttggcttccaagtgctgatcgaatcagggcgccagctcataactcaggagcacgcggatttcaagttcaagcaagagctgtggatggtcattagcatgtcctctgttgcggtcgtgagttcttcctcatgctctactgcagaacgttcaagaatgagatcgtgagggcctacgcccaggaccatttcttcgacgtaatcacaaactcggtcggcctggtctcggcgctgctcgctgtccggttcaaatggtggatggaccctgttggcgccatactgatcgcgttgtacacgatcacgacgtgggcgcgaacagtgctggagaacgtaggcacactgataggcaagtcggcgccggcagagtacctgacgaagctcacgtacttgatctggaaccaccatgaggagatccagcacatcgacacggtgcgagcctacaccttcggcacgcactacttcgtcgaggtggacatcgttctctcgggcgacatgccgctgagtcaggcacatgacatcggcgagtcgctgcaggagaagctggagcagctgaccgaggtcgagcgcgccttcgtccatgtggatttcgagttcacgcaccggcccgagcacaaggccgaggtctgagtgcgtggttagtggttactgcagagttcagaccagctgtagcgctactgcagatttgacttcatatgctattagttcgtaagatgaatgctatattcatttcccacaactcttcaaaaagaatctagatattttttgtcatgtacgtgcagactggaataaaattttgtatagtcgttcatgaaccggtgaaaaatatattttttaatacatttgactaataaagaattattcatattagtttctt

SEQ ID NO: 29543 - DNA, 723 bp, Zea Mays
gttttctagttgggcgtgaccaggatcagcaggccggtacgccctctgaaagagagagaaagaaagaaagaaacagacgacaccacgtcgtcactttctcatactagtagcctgtactagtatatgatactaccgagcaagtcctcttggagcgctagcttgaggcggcattactccttgattcccgctgcccgcgcacattattttgtatcggtgcggagaaacggaatggccatcagcggcgtgcaggcgcagctgttttgcagctaatccttcttccttcttcctccttcctcctgctcctctctctgtctctgtctctcccttgcagagctggctgagaaagagctagcacaaacgtcgatgcaagcgacgaataagagaccgcagagaagataccctgtggcacccatcgtcatgtgcctggtcctggcgtgggcatcatgcctccacggcgacgacactaaattattagcggccgcggttccattgccgcggcgtccagcagcaacaagcagcgtggccgccgcaggggggatgcccgtcgtcgtgggctaccgcccgagacctcaagcaggcgccgccgccggccgctcagcaccgcgttccaccgcctggatcggagacgacaagcgccagattccaagctgtcccgacgctctccacaacagggccgtacctgaaggatcgagctggctggccacccaggtcctgacccaaaat

SEQ ID NO: 29544 - DNA, 630 bp, Zea Mays
cattactccttgattcccgctgcccgcgcacattattttgtatcggtgcggagaaacggaatggccatcagcggcgtgcaggcgcagctgttttgcagctaatccttcttccttcttcctccttcctcctgctcctctctctgtctctgtctctcccttgcagagctggctgagaaagagctagcacaaacgtcgatgcaagcgacgaataagagaccgcagagaagataccctgtggcacccatcgtcatgtgcctggtcctggcgtgggcatcatgcctccacggcgacgacactaaattattagcggccgcggttccattgccgcggcgtccagcagcaacaagcagcgtggccgccgcaggggggatgcccgtcgtcgtgggctaccgcccgagacctcaagcaggcgccgccgccggccgctcagcaccgcgttccaccgcctggatcggagacgacaagcgccagattccaagctgtcccgacgctctccacaacaggtgcggcttccgataacagaaaggaacgcggtggtgccttttgcaactagtgtcgcacacgcttttctactgctaggccgtacctgaaggatcgagctggctggccacccaggtcctgacccaaaat

SEQ ID NO: 29545 - DNA, 1618 bp, Zea Mays
attactccttgattcccgctgcccgcgcacattattttgtatcggtgcggagaaacggaatggccatcagcggcgtgcaggcgcagctgttttgcagctaatccttcttccttcttcctccttcctcctgctcctctctctgtctctgtctctcccttgcagagctggctgagaaagagctagcacaaacgtcgatgcaagcgacgaataagagaccgcagagaagataccctgtggcacccatcgtcatgtgcctggtcctggcgtgggcatcatgcctccacggcgacgacactaaattattagcggccgcggttccattgccgcggcgtccagcagcaacaagcagcgtggccgccgcaggggggatgcccgtcgtcgtgggctaccgcccgagacctcaagcaggcgccgccgccggccgctcagcaccgcgttccaccgcctggatcggagacgacaagcgccagattccaagctgtcccgacgctctccacaacagtatgcaacgctgaagatcggtgagcagaaccacggtggctagctcgatctcttgtgcatctcgcattatgaaaaaaagtgtgtctttctgcgttgtttgattcaatttgtacatgttccgccgggagatactttcacttgtagtagccatatatttgcatgagctcaggttatccaccaccactgggtgggtgttttagctcagttgacattattgtccactgcagcatgaatccaagatgaagctttcgcacatggtgctatcgatcgtacgttctgtgtctgtctagctctagagcggttacgtatcgtcaatggttaaggtagtgttggaacggttgggacgatggagcagctcattaataggagtggctccgtccgaaagatttgagggagcatgatggtttaggatttgaatataacttttcaagatcactttttgttctccatagaactaattcaaacatcaataaattagaagcggagcgactcatctcactatactctgaaaccaaacactaactaaaatacgtgtgtgcggaccagtatattacgcatacttatttcactgggacaagtctttagccaataattactttgttagtactcctacatatatagtttttatttgtataaaaaactcttgcctcatgcttttgaaccacactgctaggacgagcctttacacagtattcacgacgacattctggaaatattttattgacgagtggatctggtcactggctccaaaagcttcctttggagagccagtagctgatgagctgccacacagacattgacgctcgatctgaaacagaagtagattggtgttaatgcaagctgtattgtggttgtggactcgatcggtggccacggcgggtgtgggcgtgggccttgagttcagtggagtttggggttcctacaaagaagaggccatcatttgcatcttcggaagaaaagaaccctttctggcgacccggttctgtttgtttgtttgttcgttggttcgttctcatcctcctctcagagcaggcgcgcgcgcgggatccatcaaccatcatgttgttgtggtctctagcgcgcttgtgtctgcttgcatgttactcgggcgactgtt

SEQ ID NO: 29546 - DNA, 1960 bp, Zea Mays
catagagctatgtcaactgtgtatgaacgatgcatgatagcatctacatatgctccaatgcatatttataatacatcaaataaaggaatatgctagtgagtatttttatctgagacccactttcaagaatcaaatgcaccaactctctagctcaacctactcagaagcttgtatgttctctactgataacattactgaaatggagtaaaaagtttcaaggacacctaaagtacaattgctagattatatcccccaagtgcaaaattactaaaggtcggtttgtggttaatgtcactgctttttctttgaagttgttgctgagaaactgtttaaaaaactcttatttgaaaaattagactaagtttagacaaaagttatatcacgccatggcattggatttacctaagtgggctatcaaagccattgacaagattagacgtggctttctttggaaagggcgtaaggatgtgctcggtggccactgcttagtcgcttggggcaaagtgacacgcccaaaggagcttggtgggcttggcatctcagatttacaaaagctgaattgggcccttcgggttagatggctgtggttggaaaaaacagatccctcgaagtcttgggctgatttacctctccagagttccagcattctgaaatctatcctctctacagctttgattacagaaattggtgatggtcgtaacaccttattttggagggacagatggttgatggggttgaggattgaggatctaactcctcatatttttgccatcgtcccaaccaggattaccaataggagaacggtggctgagggtatcgtggagatggcttggattcgggacctgagaggcaccatcacttgggatgtcctctctgattttttaactcttagtgaagtcattgcagattactccattaatgttggagtgccagacaagcatatctggaaattctccccgacaggccaatactcttcaaagtcggcttatgatatgttatttcttggttccacttctttgggagcatatgagcgcatttgggaatcttgggcaccttcaaagtgcagtttcttcctttggcttgtcatgcacaacagttgctggaccgcagaccgtcttgctagaagggggctaccccaccccagtgtgtgccccctttgcgaccaagaagaggaaacaatacaacatcttctcatctcttgcgtctttgcacgacagttctggtattccttgttaagcaggtctgggttgcctaacctttcaccagataatgctagttgcggccttgatgactggtggagcagagctgtggagaagattccccgtgatctccaatccggcttcaattctctagttattcttggcgcttggagcctttggcgtcatcgcaacgactgcgtgtttaatgggagatcggcaagcctggcgagtgctctcaccctcgctggcgatgagctcaggatgtggtgtagtgccggggcaaaagggttgaacctgctttcaactcttatgtttatgcttgacccagggggatagtctagtggcttgttcagagtggttgtgtgtggttgctgtgttgcgtcttgtgtcttgttgtgtcatgtgtgtgtgtgtcgtgtcaggtgtgtgtcgggtgtggcgtgttgtaccttcttctatctattaatggaatgatacgcagatctcctgcgtgttcgagaaatccttgttcctctcacaattattgatgattcaaaatgtatcttgtaactttgtgcaacttaaattgaaaaaagaaaagcagttaaccagacagcacatttctaaaagcaattctgcaaacaagattaccagtatccacagtcaagcaggccctaagtataactgacatcttttatgaatcaagaatagtggtgaattgatcctagcaacctagtgtcttgtgctcaagagctacagaaaataacttccttagagaagag

SEQ ID NO: 29547 - DNA, 128 bp, Zea Mays
caccatggctcctcccttgtatctttagcttcagccttcagcaacaaactcctttctgacctctcttgtaggagacaccttaaccttggtgagtcgtggagatacctttccagctttatgcttttgtt

SEQ ID NO: 29548 - DNA, 2533 bp, Zea Mays
aataaaatccagccacgcctgcgcatccctcgtcctcgtctctctcacagctgctttcttccttcctgttcctgctcgtcgcctctcgaaagccaggaggagtctcgcctccccctcctcgcgcgcgtgggcagctatggcgatggacgacctcgcgggcgcctcctcctcctcctccatggcggcggccgcctcctccgacccctcgcacggctggcagacggtgtcgtatcccaagcgcaaccgcaagcaggcgcagccgccccgcaccacggcgcccgatctggcgctgcagtccaacggcaagcctggcggcgtcttcgacgccgtcgagaagcgctcccaggagcgccaccgcgcgctgcagcagcagctcgcctccagggcggccgacctcgacgacgcgcggatcgccgttgccacgggcgccgcctactccgacgacgacgactccgacgaggccgctgccccgcgccaggagggagaggtcaagaagcctaagaagcccaaggtgaagaagccgaaggtgacggtcgccgaggccgccgtcctgatcgacgccgagaacctcgcagcgcacctcttcgagatctcggcatcgtacgagaatcaacaggacattcagctcatgaggtttgctgattactttggccgggcatttgcagctgtgagcgcatctcaatttccatgggcaaagatgttcaaagaatcaacagtgtccaagatggttgatatcccactgtgccatatatctgaggctgtgatcaagactgtgagtgattggatcagtcaaagatcttctgatgccctgggagactttgttttgtggtgcatagatagcatcatgtctgaattgtcaggtccatcagctggccctaagggttcaaagaaggttgcacaacagtctccaagggcccaggttgcaatctttgttgttcttgccatgactttaagaagaaagcctgatgtactggtaaatgttatgccaaagataatgggaaacaataaatatctgggacaggaaaagcttcccatcattgtctgggttattgctcaggcctctcaaggtgacctagtgtctggcatgttttgctgggctcattctctatttcccacattatgtgcgaagtcaagtgggaatccccttgcaagagatttggttttgcagttgcttgaaaggctacagaaaggtttgaagcagcctacccaataatcaaggagttggctcttgccggtcctcctggctcaaaaactgtgaaacaagcatcacaacagcttttacctttgtgtgcaaaagcaatgcaagaaaacaacgcagagctcaccagggaggctgttgatgttttcatttggtgcttaactcaaaatgcagagtcttacaagcagtgggaaagaatttatcttgaaaatattgaagccagtgttgctgtcctgagcaaagttgtgattgattggagggatgtgtctcctaagctcagttctgaagctctcaaggcaacagtgaagaactttaaggctaagaatgaggctgcgctggagtccacaacagatgctggaaagcaggcatctatcaaagaagcagacaagcactgcaaggcgatctttggaaagctgacccgtggcgccacctgcctgaagagcagcctggtggtcatcgcgctcgctgttgctgctagttacgtgctgtctcctggcatggacctcgagaaggtccaggcgatggtctcatcgcacctgtcgttctaaacatacctgtccagaatctccagacgtggatctaaattatacgagccatccaaaggggatggctcactcatcagtgaagagagctcagggggtgagaataagagggggataggcgctagaaccgaaagggtacagtttcctgagttgcctttttttatttttcccgcgtctcctcgagcagcagtgcgtgggaggagacgcagtcgactttgcagggagttggttaatcggtagactgatgggtgcgaagaaggtcaagtcaaacggctcaaccagaggattaacacctttgcttttctctttctgcatctgagatgattgcaaacagttttggtttaaaaattaagaatcttgaatcgtattcggtgctgtgtgcttgtcggctaaatgtatctgttgcgttgatatccgattaaattgcgtgtgatgctgtgctcgtgtcagtgtgctgttgtcgaagatctccctttttgcaggtgtgaatgtgatgcctgaaggccttttgaaacatgttccatttttttggacgccggaggtgtgatgtctgatgttggagcgtgaagatcttttgaaatatgttgcatttccagatggtttttggacgagggagatgctggttaatttctgggtttttttatttgaggattcgatctgaatctcaagggactgtatgttatctactgtctcttggtggtgtggatactgtggatgagaaggttttccttcatgcccgattattatctgcagcttatgtgggactggtccagatgtcaattttttatgatct

SEQ ID NO: 29549 - DNA, 1399 bp, Zea Mays
gccgcacgagccgcttctagcctgctggtcggagtcggagggccgggccagggctgggtgtggtcgccactgttccagagtgcccagtggtgccgcctgccgcggtagtacaaactacaaaggcaaaggggactcccccgcgtccgcttccctcgcccccccagtccccagacatggcgccctgcgcgtccccgtccgccctcgcgctctccgccagcacgcgggtcagcatcctccggctcccgctggcgctgcggcagcgggcggaggcgcgcgtgcccggcgcccagttccgcccgtcgaccgcgtgctcctgggcgcgccccttgctgcccgagctcgcgggggcggtccctcgtgccggcgcccgcggcactggcaggaggacgcagccgctgttccggcctcgcgcattgacgacgacgtctcagattgccagctgcgccttcaccctgggcacggtcgccgtcctccccttctacaccctcatggtcgtcgcccccaacgccgacatcaccaaacgcaccgtggagagcggcgctccctacgtcgccctgggcctcctctacgcctacctgctctacctgtcctggacccccgacaccctgcgcgccatgttcgctagcaagtactggctccctgagttggcgggcatcgtgaggatgttcgcgagcgagatgaccgtcgcctccgcgtggatccacctcctagcagtcgacctcttcgcggcaaggtcaggcaggtgtaccacgacggcctcaggaacaacgtcgagaccaggcactctgtctcgctgtgcctgctcttctgcccggttgggatcctggctcatgtgctgaccaaggtactggcaggggcagttgcccgctcacactgatgattgcaattgggtggttgtattgtatctaggattcttccattgttaccatgtggagatgtggattgagcggaattgatagggtttaccgtttgattcaccaaatgtaacgtaaatgataagagtaacgattcacactcgaataccggtggtaataaatttaaataaggcggtatccatttataatacggttggacttaaacaaacgttaaatcgttatactttggtaacgtaatggtaaccgataacgttaaatcatgtttgtttaagtccaaccggtatcgatatcatactacaaatgtataccgtcttatttaaatttattactaccagtattcgaaggtgaatcgttaccattactatttacgttacatttgatgaacaaaataaatcccaaacaagttaaattttttaactttttctaattctattcaatctatatgtaataggaataaccgaacgagccggttttatatgatctggatatgaataaaactggtttaacgcaccgattcttgccat

SEQ ID NO: 29550 - DNA, 785 bp, Zea Mays
ggggactcccccgcgtccgcttccctcgcccccccagtccccagacatggcgccctgcgcgtccccgtccgccctcgcgctctccgccagcacgcgggtcagcatcctccggctcccgctggcgctgcggcagcgggcggaggcgcgcgtgcccggcgcccagttccgcccgtcgaccgcgtgctcctgggcgcgccccttgctgcccgagctcgcgggggcggtccctcgtgccggcgcccgcggcactggcaggaggacgcagccgctgttccggcctcgcgcattgacgacgacgtctcagattgccagctgcgccttcaccctgggcacggtcgccgtcctccccttctacaccctcatggtcgtcgcccccaacgccgacatcaccaaacgcaccgtggagagcggcgctccctacgtcgccctgggcctcctctacgcctacctgctctacctgtcctggacccccgacaccctgcgcgccatgttcgctagcaagtactggctccctgagttggcgggcatcgtgaggatgttcgcgagcgagatgaccgtcgcctccgcgtggatccacctcctagcagtcgacctcttcgcggcaaggcaggtgtaccacgacggcctcaggaacaacgtcgagaccaggcactctgtctcgctgtgcctgctcttctgcccggttgggatcctggctcatgtgctgaccaaggaataaccgaacgagccggttttatatgatctggatatgaataaaactggtttaacgcaccgattcttgccat

SEQ ID NO: 29551 - DNA, 1329 bp, Zea Mays
aaacggacgcagattgccgttcatgatccggctctttaaaataacgcagtagaaacggagagcgatctgaacacggtctgcagatttcaacgaggtgtggtgtgagcgcgatgagcgttcatggcccgtaatccgacgggatatccgacatttgtgccgtatccagcgcatgccgacaatccgtccggagatccctctccctctctctcatggcattcatgttttaaaccaaccaagccgcctctgctgctccgatccgtctccctctgttccagcagtcaggatggaggccgccgcaacacttccgccgctgctgctcctcatcctccttgctgcgactgcggtgccggctccgtcgcacgcatggggagtcgacggccatctcatggtctgccagatcgcacagggccgtctgagtggcgcggcggccgcggcggtgaaggacctgctgccgtcctacgccggcaacaacctgagcagcctctgctcctgggcggacgacgtcaagttcaggtacccctggtcgtcgccgctccactacatcgacacccccgacggcctctgcacctaccgctacgacagggactgcaaggacgaggacggcgtcgagggccggtgcgtcgcgggcgccatcaacaactacacctcccagctcctcgcctaccggagatcttcacccactgagtataacctaacgcaagcgctcctcttcctctcgcacttcatcggagacatacaccagccacttcacgtggggttcacctccgacaaaggagggaacaccattgacgtccactggtacacaaggaagactgttctacaccatgtacgtttgggacgccagcatcatccagacggccgaagatgacttctacggcgacagcgtagccgggtatatcgacaccctgaagaaaaatataacgcagggagaatggtcggagcaagtgtctagctgggaagcgtgcggtacgaaccagactgcatgtccagacatatatgcgtctgagagcgtcgctgcagcatgcgactgggcgtacaagggagtcgaggaagactcaaccctagaagatccctatttctccagcaggctgccggtagtcagcctgaggctagcgcaaggcggcgtcagattagccgccactctgaacaggatttttggataatggtggagtacatttactatacatggaactattatggaattaaatgatatatataactattggtttctcagcaaaacttgtcaagcagtgacgtttttccttccttttaaaagcgattgtctagagattctcagtgttcacttgcgtaaatttggatgaattttat

SEQ ID NO: 29552 - DNA, 1001 bp, Zea Mays
caaggcatctttacagtaaatcatcaagatatgaaagtaaccagtttattcttttatcagcacgtagccctccctatacattagtatatgagaccttttgctaactaatcatttcatttcacgtatatttcttagctgggaaaacttccctacaattacagtgtagtccactttacgacaactgcaaaaatcctcattccctacaattacagtgttagctgaagaatctgctgtttaccccagccctgtacagctgcacagactcggggccacacgcagagatcttaacctcggtgtacgcggggacgaagaaaacatcaccttcctctgctttctccccatctgacataaaatccaattgaatctcgccttccccggtgattacgagaaagatggatggacctggtaccggggatatgacgaccagtccacctggaggcaccaagcaccaatccacctcaaactcattaaatggaggtgtgtagcgccttacgtgtggctgcacaggaactcctcgcaaaatttcagggaaaccctgataaagaaaaaggacccacagtagatctgttaaaaaaactaatcacaaaataatggcagtggcacggaacaactaattgatctcttgctagattagtttgcctgattagaaaacctagccatctataatttttcgctaacttttaacaccaaagagaatatgaactttgatcctaacttgtaaagtttcataataagataagaaaaatgatccatggacaacacttcaacagtgcacaagattctgaagcatttgctcactgggagcttagtaagcaaggatgcacttgccaagtaaagaacttatggaacaagtaaacatcaatgaaaacatatattgtatatgagaagcaaaaagtaacaatgacgctcacctgcttgtatgttagcattgagcagagagtttgcacatctctgtatttaggtgtcaaaccagcacgtacaacattatctgaagtggccat

SEQ ID NO: 29553 - DNA, 791 bp, Zea Mays
cgacgacacgcggcgtctttgctactacttggagagcagcgaatctgaacacgtggcaccagagacacataccctcgacatgtaactctcgatttgggacggtaatgcgtacggatttcagaatggataaataattatgaacaattatttattggacacgggtatatagtagaatttgttatctatggtacgggtatagatataataaaatatttgtggataatttttttaggtatctatacctattacctaatgactatttgatatatgggtcatcggccatcctaattgaatacattatcctaaattcttatttttcaatttttcatccatgtcatgtttgtcttgtgctgaaattattgtttaatgctactagaatgataaaataggacaatattaaattctcacacacagttcctccaatagaggaaatgaaatgatgtgcttattgtaaatggcattgcttcttttctcgtgctaccaataattgtaacgtctttcatcggtaaatataaccggctataaataaaggactgttgagctttcaggaaaagcagattgatatgtgtcgggaaaatgatcctcgggccctcgaggcccaccagtgagaaagagcgcatgggataaggacctctagattaccggccagcgagggagtaagggaactgtcttccctgtaagggctcaccctcggataaacaccaaggcaccgtgcccggggtcgagcgaggatgagctagaaaggagggtggtgaaccgaagggaagctaactgagtggattcctcgtcta

SEQ ID NO: 29554 - DNA, 3814 bp, Zea Mays
ctgaggtttcgatacatcaccctcacctctggcccgtcgggcttggggatggactggagcatcatggctgccgctgccatgttctgtccaatgttgaggaagtattgcgccccgtcactgctttcggcaagctggccataaaaccttttcgcttgggatcgttcggcctcgaggcgttttttctcaatgtcaccgtaaattcgaccgagcttacggacgagagcgtcgaggccttcttgctgccgccgaagtgcgttctcgcgagtgagaacgcactcctggagggagctcagacttgtaatgggttggaatttacaatgggaacttgtattctgttggagggagctcggtcggtggcccttgggtatcaaggtttcctctgatgctgtctgtagggtcgtgtgtagccgtactcccataatggcgtactatctcgttcgctcgttgtataggtccctttcgctggtcttctgttgacatcctcatggtagtgcgcgggagttccacaggtcagtcgtatggagcagccgtgtgtcgtgcggtcttgcctgtcgtcatgagcctgcgtccctcgttggcgtgcgtaggcgtacactcagtatggtgtatctgctgcgcactactcggtattcgggtcactgtagaagctccgatgctaaggtattttatgaatagggtcgtccggcccctcgaggctgtgggagcgtgtctggggctgtacttggggaggtgcggtcatgtcgatagtggccactcggtgtgcactcatactgtcgtttgggtgactggccatagcctagggtgtcatgtcttatctttagccggcgcagacttcgtgacgtttgacttaggtttctgccttgcttccctttcttggttgggaccaaggtggtcattctgcctcatggacttgcttggcagggacctgctcggccgccccgcctcgctgacttgcccagtagggatctggttggttgctccgcctcgtggactagcttgacagggacctagccagctgctttgccttgtagacttggtcggcagggacctggctgtgtggttattctgcctcatggacttacttggcagggacctgctcggccgcttcacctcgtggacttgcccggtagggacctggtcggttgctctgcctcgtggactggctcgacagggacctaatccactatcggaattcagatctttgttgagtgtttttttcgggcacttggcaaagaaactctttgtcgagtgctaagcaaaaaaaaccctcggtaaaagaaaacactcggttgagtgttttatttttgacactcggcaaagagtttctttgccgagtgttttttaacactcggcaaagggtttatttactgagtgtcaaatatataacactcgcaaagtgcatctttgtcgagtgttttttttcaacactaggcaaagacaatttaaaaatcacattttaaagcagtaaattaattaaaatgaaaaagttttcaactaaaaatttgtataactcatcattatgtacaatttatattttgaacatttcttcgtatgacaaaataaagtaaatttgttcataaaacctatatttctcgtagtagtttatgaaactacgagagagatgtataagatttgtgcatattgttagaaccatcatatgagattaacaaatgaccaaacaaccaaaataaactttgtagatcttgagaagttatagaattttgtagttggcaactttttcatttgaagtcatcttgtcaactaaaacaatgtctgaatttaaaaaatttaaaatttgaattttgaaaacgacctcgaaagacaaaatcagcaacaagaaagttgtaggtactgaagagttatgaaactttatagttgacaatattttggcttgaaatcatcttatcatgtaaaactatgtttgaattttaaatttgaatttttcaaactatctcggatgaaaaaaccatcaaaataaaagttataggtcttaaaatgtaatgaaactttgtaattgataattttttgatttgaaatcatcttatcattgaaaaattcgtgtgaagttttcaaatttaaaattcaaattttgtaaacagcctcggatatagaaactattaaaatagaacttgtagatcttaaaaagttatgcaactttatagctggtcacattttcaaatgaattcatttagtgcctcaaacaatcaaattactctcagtttgttataatacatgagaaatgaaaacgtaatatagtcataattgatgtagtagtgtagtggtagaggaggatatgcacgagagaagttgtgggttcgaatgtcaccattcacaaaatatgtaaatttgattcaaaatagtagtgaaaaataatagggcattgggtatggtattgtgtaatggttggagagttgttcccgtaatttaaaaaatgttttgctattttttggggtttttttgcgattcttaatttgtcgagtgtccaaaaaagtattcggcaaaaaaccctttgccgataaaatgtttgtcaaatattctttgtcgattgtaacactcggcaaaggctttgtcgagtataaaatagcctttgccaaatgtcctggacactcagcaaagaacgcgagttcggtagtgtatcttagctgctttgcctcgcagacttgctcggcaagtcagggacctggtaggtggctccatctcgtgtatttgctcggtagggacctagtcggttgctccgtcttgcggactggctcgggcttgtttgcctcgtggacttgctgggcagggacctggtcggtgactccgcctcgtggattggcttgatacagacctgataggcggctttgcctcacggacttgctcagtagggacttggttggtggctacgcctcgtggactgcctcggtagggacctggtcgactgttttgcctcgtagacttgttcattaggaacttggtcggtggctccgtctcgcagacttgctcggtagggaactagtagatggctccgcctcacggacttgctcggtaggaacctgaatgctcgacttgaatactgtctcgttaatatattggcatatttttaacttgtgagtgcaattttatttaattataaaattaatcatcttgtttaattatgtatttcggttgtagaaaaactaaatagaaaataaaataggtggtagttgcggtggttgagaggaaatataattatatattgggatggtgagttataagagaaaatataggggtaacgacagcagaacgtaagaggatagatgtatgaatcgtcactgtagcagcatataaggtcgacttcagcagattatccaaaatttatctatgtgcactgtttatatcattatatactgtagactgtactattcgctaaataaagtttaaatataggtacgagaatggataaggccatgtttagtttcaattagtcctaggactaaactttagtcccaggactgatctatgtgtactgtttggttctagtgactaaatagattctaaagttattaaatacgctgtccaaaaactcaaatgctttggaatatactcacaacattagttgtctatataaatatgctctcacaaccaaatattatggaaggtaagtgctacatgataattatagactttttagtctttttaagcacctatatgaaggactaaagactaaatcattttagtctatatttaatcctagtgtttagtaaaaaagggactaaatgggactaaaaactagagattaatctttagtccctctaaccaaacaccccataagctggtagagataaggatgaat

SEQ ID NO: 29555 - DNA, 695 bp, Zea Mays
caaatccaaacaacctgttcatttgtggagggacacccaatgcaacatgcaaaacaacaacaaaatcttgcttattggcgcctgatgatttattttattccatctcgactgggaagggacacccaatcaaacatacaaaacaacaacaagagctagcttattggtgtggctgcctgcttgtagcaaggcggacggacggaggaacatggaaggatccatcggctgtgccgctgtggcgcgcggccatggtggaattggatgagtctctagtggatcttgcagccgcagttttcggggaggaagtcgcggcacctgtacttgatggcccccttgtccgtggacacggggacgcagttcttgcaggtggcggcgcacttggtgaggaggtcgtcgcaggtccacacgcccgaccagctggtgcactcgccgcaccagcactgcttcttcgtcgtcggtcctttggccacggccgcagagaccagaagggcctggagaactaggatcgccaacagagtgctgctcttcatcttctcgacctctcgctctaccaccgcttgctgccgacctctactacaagaacgcaagcttcgagttcgtcactgctgagatgagaagcacacgtaactaggtactcaatatataggccgggtgtgtcctgatcgatcgggccgggacacatgccatgtgcacctgat

SEQ ID NO: 29556 - DNA, 718 bp, Zea Mays
caaatccaaacaacctgttcatttgtggagggacacccaatgcaacatgcaaaacaacaacaaaatcttgcttattggcgcctgatgatttattttattccatctcgactgggaagggacacccaatcaaacatacaaaacaacaacaagagctagcttattggtgtggctgcctgcttgtagcaaggcggacggacggaggaacatggaaggatccatcggctgtgccgctgtggcgcgcggccatggtggaattggatgagtctctagtggatcttgcagccgcagttttcggggaggaagtcgcggcacctgtacttgatggcccccttgtccgtggacacggggacgcagttcttgcaggtggcggcgcacttggtgaggaggtcgtcgcaggtccacacgcccgaccagctggtgcactcgccgcaccagcactgcttcttcgtcgtcggccctgcgcgcagcagcctgcaggtcctttggccacggccgcagagaccagaagggcctggagaactaggatcgccaacagagtgctgctcttcatcttctcgacctctcgctctaccaccgcttgctgccgacctctactacaagaacgcaagcttcgagttcgtcactgctgagatgagaagcacacgtaactaggtactcaatatataggccgggtgtgtcctgatcgatcgggccgggacacatgccatgtgcacctgat

SEQ ID NO: 29557 - DNA, 683 bp, Zea Mays
aaacaacctgttcatttgtggagggacacccaatgcaacatgcaaaacaacaacaaaatcttgcttattggcgcctgatgatttattttattccatctcgactgggaagggacacccaatcaaacatacaaaacaacaacaagagctagcttattggtgtggctgcctgcttgtagcaaggcggacggacggaggaacatggaaggatccatcggctgtgccgctgtggcgcgcggccatggtggaattggatgagtctctagtggatcttgcagccgcagttttcggggaggaagtcgcggcacctgtacttgatggcccccttgtccgtggacacggggacgcagttcttgcaggtggcggcgcacttggtgaggaggtcgtcgcaggtccacacgcccgaccagctggtgcactcgccgcaccagcactgcttctgcaggtcctttggccacggccgcagagaccagaagggcctggagaactaggatcgccaacagagtgctgctcttcatcttctcgacctctcgctctaccaccgcttgctgccgacctctactacaagaacgcaagcttcgagttcgtcactgctgagatgagaagcacacgtaactaggtactcaatatataggccgggtgtgtcctgatcgatcgggccgggacacatgccatgtgcacctgat

SEQ ID NO: 29558 - DNA, 582 bp, Zea Mays
ctctctattgatttatctgtacacaagcttctagagccgatccacacgtctccctaatcctctccccacacaaacattatcttcatcccacacgtcaccctctcttcttgagagcatgccgccccatctcctttcccccatggcacccatctcttccctgctgcttctcctggccgagctgctccaccatccgctactgctccaaaactcagtgccgaccaccatctcccatggcgcaggagctccccatcctcctcttgccagggcgccgttgctgagctcgccctgcccccagccatggacgtcgtcaggccacctgtttcctatcttccatggacgccaatagcagcagcccactccttttgttctccatggatgaaagcccaagcatctgcgcctcccctaggtttttgtacaatcgcagcagcacgtcggacctttgcaaccccggtaaatcctaggaaatttagatgagaagaaagctttagcgagacgcttgccaagtgcttggtgaatcgcctcaaccggatgtggttgtcgatctcgcggagtcgagtcgagtttagtcgtggtaagtcgatc

SEQ ID NO: 29559 - DNA, 606 bp, Zea Mays
ctctctattgatttatctgtacacaagcttctagagccgatccacacgtctccctaatcctctccccacacaaacattatcttcatcccacacgtcaccctctcttcttgagagcatgccgccccatctcctttcccccatggcacccatctcttccctgctgcttctcctggccgagctgctccaccatccgctactgctccaaaactcagtgccgaccaccatctcccatggcgcaggagctccccatcctcctcttgccagggcgccgttgctgagctcgccctgcccccagccatggacgtcgtcaggccacctgtttcctatcttccatggacgccaatagcagcagcccactccttttgttctccatggatgaaagcccaagcatctgcgcctcccctaggtttttgtacaatcgcagcagcacgtcggacctttgcaaccccggaaatttagatgagaagaaagctttagcgagacgcttgccaagtgcttggtgaatcgcctcaaccggatgtggttgtcgatctcgcggagtcgagtcgagtttagtcgtggtacgttaattaatcacgtgatgtgaaggacaagagctggattaat

SEQ ID NO: 29560 - DNA, 2718 bp, Zea Mays
ctccctcgcagcgccggcgctccatcttccgctccctccctttactcgcgctcgttgattccaagcatggaaactctaccaaatggctcagtaaataatgctgagcttaaccaggaaaatgagaagtccatgtatgctagtgagtctgaagaagcacgggatatttttgtttacagagaagatgttgtgagcttgaagtccaaggaggatgtccgtggtgtagtattggaggtagctggggaatatgattatgatggtagcatcactgatgatgacattgatactgaggaacatgaagataaaactgcttatggagctgaaaatggtgttgccgatggtggcttgcagtgcagtttggggcccggggagcccggtgcctccacatttgttcttgtggcttacgattatatcgaaagcggaggagcttttggggatccatacaaactctacggtgtctcacagagtcagaaactattaccaaacaaaacagaagatgatagcatgtcgatacaactagaaacgaagggagatcagcaatctgttcctctagaggagcagaacccagaggaccttactcttttgtctcgtttctcatatacaaactggcaattaactgactggtgtctttctcagcgatacacttcatgtactaacgataccatgattgattctgataagcatacatggcagatatgtacatgctcagaaaactcagttccactgtctggtattccagaatctcaagctgatgctcagattgatacagatacaggtcacaggcagacagatgttgattctactgcagatgtattgagtatgtcggatggagataattcatgcatagccaaagaatcagaaacaggaactagtgcatcaagcatctcaaatgagggtccacaggacaatgcaacatctagaaaaaagtttaggaaagtattttttaaaaaagacaaaagaacaaaaaaaagagatgacaactttgagcgagctctactcattgcgaatacttgtaccaaagtcgatgtaatctggcaggatgggacaaaggaatgtggagtagccgcaacagcattgatccctatccacagtccaaatgaacatgaattcttcccggagcagtatgttgtggataaagtcacaaatgatgttggtgttgatgattcttctgaaccaaggcgtgtgggtcttgttagaggtgttaatgctaaggaccgaacagcaactgtgtcatggtttaagcctcctctacatccagaggagccaaaggagatcgcatgtaacgaaattgtgagtgtatatgaactggatgtccatccagattatgattattgctatggagatattgttgtccgcttgccgcctgttaaaccggtaattgagtcaaccaatagcaaggaacaaatggaactggataagacgttagattcctcggaaggatttgctgcttcatattctgcaccccctgatactagtgcagacgaacagctttcacagaaggaatcctgcttgcagtttacaagcctctcttgggctggaaatatagttggctttcaagacggtgagattgaagtcatttggggtgatggatcgatttctaaggttggtcctcatgaaatatatgttgttggtcgtgaagatgatggtgcctcactagatgatggaacagcctctgatggttctagctgggagactgttgatgacaacgaaatggatgtacttcatgattctgcaaagggtgattcgcaaaatgtacctgagaatagcattggaagggaaaatggttcattcagctcccaggatggaagttctgttgcaactggtcccctttcagttgcttttgagtttgtgacccgactggcgagtgatctctttgctcgaggtagaaggcatttagatggatcatcagatgctatggatgaagttgagtctcactggtctaatgagatttcagaaattggtgatgacattgataagtgtaataagaatcatgtggaatcaccagagcatgctgcagtcatagaaaatgattcttctgtcgagaagtctgtagatgtggttatggctgataatcctgtacattctgaatgtttcaaacactttgatgttctgcaatgtcctctagaccaccactaccttgaaaacacaacccagactttcaggtttttgtcaagtgtgaactgtcaagaagtagaactcaagactgcagcgagtagcgacaacataatgtcttctccaaatgaagctccatcttctgtggctggtgagtacgacccgaagagcgatcctacccggaagccacggaagtctactgatccagggtggaagtatggattttggccagatcttcaaaataaagataaggtggaatgcaccctatgtggccaggttgttagtggagggataaagaggttaaagcaacatttggcaggggtgtatggagatgcaaagttatgtcccaaggctagcagtggattaaggaaggagatgacaagttatttggaggcaaacaagagaaaaagaccaatgtttctagatgaagatgaagaagatgatgaagtggtggctgtggcagcagcagatggggcgaatgatacatctgctgtggagtttcaagcatccaaggtgcagcctagttctggtacagctgccaaaaaagacaatcaaccttgcaatttacggcaagtagtaaagcacaaccaaagtcagccaagtccgtag

SEQ ID NO: 29561 - DNA, 3385 bp, Zea Mays
cggtgtcagcggcttcccttcccgcctctcgctggtcgcctcgcgccctcgcctccggtcctccgcgcaccggccggtgaccctacttgattccaagcatggaaactctaccaaatggctcagtaaataatgctgagcttaaccaggaaaatgagaagtccatgtatgctagtgagtctgaagaagcacgggatatttttgtttacagagaagatgttgtgagcttgaagtccaaggaggatgtccgtggtgtagtattggaggtagctggggaatatgattatgatggtagcatcactgatgatgacattgatactgaggaacatgaagataaaactgcttatggagctgaaaatggtgttgccgatggtggcttgcagtgcagtttggggcccggggagcccggtgcctccacatttgttcttgtggcttacgattatatcgaaagcggaggagcttttggggatccatacaaactctacggtgtctcacagagtcagaaactattaccaaacaaaacagaagatgatagcatgtcgatacaactagaaacgaagggagatcagcaatctgttcctctagaggagcagaacccagaggaccttactcttttgtctcgtttctcatatacaaactggcaattaactgactggtgtctttctcagcgatacacttcatgtactaacgataccatgattgattctgataagcatacatggcagatatgtacatgctcagaaaactcagttccactgtctggtattccagaatctcaagctgatgctcagattgatacagatacaggtcacaggcagacagatgttgattctactgcagatgtattgagtatgtcggatggagataattcatgcatagccaaagaatcagaaacaggaactagtgcatcaagcatctcaaatgagggtccacaggacaatgcaacatctagaaaaaagtttaggaaagatgggacaaaggaatgtggagtagccgcaacagcattgatccctatccacagtccaaatgaacatgaattcttcccggagcagtatgttgtggataaagtcacaaatgatgttggtgttgatgattcttctgaaccaaggcgtgtgggtcttgttagaggtgttaatgctaaggaccgaacagcaactgtgtcatggtttaagcctcctctacatccagaggagccaaaggagatcgcatgtaacgaaattgtgagtgtatatgaactggatgtccatccagattatgattattgctatggagatattgttgtccgcttgccgcctgttaaaccggtaattgagtcaaccaatagcaaggaacaaatggaactggataagacgttagattcctcggaaggatttgctgcttcatattctgcaccccctgatactagtgcagacgaacagctttcacagaaggaatcctgcttgcagtttacaagcctctcttgggctggaaatatagttggctttcaagacggtgagattgaagtcatttggggtgatggatcgatttctaaggttggtcctcatgaaatatatgttgttggtcgtgaagatgatggtgcctcactagatgatggaacagcctctgatggttctagctgggagactgttgatgacaacgaaatggatgtacttcatgattctgcaaagggtgattcgcaaaatgtacctgagaatagcattggaagggaaaatggttcattcagctcccaggatggaagttctgttgcaactggtcccctttcagttgcttttgagtttgtgacccgactggcgagtgatctctttgctcgaggtagaaggcatttagatggatcatcagatgctatggatgaagttgagtctcactggtctaatgagatttcagaaattggtgatgacattgataagtgtaataagaatcatgtggaatcaccagagcatgctgcagtcatagaaaatgattcttctgtcgagaagtctgtagatgtggttatggctgataatcctgtacattctgaatgtttcaaacactttgatgttctgcaatgtcctctagaccaccactaccttgaaaacacaacccagggtacaggtggaaaaaagtgggtcaaaaaggtacaacaggaatggagcatacttgagaagaacctaccagactatatttatgtcagggtatttgaggatcgcatggatctcttgagagccgtgattgttggagcaagtggaacaccctaccaagatggccttttcttctttgatttccaccttccacttgagtatccgctagtccctccgtcagcatactatcattctggtggtttgcgtgtaaatccaaacctgtatgtggacgggaaggtttgcttgagtctcttaaatacctggactggcagagggaacgaagtttgggatccatcatcatcaagtattctccaagtactagtttcacttcagggattggttctcaatgaaaaaccctattttaatgaggctgggtatgagaagcaagttggtactgttgaaggggagaagaatgcagtgccgtataatgagaatacgtacctgctgagcgtgaaatccatgctgtatatattgagacggcctcctttgcattttgaggattttgtgaagagccacttccgcaagcgtggtcactacatccttaaagcttgccacgcctatttgcaaggaaatgttgttggcactctcaccgacgacgcgtgcaccaccgacagaagcaaagagcactcgagctctgttggcttcaagcttgtactagcaaagattttaccacggttgattacagccctgaaggacactggagctgactgcgaccaatacgagcacctcgggagaacagaaaccgttacagaaagctgatcattgagtgatttgtacttgattcttttgctttttctctgttttttggggtttcagaaagatggtgacttcaccaccaggctgttttcctataaatgtacattcaaagtttgttgtttcagtcaaacatttggaaaatttggcccaaatgatttagggggggggggggggggggtttgaagtcactagagataatagttagttagctaaaaattgttagtgttattagctagctaactattaccaaatttgctaaaagtatctaatatctaaactattagttagactgtttggatgtcttggctaattttagcagctaactaatagttttagtgcatttaaacacctcttattcgttacatggaactgaactacactgtacagctgatgtttggttaaacttgtaccagcgaagagttggcaatactggaaccaggcctagagattcctggaacagagatttgatgtccatgtatttacgggtggtattggtttcacgaatatacactcgc

SEQ ID NO: 29562 - DNA, 3365 bp, Zea Mays
cggtgtcagcggcttcccttcccgcctctcgctggtcgcctcgcgccctcgcctccggtcctccgcgcaccggccggtgaccctacagaagatgttgtgagcttgaagtccaaggaggatgtccgtggtgtagtattggaggtagctggggaatatgattatgatggtagcatcactgatgatgacattgatactgaggaacatgaagataaaactgcttatggagctgaaaatggtgttgccgatggtggcttgcagtgcagtttggggcccggggagcccggtgcctccacatttgttcttgtggcttacgattatatcgaaagcggaggagcttttggggatccatacaaactctacggtgtctcacagagtcagaaactattaccaaacaaaacagaagatgatagcatgtcgatacaactagaaacgaagggagatcagcaatctgttcctctagaggagcagaacccagaggaccttactcttttgtctcgtttctcatatacaaactggcaattaactgactggtgtctttctcagcgatacacttcatgtactaacgataccatgattgattctgataagcatacatggcagatatgtacatgctcagaaaactcagttccactgtctggtattccagaatctcaagctgatgctcagattgatacagatacaggtcacaggcagacagatgttgattctactgcagatgtattgagtatgtcggatggagataattcatgcatagccaaagaatcagaaacaggaactagtgcatcaagcatctcaaatgagggtccacaggacaatgcaacatctagaaaaaagtttaggaaagtattttttaaaaaagacaaaagaacaaaaaaaagagatgacaactttgagcgagctctactcattgcgaatacttgtaccaaagtcgatgtaatctggcaggatgggacaaaggaatgtggagtagccgcaacagcattgatccctatccacagtccaaatgaacatgaattcttcccggagcagtatgttgtggataaagtcacaaatgatgttggtgttgatgattcttctgaaccaaggcgtgtgggtcttgttagaggtgttaatgctaaggaccgaacagcaactgtgtcatggtttaagcctcctctacatccagaggagccaaaggagatcgcatgtaacgaaattgtgagtgtatatgaactggatgtccatccagattatgattattgctatggagatattgttgtccgcttgccgcctgttaaaccggtaattgagtcaaccaatagcaaggaacaaatggaactggataagacgttagattcctcggaaggatttgctgcttcatattctgcaccccctgatactagtgcagacgaacagctttcacagaaggaatcctgcttgcagtttacaagcctctcttgggctggaaatatagttggctttcaagacggtgagattgaagtcatttggggtgatggatcgatttctaaggttggtcctcatgaaatatatgttgttggtcgtgaagatgatggtgcctcactagatgatggaacagcctctgatggttctagctgggagactgttgatgacaacgaaatggatgtacttcatgattctgcaaagggtgattcgcaaaatgtacctgagaatagcattggaagggaaaatggttcattcagctcccaggatggaagttctgttgcaactggtcccctttcagttgcttttgagtttgtgacccgactggcgagtgatctctttgctcgaggtagaaggcatttagatggatcatcagatgctatggatgaagttgagtctcactggtctaatgagatttcagaaattggtgatgacattgataagtgtaataagaatcatgtggaatcaccagagcatgctgcagtcatagaaaatgattcttctgtcgagaagtctgtagatgtggttatggctgataatcctgtacattctgaatgtttcaaacactttgatgttctgcaatgtcctctagaccaccactaccttgaaaacacaacccagggtacaggtggaaaaaagtgggtcaaaaaggtacaacaggaatggagcatacttgagaagaacctaccagactatatttatgtcagggtatttgaggatcgcatggatctcttgagagccgtgattgttggagcaagtggaacaccctaccaagatggccttttcttctttgatttccaccttccacttgagtatccgctagtccctccgtcagcatactatcattctggtggtttgcgtgtaaatccaaacctgtatgtggacgggaaggtttgcttgagtctcttaaatacctggactggcagagggaacgaagtttgggatccatcatcatcaagtattctccaagtactagtttcacttcagggattggttctcaatgaaaaaccctattttaatgaggctgggtatgagaagcaagttggtactgttgaaggggagaagaatgcagtgccgtataatgagaatacgtacctgctgagcgtgaaatccatgctgtatatattgagacggcctcctttgcattttgaggattttgtgaagagccacttccgcaagcgtggtcactacatccttaaagcttgccacgcctatttgcaaggaaatgttgttggcactctcaccgacgacgcgtgcaccaccgacagaagcaaagagcactcgagctctgttggcttcaagcttgtactagcaaagattttaccacggttgattacagccctgaaggacactggagctgactgcgaccaatacgagcacctcgggagaacagaaaccgttacagaaagctgatcattgagtgatttgtacttgattcttttgctttttctctgttttttggggtttcagaaagatggtgacttcaccaccaggctgttttcctataaatgtacattcaaagtttgttgtttcagtcaaacatttggaaaatttggcccaaatgatttagggggggggggggggggggtttgaagtcactagagataatagttagttagctaaaaattgttagtgttattagctagctaactattaccaaatttgctaaaagtatctaatatctaaactattagttagactgtttggatgtcttggctaattttagcagctaactaatagttttagtgcatttaaacacctcttattcgttacatggaactgaactacactgtacagctgatgtttggttaaacttgtaccagcgaagagttggcaatactggaaccaggcctagagattcctggaacagagatttgatgtccatgtatttacgggtggtattggtttcacgaatatacactcgc

SEQ ID NO: 29563 - DNA, 2345 bp, Zea Mays
cgtttgatgatggctctgtctgtaaagtcaatagggcagatcctaagtgcttaaagccagcagctggcccaattcatccagatacagcttgtcctttttatccaggacagcgtgtcaaggcatcatcatcatctgttttcaaaacatgcagatggcttaacggattttggagagcaagtcgtcttgaaggtactatcacaaaagtggaaagtgttgctgttttagtctattggattgcatctgcacactttgctacagatcagcaatctgttcctctagaggagcagaacccagaggaccttactcttttgtctcgtttctcatatacaaactggcaattaactgactggtgtctttctcagcgatacacttcatgtactaacgataccatgattgattctgataagcatacatggcagatatgtacatgctcagaaaactcagttccactgtctggtattccagaatctcaagctgatgctcagattgatacagatacaggtcacaggcagacagatgttgattctactgcagatgtattgagtatgtcggatggagataattcatgcatagccaaagaatcagaaacaggaactagtgcatcaagcatctcaaatgagggtccacaggacaatgcaacatctagaaaaaagtttaggaaagatgggacaaaggaatgtggagtagccgcaacagcattgatccctatccacagtccaaatgaacatgaattcttcccggagcagtatgttgtggataaagtcacaaatgatgttggtgttgatgattcttctgaaccaaggcgtgtgggtcttgttagaggtgttaatgctaaggaccgaacagcaactgtgtcatggtttaagcctcctctacatccagaggagccaaaggagatcgcatgtaacgaaattgtgagtgtatatgaactggatgtccatccagattatgattattgctatggagatattgttgtccgcttgccgcctgttaaaccggtaattgagtcaaccaatagcaaggaacaaatggaactggataagacgttagattcctcggaaggatttgctgcttcatattctgcaccccctgatactagtgcagacgaacagctttcacagaaggaatcctgcttgcagtttacaagcctctcttgggctggaaatatagttggctttcaagacggtgagattgaagtcatttggggtgatggatcgatttctaaggttggtcctcatgaaatatatgttgttggtcgtgaagatgatggtgcctcactagatgatggaacagcctctgatggttctagctgggagactgttgatgacaacgaaatggatgtacttcatgattctgcaaagggtgattcgcaaaatgtacctgagaatagcattggaagggaaaatggttcattcagctcccaggatggaagttctgttgcaactggtcccctttcagttgcttttgagtttgtgacccgactggcgagtgatctctttgctcgaggtagaaggcatttagatggatcatcagatgctatggatgaagttgagtctcactggtctaatgagatttcagaaattggtgatgacattgataagtgtaataagaatcatgtggaatcaccagagcatgctgcagtcatagaaaatgattcttctgtcgagaagtctgtagatgtggttatggctgataatcctgtacattctgaatgtttcaaacactttgatgttctgcaatgtcctctagaccaccactaccttgaaaacacaacccagactttcaggtttttgtcaagtgtgaactgtcaagaagtagaactcaagactgcagcgagtagcgacaacataatgtcttctccaaatgaagctccatcttctgtggctggtgagtacgacccgaagagcgatcctacccggaagccacggaagtctactgatccagggtggaagtatggattttggccagatcttcaaaataaagataaggtggaatgcaccctatgtggccaggttgttagtggagggataaagaggttaaagcaacatttggcaggggtgtatggagatgcaaagttatgtcccaaggctagcagtggattaaggaaggagatgacaagttatttggaggcaaacaagagaaaaagaccaatgtttctagatgaagatgaagaagatgatgaagtggtggctgtggcagcagcagatggggcgaatgatacatctgctgtggagtttcaagcatccaaggtgcagcctagttctggtacagctgccaaaaaagacaatcaaccttgcaatttacggcaagtagtaaagcacaaccaaagtcagccaagtccgtag

SEQ ID NO: 29564 - DNA, 3082 bp, Zea Mays
gtttgatgatggctctgtctgtaaagtcaatagggcagatcctaagtgcttaaagccagcagctggcccaattcatccagatacagcttgtcctttttatccaggacagcgtgtcaaggcatcatcatcatctgttttcaaaacatgcagatggcttaacggattttggagagcaagtcgtcttgaaggtactatcacaaaagtggaaagtgttgctgttttagtctattggattgcatctgcacactttgctacagatcagcaatctgttcctctagaggagcagaacccagaggaccttactcttttgtctcgtttctcatatacaaactggcaattaactgactggtgtctttctcagcgatacacttcatgtactaacgataccatgattgattctgataagcatacatggcagatatgtacatgctcagaaaactcagttccactgtctggtattccagaatctcaagctgatgctcagattgatacagatacaggtcacaggcagacagatgttgattctactgcagatgtattgagtatgtcggatggagataattcatgcatagccaaagaatcagaaacaggaactagtgcatcaagcatctcaaatgagggtccacaggacaatgcaacatctagaaaaaagtttaggaaagatgggacaaaggaatgtggagtagccgcaacagcattgatccctatccacagtccaaatgaacatgaattcttcccggagcagtatgttgtggataaagtcacaaatgatgttggtgttgatgattcttctgaaccaaggcgtgtgggtcttgttagaggtgttaatgctaaggaccgaacagcaactgtgtcatggtttaagcctcctctacatccagaggagccaaaggagatcgcatgtaacgaaattgtgagtgtatatgaactggatgtccatccagattatgattattgctatggagatattgttgtccgcttgccgcctgttaaaccggtaattgagtcaaccaatagcaaggaacaaatggaactggataagacgttagattcctcggaaggatttgctgcttcatattctgcaccccctgatactagtgcagacgaacagctttcacagaaggaatcctgcttgcagtttacaagcctctcttgggctggaaatatagttggctttcaagacggtgagattgaagtcatttggggtgatggatcgatttctaaggttggtcctcatgaaatatatgttgttggtcgtgaagatgatggtgcctcactagatgatggaacagcctctgatggttctagctgggagactgttgatgacaacgaaatggatgtacttcatgattctgcaaagggtgattcgcaaaatgtacctgagaatagcattggaagggaaaatggttcattcagctcccaggatggaagttctgttgcaactggtcccctttcagttgcttttgagtttgtgacccgactggcgagtgatctctttgctcgaggtagaaggcatttagatggatcatcagatgctatggatgaagttgagtctcactggtctaatgagatttcagaaattggtgatgacattgataagtgtaataagaatcatgtggaatcaccagagcatgctgcagtcatagaaaatgattcttctgtcgagaagtctgtagatgtggttatggctgataatcctgtacattctgaatgtttcaaacactttgatgttctgcaatgtcctctagaccaccactaccttgaaaacacaacccaggggtacaggtggaaaaaagtgggtcaaaaaggtacaacaggaatggagcatacttgagaagaacctaccagactatatttatgtcagggtatttgaggatcgcatggatctcttgagagccgtgattgttggagcaagtggaacaccctaccaagatggccttttcttctttgatttccaccttccacttgagtatccgctagtccctccgtcagcatactatcattctggtggtttgcgtgtaaatccaaacctgtatgtggacgggaaggtttgcttgagtctcttaaatacctggactggcagagggaacgaagtttgggatccatcatcatcaagtattctccaagtactagtttcacttcagggattggttctcaatgaaaaaccctattttaatgaggctgggtatgagaagcaagttggtactgttgaaggggagaagaatgcagtgccgtataatgagaatacgtacctgctgagcgtgaaatccatgctgtatatattgagacggcctcctttgcattttgaggattttgtgaagagccacttccgcaagcgtggtcactacatccttaaagcttgccacgcctatttgcaaggaaatgttgttggcactctcaccgacgacgcgtgcaccaccgacagaagcaaagagcactcgagctctgttggcttcaagcttgtactagcaaagattttaccacggttgattacagccctgaaggacactggagctgactgcgaccaatacgagcacctcgggagaacagaaaccgttacagaaagctgatcattgagtgatttgtacttgattcttttgctttttctctgttttttggggtttcagaaagatggtgacttcaccaccaggctgttttcctataaatgtacattcaaagtttgttgtttcagtcaaacatttggaaaatttggcccaaatgatttagggggggggggggggggggtttgaagtcactagagataatagttagttagctaaaaattgttagtgttattagctagctaactattaccaaatttgctaaaagtatctaatatctaaactattagttagactgtttggatgtcttggctaattttagcagctaactaatagttttagtgcatttaaacacctcttattcgttacatggaactgaactacactgtacagctgatgtttggttaaacttgtaccagcgaagagttggcaatactggaaccaggcctagagattcctggaacagagatttgatgtccatgtatttacgggtggtattggtttcacgaatatacactcgc

SEQ ID NO: 29565 - DNA, 3081 bp, Zea Mays
gtttgatgatggctctgtctgtaaagtcaatagggcagatcctaagtgcttaaagccagcagctggcccaattcatccagatacagcttgtcctttttatccaggacagcgtgtcaaggcatcatcatcatctgttttcaaaacatgcagatggcttaacggattttggagagcaagtcgtcttgaaggtactatcacaaaagtggaaagtgttgctgttttagtctattggattgcatctgcacactttgctacagatcagcaatctgttcctctagaggagcagaacccagaggaccttactcttttgtctcgtttctcatatacaaactggcaattaactgactggtgtctttctcagcgatacacttcatgtactaacgataccatgattgattctgataagcatacatggcagatatgtacatgctcagaaaactcagttccactgtctggtattccagaatctcaagctgatgctcagattgatacagatacaggtcacaggcagacagatgttgattctactgcagatgtattgagtatgtcggatggagataattcatgcatagccaaagaatcagaaacaggaactagtgcatcaagcatctcaaatgagggtccacaggacaatgcaacatctagaaaaaagtttaggaaagatgggacaaaggaatgtggagtagccgcaacagcattgatccctatccacagtccaaatgaacatgaattcttcccggagcagtatgttgtggataaagtcacaaatgatgttggtgttgatgattcttctgaaccaaggcgtgtgggtcttgttagaggtgttaatgctaaggaccgaacagcaactgtgtcatggtttaagcctcctctacatccagaggagccaaaggagatcgcatgtaacgaaattgtgagtgtatatgaactggatgtccatccagattatgattattgctatggagatattgttgtccgcttgccgcctgttaaaccggtaattgagtcaaccaatagcaaggaacaaatggaactggataagacgttagattcctcggaaggatttgctgcttcatattctgcaccccctgatactagtgcagacgaacagctttcacagaaggaatcctgcttgcagtttacaagcctctcttgggctggaaatatagttggctttcaagacggtgagattgaagtcatttggggtgatggatcgatttctaaggttggtcctcatgaaatatatgttgttggtcgtgaagatgatggtgcctcactagatgatggaacagcctctgatggttctagctgggagactgttgatgacaacgaaatggatgtacttcatgattctgcaaagggtgattcgcaaaatgtacctgagaatagcattggaagggaaaatggttcattcagctcccaggatggaagttctgttgcaactggtcccctttcagttgcttttgagtttgtgacccgactggcgagtgatctctttgctcgaggtagaaggcatttagatggatcatcagatgctatggatgaagttgagtctcactggtctaatgagatttcagaaattggtgatgacattgataagtgtaataagaatcatgtggaatcaccagagcatgctgcagtcatagaaaatgattcttctgtcgagaagtctgtagatgtggttatggctgataatcctgtacattctgaatgtttcaaacactttgatgttctgcaatgtcctctagaccaccactaccttgaaaacacaacccagggtacaggtggaaaaaagtgggtcaaaaaggtacaacaggaatggagcatacttgagaagaacctaccagactatatttatgtcagggtatttgaggatcgcatggatctcttgagagccgtgattgttggagcaagtggaacaccctaccaagatggccttttcttctttgatttccaccttccacttgagtatccgctagtccctccgtcagcatactatcattctggtggtttgcgtgtaaatccaaacctgtatgtggacgggaaggtttgcttgagtctcttaaatacctggactggcagagggaacgaagtttgggatccatcatcatcaagtattctccaagtactagtttcacttcagggattggttctcaatgaaaaaccctattttaatgaggctgggtatgagaagcaagttggtactgttgaaggggagaagaatgcagtgccgtataatgagaatacgtacctgctgagcgtgaaatccatgctgtatatattgagacggcctcctttgcattttgaggattttgtgaagagccacttccgcaagcgtggtcactacatccttaaagcttgccacgcctatttgcaaggaaatgttgttggcactctcaccgacgacgcgtgcaccaccgacagaagcaaagagcactcgagctctgttggcttcaagcttgtactagcaaagattttaccacggttgattacagccctgaaggacactggagctgactgcgaccaatacgagcacctcgggagaacagaaaccgttacagaaagctgatcattgagtgatttgtacttgattcttttgctttttctctgttttttggggtttcagaaagatggtgacttcaccaccaggctgttttcctataaatgtacattcaaagtttgttgtttcagtcaaacatttggaaaatttggcccaaatgatttagggggggggggggggggggtttgaagtcactagagataatagttagttagctaaaaattgttagtgttattagctagctaactattaccaaatttgctaaaagtatctaatatctaaactattagttagactgtttggatgtcttggctaattttagcagctaactaatagttttagtgcatttaaacacctcttattcgttacatggaactgaactacactgtacagctgatgtttggttaaacttgtaccagcgaagagttggcaatactggaaccaggcctagagattcctggaacagagatttgatgtccatgtatttacgggtggtattggtttcacgaatatacactcgc

SEQ ID NO: 29566 - DNA, 3074 bp, Zea Mays
gtttgatgatggctctgtctgtaaagtcaatagggcagatcctaagtgcttaaagccagcagctggcccaattcatccagatacagcttgtcctttttatccaggacagcgtgtcaaggcatcatcatcatctgttttcaaaacatgcagatggcttaacggattttggagagcaagtcgtcttgaaggtactatcacaaaagtggaaagtgttgctgttttagtctattggattgcatctgcacactttgctacagatcagcaatctgttcctctagaggagcagaacccagaggaccttactcttttgtctcgtttctcatatacaaactggcaattaactgactggtgtctttctcagcgatacacttcatgtactaacgataccatgattgattctgataagcatacatggcagatatgtacatgctcagaaaactcagttccactgtctggtattccagaatctcaagctgatgctcagattgatacagatacaggtcacaggcagacagatgttgattctactgcagatgtattgagtatgtcggatggagataattcatgcatagccaaagaatcagaaacaggaactagtgcatcaagcatctcaaatgagggtccacaggacaatgcaacatctagaaaaaagtttaggaaagatgggacaaaggaatgtggagtagccgcaacagcattgatccctatccacagtccaaatgaacatgaattcttcccggagcagtatgttgtggataaagtcacaaatgatgttggtgttgatgattcttctgaaccaaggcgtgtgggtcttgttagaggtgttaatgctaaggaccgaacagcaactgtgtcatggtttaagcctcctctacatccagaggagccaaaggagatcgcatgtaacgaaattgtgagtgtatatgaactggatgtccatccagattatgattattgctatggagatattgttgtccgcttgccgcctgttaaaccggtaattgagtcaaccaatagcaaggaacaaatggaactggataagacgttagattcctcggaaggatttgctgcttcatattctgcaccccctgatactagtgcagacgaacagctttcacagaaggaatcctgcttgcagtttacaagcctctcttgggctggaaatatagttggctttcaagacggtgagattgaagtcatttggggtgatggatcgatttctaaggttggtcctcatgaaatatatgttgttggtcgtgaagatgatggtgcctcactagatgatggaacagcctctgatggttctagctgggagactgttgatgacaacgaaatggatgtacttcatgattctgcaaagggtgattcgcaaaatgtacctgagaatagcattggaagggaaaatggttcattcagctcccaggatggaagttctgttgcaactggtcccctttcagttgcttttgagtttgtgacccgactggcgagtgatctctttgctcgaggtagaaggcatttagatggatcatcagatgctatggatgaagttgagtctcactggtctaatgagatttcagaaattggtgatgacattgataagtgtaataagaatcatgtggaatcaccagagcatgctgcagtcatagaaaatgattcttctgtcgagaagtctgtagatgtggttatggctgataatcctgtacattctgaatgtttcaaacactttgatgttctgcaatgtcctctagaccaccactaccttgaaaacacaacccaggtggaaaaaagtgggtcaaaaaggtacaacaggaatggagcatacttgagaagaacctaccagactatatttatgtcagggtatttgaggatcgcatggatctcttgagagccgtgattgttggagcaagtggaacaccctaccaagatggccttttcttctttgatttccaccttccacttgagtatccgctagtccctccgtcagcatactatcattctggtggtttgcgtgtaaatccaaacctgtatgtggacgggaaggtttgcttgagtctcttaaatacctggactggcagagggaacgaagtttgggatccatcatcatcaagtattctccaagtactagtttcacttcagggattggttctcaatgaaaaaccctattttaatgaggctgggtatgagaagcaagttggtactgttgaaggggagaagaatgcagtgccgtataatgagaatacgtacctgctgagcgtgaaatccatgctgtatatattgagacggcctcctttgcattttgaggattttgtgaagagccacttccgcaagcgtggtcactacatccttaaagcttgccacgcctatttgcaaggaaatgttgttggcactctcaccgacgacgcgtgcaccaccgacagaagcaaagagcactcgagctctgttggcttcaagcttgtactagcaaagattttaccacggttgattacagccctgaaggacactggagctgactgcgaccaatacgagcacctcgggagaacagaaaccgttacagaaagctgatcattgagtgatttgtacttgattcttttgctttttctctgttttttggggtttcagaaagatggtgacttcaccaccaggctgttttcctataaatgtacattcaaagtttgttgtttcagtcaaacatttggaaaatttggcccaaatgatttagggggggggggggggggggtttgaagtcactagagataatagttagttagctaaaaattgttagtgttattagctagctaactattaccaaatttgctaaaagtatctaatatctaaactattagttagactgtttggatgtcttggctaattttagcagctaactaatagttttagtgcatttaaacacctcttattcgttacatggaactgaactacactgtacagctgatgtttggttaaacttgtaccagcgaagagttggcaatactggaaccaggcctagagattcctggaacagagatttgatgtccatgtatttacgggtggtattggtttcacgaatatacactcgc

SEQ ID NO: 29567 - DNA, 849 bp, Zea Mays
attttatgaagaaataatggtcgaagcccttttctaagtcacataaaataatgataataagaatttgacacattttacttagcaagacaaatgtttgatgtattatttattgcattttttgctagaggaagcagtgaccgacgttccagaagccttagctccaaagaagggcaggagcccgacctctcggagatagaaccttcgtgttacgagagcttcgacgaaggtcttccaagaaaagaattgatctaccattgccaatgattgggtatgccaacccattaaaattatgtaaaagttttagcatacttttctaccaaaaagagccaattcttctatgaccagggagtctgccagacgtatagtagctattccaaatgatatttacccatggtaagtcatgactattgaagaacttgtggaagaatttgaggagaagcgcctcattctgaatttccaaccggatcaccccaagacctccactgactttctgcttagtaatcgtggatcatgcaactagcggcagcttttttgagttcgtgtcattccccctccaaatgcaatgcttcctgtaaatgtctatctgtttaatagtagaagttgggattttgagcgtgcacataaaaaaagttggtaaggctgaaaaaaccgagtttaccaactccaatcgcccagcctgagataagaaattagaggtacatgacagtctcatttcaattctttggattaggggtaagaaatgctgaagtcgtggttttgaaagacccagaggcaatccaagataagtgaaaggcattgatcctatctgacaattgaatgttcttgaaagaatctccattttcccaggat

SEQ ID NO: 29568 - DNA, 707 bp, Zea Mays
aaaaattctcggccgtccgattgttcaccaatggcggcaatctctcccctgcgtcgtgtgtggatggttctaggaagtgtcaccagctgatgcgtctccaatctcgcctcactcctcctcccagaatctcaccttcccccgcgtgcaccgactgcttttctcccgcgtgcgctggctgcttttggccaccgatacgctgcgtcggcgctccaaagttccaggtcaggagaggctagagttccaaatcgtagttcgtgtgaaccagtgtgaaccagttgaatctcatcaatcttatcaagtcatctaataaaaaaaggttcgacgcgtcttagagttctacgatgcatccaagaattcagagaacgttgacaaatatatagatcagctgaccaacaatgaattgtcatcaccacccaaaaagatgaagcacacccaggttaacaaagccattccagattctacatgttccaagaatgacaacagttagaccatcctgaaatacatcaaggttgggcggcttccgaagtcattcagacctgcgtccgagcctacatcatcatttggaccgctccatccggagccagaccacgatggatgagccaaaccatcagaccaaacacgctattagtacctgcttgtcgtgatcagagggaaagataaaataaacatattcatagaagaggctccatcacctttggtcatgagac

SEQ ID NO: 29569 - DNA, 1417 bp, Zea Mays
caccagctgatgcgtctccaatctcgcctcactcctcctcccagaatctcaccttcccccgcgtgcaccgactgcttttctcccgcgtgcgctggctgcttttggccaccgatacgctgcgtcggcgctccaaagttccaggtcaggagaggctagagttccaaatcgtagttcgtgtgaaccagtgtgaaccagttgaatctcatcaatcttatcaagtcatctaataaaaaaaggtttcattttttcccaaaaaatagtgcatctgatctttccattaatatatagtgttgtatttagacgttcatatagttccctactgcatttaactcatccataagctagatgcatctatgaatctatttataaattgctgctactatttttttccattgcataaatataaagatgctttcttcatatttacccatgtctgtcatcatgcggtaattgactaattccttatgtacaggtttcttcgtatttacccatacctctcatcacatgatcattttattactctgatgtatgtcctgtttattacaaaggaatagataaatattaggtcagtagtaactatttccttcagcaatttcatttacaacatcagccacaaatttctgaaattgtgtgcaagcatcccaagtgagaataactgttttaggatgcctaggctcttatgaaaattagtttgtctgaacatgcattcataaatgatgttcagtgaagtatctgcacaatacatatagagactttagcctgacgtgaaaaggctaaatcagttttgttagttgcatgtatgcttcaaagttctataagctataactaaagagatttggacagcaagctgtcgtactaaataaactcacatgttttctgtttgccggaactattctctccgagtaacaaccactctaccaaaatcatggaagacaaacctcggtaccatcttcaatgctcaactttgtagtcaccttaatatgtagccgccattgtatctttgaaatttacctttgtagtcacccttaatatgtcagaattctcagtgacaaacacggtacaaaacttcttacataataatgtcttcaagtttctgtgaaccatcttgaagatacgtaacataatgaaacatatttgacaggttcgacgcgtcttagagttctacgatgcatccaagaattcagagaacgttgacaaatatatagatcagctgaccaacaatgaattgtcatcaccacccaaaaagatgaagcacacccaggttaacaaagccattccagattctacatgttccaagaatgacaacagttagaccatcctgaaatacatcaaggttgggcggcttccgaagtcattcagacctgcgtccgagcctacatcatcatttggaccgctccatccggagccagaccacgat

SEQ ID NO: 29570 - DNA, 677 bp, Zea Mays
ccagctgatgcgtctccaatctcgcctcactcctcctcccagaatctcaccttcccccgcgtgcaccgactgcttttctcccgcgtgcgctggctgcttttggccaccgatacgctgcgtcggcgctccaaagttccaggaaatcaaaatgccatagtttcacgggatagacggatcagcttggtctggggatgtcgtcagcgtggatggacggtcaatttcttcgtccgtcgcccaaccggcagcaacacatacgcgatgatttgattggttccttgtgtcctaaatgaaggcaggtcaggagaggctagagttccaaatcgtagttcgtgtgaaccagtgtgaaccagttgaatctcatcaatcttatcaagtcatctaataaaaaaaggttcgacgcgtcttagagttctacgatgcatccaagaattcagagaacgttgacaaatatatagatcagctgaccaacaatgaattgtcatcaccacccaaaaagatgaagcacacccaggttaacaaagccattccagattctacatgttccaagaatgacaacagttagaccatcctgaaatacatcaaggttgggcggcttccgaagtcattcagacctgcgtccgagcctacatcatcatttggtttgaatcgcggaacgatgtcgttcgtcactgcgttgt

SEQ ID NO: 29571 - DNA, 868 bp, Zea Mays
ccagctgatgcgtctccaatctcgcctcactcctcctcccagaatctcaccttcccccgcgtgcaccgactgcttttctcccgcgtgcgctggctgcttttggccaccgatacgctgcgtcggcgctccaaagttccaggaaatcaaaatgccatagtttcacgggatagacggatcagcttggtctggggatgtcgtcagcgtggatggacggtcaatttcttcgtccgtcgcccaaccggcagcaacacatacgcgatgatttgattggttccttgtgtcctaaatgaaggtcaggagaggctagagttccaaatcgtagttcgtgtgaaccagtgtgaaccagttgaatctcatcaatcttatcaagtcatctaataaaaaaaggttcgacgcgtcttagagttctacgatgcatccaagaattcagagaacgttgacaaatatatagatcagctgaccaacaatgaattgtcatcaccacccaaaaagatgaagcacacccaggttaacaaagccattccagattctacatgttccaagaatgacaacagttagaccatcctgaaatacatcaaggttgggcggcttccgaagtcattcagacctgcgtccgagcctacatcatcatttggtttgaatcgcggaacgatgtcgttcgtcactgcgttgttctaataacaaactaacatgtgagatcagctcactccgcaataaagtgcaggaccgctccatccggagccagaccacgatggatgagccaaaccatcagaccaaacacgctattagtacctgcttgtcgtgatcagagggaaagataaaataaacatattcatagaagaggctccatcacctttggtcatgagac

SEQ ID NO: 29572 - DNA, 1366 bp, Zea Mays
ctccaatctcgcctcactcctcctcccagaatctcaccttcccccgcgtgcaccgactgcttttctcccgcgtgcgctggctgcttttggccaccgatacgctgcgtcggcgctccaaagttccaggaaatcaaaatgccatagtttcacgggatagacggatcagcttggtctggggatgtcgtcagcgtggatggacggtcaatttcttcgtccgtcgcccaaccggcagcaacacatacgcgatgatttgattggttccttgtgtcctaaatgaaggtcaggagaggctagagttccaaatcgtagttcgtgtgaaccagtgtgaaccagttgaatctcatcaatcttatcaagtcatctaataaaaaaaggtttcattttttcccaaaaaatagtgcatctgatctttccattaatatatagtgttgtatttagacgttcatatagttccctactgcatttaactcatccataagctagatgcatctatgaatctatttataaattgctgctactatttttttccattgcataaatataaagatgctttcttcatatttacccatgtctgtcatcatgcggtaattgactaattccttatgtacaggtttcttcgtatttacccatacctctcatcacatgatcattttattactctgatgtatgtcctgtttattacaaaggaatagataaatattaggtcagtagtaactatttccttcagcaatttcatttacaacatcagccacaaatttctgaaattgtgtgcaagcatcccaagtgagaataactgttttaggatgcctaggctcttatgaaaattagtttgtctgaacatgcattcataaatgatgttcagtgaagtatctgcacaatacatatagagactttagcctgacgtgaaaaggctaaatcagttttgttagttgcatgtatgcttcaaagttctataagctataactaaagagatttggacagcaagctgtcgtactaaataaactcacatgttttctgtttgccggaactattctctccgagtaacaaccactctaccaaaatcatggaagacaaacctcggttcgacgcgtcttagagttctacgatgcatccaagaattcagagaacgttgacaaatatatagatcagctgaccaacaatgaattgtcatcaccacccaaaaagatgaagcacacccaggttaacaaagccattccagattctacatgttccaagaatgacaacagttagaccatcctgaaatacatcaaggttgggcggcttccgaagtcattcagacctgcgtccgagcctacatcatcatttggtttgaatcgcggaacgatgtcgttcgtcactgcgttgt

SEQ ID NO: 29573 - DNA, 439 bp, Zea Mays
cgcctcactcctcctcccagaatctcaccttcccccgcgtgcaccgactgcttttctcccgcgtgcgctggctgcttttggccaccgatacgctgcgtcggcgctccaaagttccaggtcaggagaggctagagttccaaatcgtagttcgtgtgaaccagtgtgaaccagttgaatctcatcaatcttatcaagtcatctaataaaaaaaggttcgacgcgtcttagagttctacgatgcatccaagaattcagaggatgaagcacacccaggttaacaaagccattccagattctacatgttccaagaatgacaacagttagaccatcctgaaatacatcaaggttgggcggcttccgaagtcattcagacctgcgtccgagcctacatcatcatttggtttgaatcgcggaacgatgtcgttcgtcactgcgttgt

SEQ ID NO: 29574 - DNA, 1164 bp, Zea Mays
ctcactcctcctcccagaatctcaccttcccccgcgtgcaccgactgcttttctcccgcgtgcgctggctgcttttggccaccgatacgctgcgtcggcgctccaaagttccaggtcaggagaggctagagttccaaatcgtagttcgtgtgaaccagtgtgaaccagttgaatctcatcaatcttatcaagtcatctaataaaaaaaggtttcttcgtatttacccatacctctcatcacatgatcattttattactctgatgtatgtcctgtttattacaaaggaatagataaatattaggtcagtagtaactatttccttcagcaatttcatttacaacatcagccacaaatttctgaaattgtgtgcaagcatcccaagtgagaataactgttttaggatgcctaggctcttatgaaaattagtttgtctgaacatgcattcataaatgatgttcagtgaagtatctgcacaatacatatagagactttagcctgacgtgaaaaggctaaatcagttttgttagttgcatgtatgcttcaaagttctataagctataactaaagagatttggacagcaagctgtcgtactaaataaactcacatgttttctgtttgccggaactattctctccgagtaacaaccactctaccaaaatcatggaagacaaacctcggtaccatcttcaatgctcaactttgtagtcaccttaatatgtagccgccattgtatctttgaaatttacctttgtagtcacccttaatatgtcagaattctcagtgacaaacacggtacaaaacttcttacataataatgtcttcaagtttctgtgaaccatcttgaagatacgtaacataatgaaacatatttgacaggttcgacgcgtcttagagttctacgatgcatccaagaattcagagaacgttgacaaatatatagatcagctgaccaacaatgaattgtcatcaccacccaaaaagatgaagcacacccaggttaacaaagccattccagattctacatgttccaagaatgacaacagttagaccatcctgaaatacatcaaggttgggcggcttccgaagtcattcagacctgcgtccgagcctacatcatcatttggtttgaatcgcggaacgatgtcgttcgtcactgcgttgt

SEQ ID NO: 29575 - DNA, 824 bp, Zea Mays
ctcactcctcctcccagaatctcaccttcccccgcgtgcaccgactgcttttctcccgcgtgcgctggctgcttttggccaccgatacgctgcgtcggcgctccaaagttccaggtcaggagaggctagagttccaaatcgtagttcgtgtgaaccagtgtgaaccagttgaatctcatcaatcttatcaagtcatctaataaaaaaaggtttcattttttcccaaaaaatagtgcatctgatctttccattaatatatagtgttgtatttagacgttcatatagttccctactgcatttaactcatccataagctagatgcatctatgaatctatttataaattgctgctactatttttttccattgcataaatataaagatgctttcttcatatttacccatgtctgtcatcatgcggtaattgactaattccttatgtacaggtttcttcgtatttacccatacctctcatcacatgatcattttattactctgatgtatgtcctgtttattacaaaggaatagataaatattaggttcgacgcgtcttagagttctacgatgcatccaagaattcagagaacgttgacaaatatatagatcagctgaccaacaatgaattgtcatcaccacccaaaaagatgaagcacacccaggttaacaaagccattccagattctacatgttccaagaatgacaacagttagaccatcctgaaatacatcaaggttgggcggcttccgaagtcattcagacctgcgtccgagcctacatcatcatttggtttgaatcgcggaacgatgtcgttcgtcactgcgttgt

SEQ ID NO: 29576 - DNA, 576 bp, Zea Mays
cccagaatctcaccttcccccgcgtgcaccgactgcttttctcccgcgtgcgctggctgcttttggccaccgatacgctgcgtcggcgctccaaagttccaggtcaggagaggctagagttccaaatcgtagttcgtgtgaaccagtgtgaaccagttgaatctcatcaatcttatcaagtcatctaataaaaaaaggtttcttcgtatttacccatacctctcatcacatgatcattttattactctgatgtatgtcctgtttattacaaaggaatagataaatattaggttcgacgcgtcttagagttctacgatgcatccaagaattcagagaacgttgacaaatatatagatcagctgaccaacaatgaattgtcatcaccacccaaaaagatgaagcacacccaggttaacaaagccattccagattctacatgttccaagaatgacaacagttagaccatcctgaaatacatcaaggttgggcggcttccgaagtcattcagacctgcgtccgagcctacatcatcatttggtttgaatcgcggaacgatgtcgttcgtcactgcgttgt

SEQ ID NO: 29577 - DNA, 738 bp, Zea Mays
cccagaatctcaccttcccccgcgtgcaccgactgcttttctcccgcgtgcgctggctgcttttggccaccgatacgctgcgtcggcgctccaaagttccaggaaatcaaaatgccatagtttcacgggatagacggatcagcttggtctggggatgtcgtcaggttcctgtgcttttttcccaatatctttgcttccgccagatcctagatccagtgtctttcgtcggctggctttgtttgcgccgctgaagaacaacaatagtcagccaatatctagtccaaagtccaagcgccgccttaagtttagttggttcaccatgcagcgtggatggacggtcaatttcttcgtccgtcgcccaaccggcagcaacacatacgcgatgatttgattggttccttgtgtcctaaatgaaggtcaggagaggctagagttccaaatcgtagttcgtgtgaaccagtgtgaaccagttgaatctcatcaatcttatcaagtcatctaataaaaaaaggttcgacgcgtcttagagttctacgatgcatccaagaattcagaggatgaagcacacccaggttaacaaagccattccagattctacatgttccaagaatgacaacagttagaccatcctgaaatacatcaaggttgggcggcttccgaagtcattcagacctgcgtccgagcctacatcatcatttggtttgaatcgcggaacgatgtcgttcgtcactgcgttgt

SEQ ID NO: 29578 - DNA, 1458 bp, Zea Mays
ctcaccttcccccgcgtgcaccgactgcttttctcccgcgtgcgctggctgcttttggccaccgatacgctgcgtcggcgctccaaagttccaggaaatcaaaatgccatagtttcacgggatagacggatcagcttggtctggggatgtcgtcaggttcctgtgcttttttcccaatatctttgcttccgccagatcctagatccagtgtctttcgtcggctggctttgtttgcgccgctgaagaacaacaatagtcagccaatatctagtccaaagtccaagcgccgccttaagtttagttggttcaccatgcagcgtggatggacggtcaatttcttcgtccgtcgcccaaccggcagcaacacatacgcgatgatttgattggttccttgtgtcctaaatgaaggtcaggagaggctagagttccaaatcgtagttcgtgtgaaccagtgtgaaccagttgaatctcatcaatcttatcaagtcatctaataaaaaaaggtttcttcgtatttacccatacctctcatcacatgatcattttattactctgatgtatgtcctgtttattacaaaggaatagataaatattaggtcagtagtaactatttccttcagcaatttcatttacaacatcagccacaaatttctgaaattgtgtgcaagcatcccaagtgagaataactgttttaggatgcctaggctcttatgaaaattagtttgtctgaacatgcattcataaatgatgttcagtgaagtatctgcacaatacatatagagactttagcctgacgtgaaaaggctaaatcagttttgttagttgcatgtatgcttcaaagttctataagctataactaaagagatttggacagcaagctgtcgtactaaataaactcacatgttttctgtttgccggaactattctctccgagtaacaaccactctaccaaaatcatggaagacaaacctcggtaccatcttcaatgctcaactttgtagtcaccttaatatgtagccgccattgtatctttgaaatttacctttgtagtcacccttaatatgtcagaattctcagtgacaaacacggtacaaaacttcttacataataatgtcttcaagtttctgtgaaccatcttgaagatacgtaacataatgaaacatatttgacaggttcgacgcgtcttagagttctacgatgcatccaagaattcagagaacgttgacaaatatatagatcagctgaccaacaatgaattgtcatcaccacccaaaaagatgaagcacacccaggttaacaaagccattccagattctacatgttccaagaatgacaacagttagaccatcctgaaatacatcaaggttgggcggcttccgaagtcattcagacctgcgtccgagcctacatcatcatttggtttgaatcgcggaacgatgtcgttcgtcactgcgttgt

SEQ ID NO: 29579 - DNA, 1360 bp, Zea Mays
gcgtgcgctggctgcttttggccaccgatacgctgcgtcggcgctccaaagttccaggcaagcacacttcctcccctgctctccacctcattctggttcccattgctagggtttgtcgtgctagggtttaggtcgctccttctccaccacctggccgcccaccctccacctctcgtgcttcccggacgccgcggccgccgagacgagggccaggagcaggagccaccgagcagtcgtcgccaccgccataaaccaaactaactaaggcagctagaatctctgctttgagttcttccccgtcaccgcacgggctgcgatctctgctttttttggttccccaatcccattccgtgtcctcatgctgccattttggggttcaagataatgcttgctggaaaacaaggtcactgtggtataacttcagaggttattgccagaagttacggattgcaggtttggttagatccatggatcgtgaaaattttgtcattgtactgtgctttttcatgataggctgttgaactagaactggtttgctgtgtctttgtaacttagttaccagagtattattgttcagtcaggtcaagtgatgggataaagtggtgtagtctactgtactgtacttttaaatgacagctgctggaacaaatgatgttgtgcaggaaatcaaaatgccatagtttcacgggatagacggatcagcttggtctggggatgtcgtcaggttcctgtgcttttttcccaatatctttgcttccgccagatcctagatccagtgtctttcgtcggctggctttgtttgcgccgctgaagaacaacaatagtcagccaatatctagtccaaagtccaagcgccgccttaagtttagttggttcaccatgcagcgtggatggacggtcaatttcttcgtccgtcgcccaaccggcagcaacacatacgcgatgatttgattggttccttgtgtcctaaatgaaggcaggttgtctgaagatctggaatctccagtttcatccaagttattatgtttttcattttattcaattatctcccctgcttctttatcactcctattttctagatgacatatacataaaaacaggatggtctttgttggcttcctgctactgcatataacatactaatttcgctaaagaatatatgtatgtaccttaactgtggcagctactgatttggatttttcttcaaaacaggtcaggagaggctagagttccaaatcgtagttcgtgtgaaccagtgtgaaccagttgaatctcatcaatcttatcaagtcatctaataaaaaaaggttcgacgcgtcttagagttctacgatgcatccaagaattcagaggatgaagc

SEQ ID NO: 29580 - DNA, 915 bp, Zea Mays
gcgtgcgctggctgcttttggccaccgatacgctgcgtcggcgctccaaagttccaggcaagcacacttcctcccctgctctccacctcattctggttcccattgctagggtttgtcgtgctagggtttaggtcgctccttctccaccacctggccgcccaccctccacctctcgtgcttcccggacgccgcggccgccgagacgagggccaggagcaggagccaccgagcagtcgtcgccaccgccataaaccaaactaactaaggcagctagaatctctgctttgagttcttccccgtcaccgcacgggctgcgatctctgctttttttggttccccaatcccattccgtgtcctcatgctgccattttggggttcaaggaaatcaaaatgccatagtttcacgggatagacggatcagcttggtctggggatgtcgtcagcgtggatggacggtcaatttcttcgtccgtcgcccaaccggcagcaacacatacgcgatgatttgattggttccttgtgtcctaaatgaaggtcaggagaggctagagttccaaatcgtagttcgtgtgaaccagtgtgaaccagttgaatctcatcaatcttatcaagtcatctaataaaaaaaggttcgacgcgtcttagagttctacgatgcatccaagaattcagagaacgttgacaaatatatagatcagctgaccaacaatgaattgtcatcaccacccaaaaagatgaagcacacccaggttaacaaagccattccagattctacatgttccaagaatgacaacagttagaccatcctgaaatacatcaaggttgggcggcttccgaagtcattcagacctgcgtccgagcctacatcatcatttggtttgaatcgcggaacgatgtcgttcgtcactgcgttgt

SEQ ID NO: 29581 - DNA, 1667 bp, Zea Mays
gcgtgcgctggctgcttttggccaccgatacgctgcgtcggcgctccaaagttccaggcaagcacacttcctcccctgctctccacctcattctggttcccattgctagggtttgtcgtgctagggtttaggtcgctccttctccaccacctggccgcccaccctccacctctcgtgcttcccggacgccgcggccgccgagacgagggccaggagcaggagccaccgagcagtcgtcgccaccgccataaaccaaactaactaaggcagctagaatctctgctttgagttcttccccgtcaccgcacgggctgcgatctctgctttttttggttccccaatcccattccgtgtcctcatgctgccattttggggttcaaggtcaggagaggctagagttccaaatcgtagttcgtgtgaaccagtgtgaaccagttgaatctcatcaatcttatcaagtcatctaataaaaaaaggtttcattttttcccaaaaaatagtgcatctgatctttccattaatatatagtgttgtatttagacgttcatatagttccctactgcatttaactcatccataagctagatgcatctatgaatctatttataaattgctgctactatttttttccattgcataaatataaagatgctttcttcatatttacccatgtctgtcatcatgcggtaattgactaattccttatgtacaggtttcttcgtatttacccatacctctcatcacatgatcattttattactctgatgtatgtcctgtttattacaaaggaatagataaatattaggtcagtagtaactatttccttcagcaatttcatttacaacatcagccacaaatttctgaaattgtgtgcaagcatcccaagtgagaataactgttttaggatgcctaggctcttatgaaaattagtttgtctgaacatgcattcataaatgatgttcagtgaagtatctgcacaatacatatagagactttagcctgacgtgaaaaggctaaatcagttttgttagttgcatgtatgcttcaaagttctataagctataactaaagagatttggacagcaagctgtcgtactaaataaactcacatgttttctgtttgccggaactattctctccgagtaacaaccactctaccaaaatcatggaagacaaacctcggtaccatcttcaatgctcaactttgtagtcaccttaatatgtagccgccattgtatctttgaaatttacctttgtagtcacccttaatatgtcagaattctcagtgacaaacacggtacaaaacttcttacataataatgtcttcaagtttctgtgaaccatcttgaagatacgtaacataatgaaacatatttgacaggttcgacgcgtcttagagttctacgatgcatccaagaattcagagaacgttgacaaatatatagatcagctgaccaacaatgaattgtcatcaccacccaaaaagatgaagcacacccaggttaacaaagccattccagattctacatgttccaagaatgacaacagttagaccatcctgaaatacatcaaggttgggcggcttccgaagtcattcagacctgcgtccgagcctacatcatcatttggtttgaatcgcggaacgatgtcgttcgtcactgcgttgt

SEQ ID NO: 29582 - DNA, 1669 bp, Zea Mays
atgcttgctggaaaacaaggtcactgtggtataacttcagaggttattgccagaagttacggattgcaggaaatcaaaatgccatagtttcacgggatagacggatcagcttggtctggggatgtcgtcaggttcctgtgcttttttcccaatatctttgcttccgccagatcctagatccagtgtctttcgtcggctggctttgtttgcgccgctgaagaacaacaatagtcagccaatatctagtccaaagtccaagcgccgccttaagtttagttggttcaccatgcagcgtggatggacggtcaatttcttcgtccgtcgcccaaccggcagcaacacatacgcgatgatttgattggttccttgtgtcctaaatgaaggtcaggagaggctagagttccaaatcgtagttcgtgtgaaccagtgtgaaccagttgaatctcatcaatcttatcaagtcatctaataaaaaaaggtttcattttttcccaaaaaatagtgcatctgatctttccattaatatatagtgttgtatttagacgttcatatagttccctactgcatttaactcatccataagctagatgcatctatgaatctatttataaattgctgctactatttttttccattgcataaatataaagatgctttcttcatatttacccatgtctgtcatcatgcggtaattgactaattccttatgtacaggtttcttcgtatttacccatacctctcatcacatgatcattttattactctgatgtatgtcctgtttattacaaaggaatagataaatattaggtcagtagtaactatttccttcagcaatttcatttacaacatcagccacaaatttctgaaattgtgtgcaagcatcccaagtgagaataactgttttaggatgcctaggctcttatgaaaattagtttgtctgaacatgcattcataaatgatgttcagtgaagtatctgcacaatacatatagagactttagcctgacgtgaaaaggctaaatcagttttgttagttgcatgtatgcttcaaagttctataagctataactaaagagatttggacagcaagctgtcgtactaaataaactcacatgttttctgtttgccggaactattctctccgagtaacaaccactctaccaaaatcatggaagacaaacctcggtaccatcttcaatgctcaactttgtagtcaccttaatatgtagccgccattgtatctttgaaatttacctttgtagtcacccttaatatgtcagaattctcagtgacaaacacggtacaaaacttcttacataataatgtcttcaagtttctgtgaaccatcttgaagatacgtaacataatgaaacatatttgacaggttcgacgcgtcttagagttctacgatgcatccaagaattcagagaacgttgacaaatatatagatcagctgaccaacaatgaattgtcatcaccacccaaaaagatgaagcacacccaggttaacaaagccattccagattctacatgttccaagaatgacaacagttagaccatcctgaaatacatcaaggttgggcggcttccgaagtcattcagacctgcgtccgagcctacatcatcatttggtttgaatcgcggaacgatgtcgttcgtcactgcgttgt

SEQ ID NO: 29583 - DNA, 655 bp, Zea Mays
caataattatgtgtttataagtttccatataaaagtatatatattatacatatagacatatatacacactcatggatatagaaggggcttcaatagtaactttcgctccggcctcaaaaatgccagaatcaaccatgtatttcccatggtagacgaaccatttaaggttagtttgagagccacaaaaccggaggggttaaaggggctaaaatctccttattcaattttgaataagaaatggattttaactcctccaaccccctctgatattttagctctcaactagcctttacaaacgagggaacaatttacatatgatggaaatgatgccatctggcacgcacacatgggctcatctgggttggcccgacggacatcagtttgtagggcacctattttggcatgcatgagctggaaccgccaatttttaggagtccactgaacacattcatagttataaaggtccgcgtaccagaagagatcatcttagcacccagacgttgcaaggaaccggtcatagggacacagcactggcagcttacaggaattgaggtgccattgttcatcagctgtgcagagaaacgtatatgcttgaggatcctgctgagatgacttctcgatggatgattcaccatcctgaaagttaagaaccttg

SEQ ID NO: 29584 - DNA, 2134 bp, Zea Mays
cgcaggcactagtggcgtggcgcgccgcgacagtgtcactagtagcggtggaccggtggtctctcccctccccggctccccctcgtccgtctccctcccacccttccgcgctcccgccgtttcccaggggccagggccgacccacaccgcgccgggatccctagatgcggccggggcggcgccgcgagccgtgagcgcggttcctgccgtggcgatgggtttccgcgccgcctccgccgccgccgctgccgcggtggccgtgtttgcggcggcggggctggcggtcaccgccgcttcctccggtgactcgctcgccgacctcggaggcgcggcgagggagatcgaaagcgcaccagaggtcaagaatctgggaccatgggcaaaggggctgctgaaaggcatgccgcaggcagcggcgggaccggcagccatggcgcctgttgcgaagtatccgctggttctggcagaggaccggacgcggcggccggatgttctcaggcatctcaaagtgtatgaaggagggtggaacgtcaccaataagcactactgggcgagtaaattccatgaagaagctacgcggaccgtcgattttgttgtgaaccaatctgatttcactattcagacactaaggaatgttacagaatacttgtcatttgcacagacgatcactgtggcagcactctatcttccatcagaagttcaaggtcaaattgacagtttgaaaggggatttgaacaaagcagctgacacaatatctgtgaagacagcagaaaattacaaaatgataagaaaagttctccatatcatgtcagttgtattgatttgcatagccgtggtgctgcttgttcttgtgttccttggatacggcctagagaagtatggaccgagatatacagtttacatatttgttaccttatgctggaaagctgtggcggctctctttatccttctagggattttcctgatactaaacagcgctgcgcaggatacctgcgaagcaatggaccagtgggcccagcaccctcaggcagagacagctctgagcagcatccttccgtgtgtggatgagagcacgaccaaccgaacgctgtaccagagcaaagaggtggtggtgaggcttgtggggatagtgaacagagctatctccgctctttcaaatcgaaggccgcatcacaagcacccaggacagttcatgccttacctgtgctcgccctacgactcaaacctcaacgaccgaccgtgcaagtatagggaggccacgtttgaaaacgcgacgacagcatggttgaactacacgtgcatggctcaagacacggacttgtgctcaggcaacaagaccttaacctacgacatctacggccaactcgtgctggctgcaaacgtgagctacgcgctgtaccactacgcccccttcctgctgaacctccaggactgcaagttcgtccgggccaccttcagcgccatcgcctcgcggtactgccctcctctggggcacgacctcgtgctggtctccgcgggtctggcgctcattgcctcggcctttgttctctgcctcgtctggatgctcttcgcggaccgcccccgaagggaggaggtgtccgatctggcgtcggggtcgaggatcgcgccggtagacagctctccgtcgtagaagcaagcaagcaagcaagcggcgcaacgggatgtctatgactatgagtgaggctgcttggtcgcatggtgaccagagtttagtacagttcccttccatggctatgtaaaatagtttcggtatagcgagttccgggagacgtcgttgaagtgcggagaggagggggagaaaccggaagcacttcgggtgggggacaaaaggccccattttgcagtggagagagttaggtggaaacgagtgctctgcttccttctatcgtatgtcagatcgatgcacccatggtgtatgttgctgcaaggacaaacggaataatcgatcagggttcccatgaccaatcacgcggcgaaagacagccgtgttcgatagttctgcatcctcaactaacttgaggacgacgtgctcgttgtcgttggcgtgtggaatgctgtcgactgtcgttatttccctgtttggagagaagtgaacagcgagacacaagtcggg

SEQ ID NO: 29585 - DNA, 2025 bp, Zea Mays
ggcgatcccggccgtcagccagctcattcgatggataggcgtgaggtcaagaatctgggaccatgggcaaaggggctgctgaaaggcatgccgcaggcagcggcgggaccggcagccatggcgcctgttgcgaagtatccgctggttctggcagaggaccggacgcggcggccggatgttctcaggcatctcaaagtgtatgaaggagggtggaacgtcaccaataagcactactgggcgtctgtttcattcacaggtgtttctggatttcttctcggtgctttgtggttcatatttttcgggatagctgtggctggacgatgctattttggaacaagaatgtccaaaagaaaggtttcttatgcagatgtagtaggtcctgtgttgcttggggtcttcacacttgctataatagctgggtgcattctccttctgtatgggcagagtaaattccatgaagaagctacgcggaccgtcgattttgttgtgaaccaatctgatttcactattcagacactaaggaatgttacagaatacttgtcatttgcacagacgatcactgtggcagcactctatcttccatcagaagttcaaggtcaaattgacagtttgaaaggggatttgaacaaagcagctgacacaatatctgtgaagacagcagaaaattacaaaatgataagaaaagttctccatatcatgtcagttgtattgatttgcatagccgtggtgctgcttgttcttgtgttccttggatacggcctagagaagtatggaccgagatatacagtttacatatttgttaccttatgctggaaagctgtggcggctctctttatccttctagggattttcctgatactaaacagcgctgcgcaggatacctgcgaagcaatggaccagtgggcccagcaccctcaggcagagacagctctgagcagcatccttccgtgtgtggatgagagcacgaccaaccgaacgctgtaccagagcaaagaggtggtggtgaggcttgtggggatagtgaacagagctatctccgctctttcaaatcgaaggccgcatcacaagcacccaggacagttcatgccttacctgtgctcgccctacgactcaaacctcaacgaccgaccgtgcaagtatagggaggccacgtttgaaaacgcgacgacagcatggttgaactacacgtgcatggctcaagacacggacttgtgctcaggcaacaagaccttaacctacgacatctacggccaactcgtgctggctgcaaacgtgagctacgcgctgtaccactacgcccccttcctgctgaacctccaggactgcaagttcgtccgggccaccttcagcgccatcgcctcgcggtactgccctcctctggggcacgacctcgtgctggtctccgcgggtctggcgctcattgcctcggcctttgttctctgcctcgtctggatgctcttcgcggaccgcccccgaagggaggaggtgtccgatctggcgtcggggtcgaggatcgcgccggtagacagctctccgtcgtagaagcaagcaagcaagcaagcggcgcaacgggatgtctatgactatgagtgaggctgcttggtcgcatggtgaccagagtttagtacagttcccttccatggctatgtaaaatagtttcggtatagcgagttccgggagacgtcgttgaagtgcggagaggagggggagaaaccggaagcacttcgggtgggggacaaaaggccccattttgcagtggagagagttaggtggaaacgagtgctctgcttccttctatcgtatgtcagatcgatgcacccatggtgtatgttgctgcaaggacaaacggaataatcgatcagggttcccatgaccaatcacgcggcgaaagacagccgtgttcgatagttctgcatcctcaactaacttgaggacgacgtgctcgttgtcgttggcgtgtggaatgctgtcgactgtcgttatttccctgtttggagagaagtgaacagcgagacacaagtcggg

SEQ ID NO: 29586 - DNA, 1964 bp, Zea Mays
cgatcccggccgtcagccagctcattcgatggataggcgtgaggtcaagaatctgggaccatgggcaaaggggctgctgaaaggcatgccgcaggcagcggcgggaccggcagccatggcgcctgttgcgaagtatccgctggttctggcagaggaccggacgcggcggccggatgttctcaggcatctcaaagtgtatgaaggagggtggaacgtcaccaataagcactactgggcgtctgtttcattcacaggtgtttctggatttcttctcggtgctttgtggttcatatttttcgggatagctgtggctggacgatgctattttggaacaagaatgtccaaaagaaaggtttcttatgcagatgtagtaggtcctgtgttgcttggggtcttcacacttgctataatagctgggtgcattctccttctgtatgggcagagtaaattccatgaagaagctacgcggaccgtcgattttgttgtgaaccaatctgatttcactattcagacactaaggaatgttacagaatacttgtcatttgcacagacgatcactgtggcagcactctatcttccatcagaagttcaaggtcaaattgacagtttgaaaggggatttgaacaaagcagctgacacaatatctgtgaagacagcagaaaattacaaaatgataagaaaagttctccatatcatgcctagagaagtatggaccgagatatacagtttacatatttgttaccttatgctggaaagctgtggcggctctctttatccttctagggattttcctgatactaaacagcgctgcgcaggatacctgcgaagcaatggaccagtgggcccagcaccctcaggcagagacagctctgagcagcatccttccgtgtgtggatgagagcacgaccaaccgaacgctgtaccagagcaaagaggtggtggtgaggcttgtggggatagtgaacagagctatctccgctctttcaaatcgaaggccgcatcacaagcacccaggacagttcatgccttacctgtgctcgccctacgactcaaacctcaacgaccgaccgtgcaagtatagggaggccacgtttgaaaacgcgacgacagcatggttgaactacacgtgcatggctcaagacacggacttgtgctcaggcaacaagaccttaacctacgacatctacggccaactcgtgctggctgcaaacgtgagctacgcgctgtaccactacgcccccttcctgctgaacctccaggactgcaagttcgtccgggccaccttcagcgccatcgcctcgcggtactgccctcctctggggcacgacctcgtgctggtctccgcgggtctggcgctcattgcctcggcctttgttctctgcctcgtctggatgctcttcgcggaccgcccccgaagggaggaggtgtccgatctggcgtcggggtcgaggatcgcgccggtagacagctctccgtcgtagaagcaagcaagcaagcaagcggcgcaacgggatgtctatgactatgagtgaggctgcttggtcgcatggtgaccagagtttagtacagttcccttccatggctatgtaaaatagtttcggtatagcgagttccgggagacgtcgttgaagtgcggagaggagggggagaaaccggaagcacttcgggtgggggacaaaaggccccattttgcagtggagagagttaggtggaaacgagtgctctgcttccttctatcgtatgtcagatcgatgcacccatggtgtatgttgctgcaaggacaaacggaataatcgatcagggttcccatgaccaatcacgcggcgaaagacagccgtgttcgatagttctgcatcctcaactaacttgaggacgacgtgctcgttgtcgttggcgtgtggaatgctgtcgactgtcgttatttccctgtttggagagaagtgaacagcgagacacaagtcggg

SEQ ID NO: 29587 - DNA, 2455 bp, Zea Mays
gacgaaacggacggacgccacgccctgcccgccggggctgcttgccactcctctctcttcctcatccatcctcgccccggccccgcccccagaaccaaaccagcctccctccccagcagctcacgagagagcgcaagcaagtattactgcgcaccgcctcgcccgcgggcgtcagcgtgaagctgccgcacagctaccccgcgaggcatggggatggacgccggcggcgggaagctgccgtacagctaccccgcccaccaggacggcaagctggtgaagagcttcagccgcgtggagccccgcaagttcggcctcgccctcgtcgcgggcttcctgctcgtcacctgcgcctacttctccaccgccaagttcgacgccatccacgtcgccatgacagtcagccccgtctccggcaatgcggctgggatcggcccgctagtgggcgccgccaacgccgacacctccgactccaagcagcgattagatttgggcaagcaagacccggacgacgcgctgtccaggtccgaggaggaggaggggagcagggccgacgaggtgctggagaaggacgacggcaaggcatcctcgtcgtcggggacagattccggcagcaatgcgccgctggaggacacgaggagagacgagacctttgtgggggacagcggtggtgcatcttccgcggcgggcgccaggagtgaggcggttcctgccaggcacgagcacgacgatgacgcccccgctgccgccctgcttcctcccgtgacgtcagagggagccgcgaacagcacgcaaggatcaggagttcttgaggacgaggagctgcaggtgcaggacgctgtcgccaatccttccaagaggagcaacgattcagccgccacgcgcagcagcagcagtggccgctcgccctctgtggttcactctgatcctgccatcctccctgctccctcgcagcagattgctcctgctgctcctcaagaggcagataaggctcttgctgttcagcatattccagcgatacctgaggttaagcaatcagattcggagacgccggcgcgggagtggaagccgctgtgcgacatcacctcgaaccgccgcatcgactggtgcgagctcgacggcgacgtccgcgtgctgggcgccaacgcgagcgtcacgctggtggcgccgcccggcggggcggacggccgcaccttccgcgcggagtcgtggcgcatcaagccgtacccgcgcaaggcggacccgaacgcgatgcgcgtcgtccgcgtgctgacggtgcggtcggtgcccggcgaggcgcccgcgtgcacggaccggcacggcgtcccggcgctggtgttctcggaccgcgggtacacggggaactacttccacgcgttcacggacgtgatcctgccgctgttcctgacggcgcggcagtacgccggcgaggtgcggctgctgatcgcgcgcgcgcggacgcggcggttcgtgaacgcggaggagatcgtgcgcggcgcggagaagctcgggttcgaggtggtggtgtcggaggggacgcacgaggtggcgcccttcgcggagctggccaacagctgcgacgccatcatgggcgtgcacggcgccgggctgaccaacatggtgttcgtgccgacgggcggggtggtcatccaggtggtgccgctgggcgggctggagttcgtggcgggctacttccggggtccgtccagggacatggggctgcgctacctcgagtaccggatcacgccggaggagagcaccctgatcaaccagtacccgcgcgaccaccccatcttcacggaccccaacgggatcaagagcaagggctgggagtccctcaaggatgcctacctcgacaagcaggacgtgtcgttggacatgaagaggttccggcccacgctcaagaaggccatcgcgcacatcaggaaggccagggccaaggccaacgccggcggcggcggcaacaactaggcatcgccgtacatgtgctcattcatcctcctcttactctacttttgtttttcctcccctccttttcggattatggcagtacttgtatgtagcaagcagaaatcgatcaaatgtataatatggcagggaaagaagttagagcaaatcatatattctcttttccccccacttttcggtgagggtcaatggtggatggagagtatgatcaggactgagattctcctataaacattttagatttagtttctctcgaggaaaaaaaaaattcagatagcgaatagtacctacttagtacataatagtaattttttatacaaatttaataaaatatagtttaacaaattgctatcctaaaattacatccttgggacgaggaagtactttatttgcttcgtgattctctctaatcattgcactgtcacgccaatgatgcgtccacaacgtcctatatcacttctcgctacagaaacaatcgtgtaggagtaag

SEQ ID NO: 29588 - DNA, 2729 bp, Zea Mays
cgaaacggacggacgccacgccctgcccgccggggctgcttgccactcctctctcttcctcatccatcctcgccccggccccgcccccagaaccaaaccagcctccctccccagcagctcacgagagagcgcaagcaagtattactgcgcaccgcctcgcccgcgggcgtcagcgtgaagctgccgcacagctaccccgcgaggcatggggatggacgccggcggcgggaagctgccgtacagctaccccgcccaccaggacggcaagctggtgaagagcttcagccgcgtggagccccgcaagttcggcctcgccctcgtcgcgggcttcctgctcgtcacctgcgcctacttctccaccgccaagttcgacgccatccacgtcgccatgacagtcagccccgtctccggcaatgcggctgggatcggcccgctagtgggcgccgccaacgccgacacctccgactccaagcagcgattagatttgggcaagcaagacccggacgacgcgctgtccaggtccgaggaggaggaggggagcagggccgacgaggtgctggagaaggacgacggcaaggcatcctcgtcgtcggggacaggtacaccgcgcttccgtcaccggcaaggcatcgcctgttgttttttcgagattgagtggccgtccgtgcttgcccttcccttccatggaggcgtcaagctggccgccgcggccggactcgtgtgcccccgcccgccgtactcccaacgtcctgcaccgctgcacgcaaagccagccccaaaaatcagataaaaggaccggccggttttttcctccgcttccctttcccccactctataatcaatcgctttttttttcttttccctgtcatcaccagattccggcagcaatgcgccgctggaggacacgaggagagacgagacctttgtgggggacagcggtggtgcatcttccgcggcgggcgccaggagtgaggcggttcctgccaggcacgagcacgacgatgacgcccccgctgccgccctgcttcctcccgtgacgtcagagggagccgcgaacagcacgcaaggatcaggagttcttgaggacgaggagctgcaggtgcaggacgctgtcgccaatccttccaagaggagcaacgattcagccgccacgcgcagcagcagcagtggccgctcgccctctgtggttcactctgatcctgccatcctccctgctccctcgcagcagattgctcctgctgctcctcaagaggcagataaggctcttgctgttcagcatattccagcgatacctgaggttaagcaatcagattcggagacgccggcgcgggagtggaagccgctgtgcgacatcacctcgaaccgccgcatcgactggtgcgagctcgacggcgacgtccgcgtgctgggcgccaacgcgagcgtcacgctggtggcgccgcccggcggggcggacggccgcaccttccgcgcggagtcgtggcgcatcaagccgtacccgcgcaaggcggacccgaacgcgatgcgcgtcgtccgcgtgctgacggtgcggtcggtgcccggcgaggcgcccgcgtgcacggaccggcacggcgtcccggcgctggtgttctcggaccgcgggtacacggggaactacttccacgcgttcacggacgtgatcctgccgctgttcctgacggcgcggcagtacgccggcgaggtgcggctgctgatcgcgcgcgcgcggacgcggcggttcgtgaacgcggaggagatcgtgcgcggcgcggagaagctcgggttcgaggtggtggtgtcggaggggacgcacgaggtggcgcccttcgcggagctggccaacagctgcgacgccatcatgggcgtgcacggcgccgggctgaccaacatggtgttcgtgccgacgggcggggtggtcatccaggtggtgccgctgggcgggctggagttcgtggcgggctacttccggggtccgtccagggacatggggctgcgctacctcgagtaccggatcacgccggaggagagcaccctgatcaaccagtacccgcgcgaccaccccatcttcacggaccccaacgggatcaagagcaagggctgggagtccctcaaggatgcctacctcgacaagcaggacgtgtcgttggacatgaagaggttccggcccacgctcaagaaggccatcgcgcacatcaggaaggccagggccaaggccaacgccggcggcggcggcaacaactaggcatcgccgtacatgtgctcattcatcctcctcttactctacttttgtttttcctcccctccttttcggattatggcagtacttgtatgtagcaagcagaaatcgatcaaatgtataatatggcagggaaagaagttagagcaaatcatatattctcttttccccccacttttcggtgagggtcaatggtggatggagagtatgatcaggactgagattctcctataaacattttagatttagtttctctcgaggaaaaaaaaaattcagatagcgaatagtacctacttagtacataatagtaattttttatacaaatttaataaaatatagtttaacaaattgctatcctaaaattacatccttgggacgaggaagtactttatttgcttcgtgattctctctaatcattgcactgtcacgccaatgatgcgtccacaacgtcctatatcacttctcgctacagaaacaatcgtgtaggagtaag

SEQ ID NO: 29589 - DNA, 2443 bp, Zea Mays
gacggacgccacgccctgcccgccggggctgcttgccactcctctctcttcctcatccatcctcgccccggccccgcccccagaaccaaaccagcctccctccccagcagctcacgagagagcgcaagcaagtattactgcgcaccgcctcgcccgcgggcgtcagcgtgaagctgccgcacagctaccccgcgaggcatggggatggacgccggcggcgggaagctgccgtacagctaccccgcccaccaggacggcaagctggtgaagagcttcagccgcgtggagccccgcaagttcggcctcgccctcgtcgcgggcttcctgctcgtcacctgcgcctacttctccaccgccaagttcgacgccatccacgtcgccatgatcagccccgtctccggcaatgcggctgggatcggcccgctagtgggcgccgccaacgccgacacctccgactccaagcagcgattagatttgggcaagcaagacccggacgacgcgctgtccaggtccgaggaggaggaggggagcagggccgacgaggtgctggagaaggacgacggcaaggcatcctcgtcgtcggggacagattccggcagcaatgcgccgctggaggacacgaggagagacgagacctttgtgggggacagcggtggtgcatcttccgcggcgggcgccaggagtgaggcggttcctgccaggcacgagcacgacgatgacgcccccgctgccgccctgcttcctcccgtgacgtcagagggagccgcgaacagcacgcaaggatcaggagttcttgaggacgaggagctgcaggtgcaggacgctgtcgccaatccttccaagaggagcaacgattcagccgccacgcgcagcagcagcagtggccgctcgccctctgtggttcactctgatcctgccatcctccctgctccctcgcagcagattgctcctgctgctcctcaagaggcagataaggctcttgctgttcagcatattccagcgatacctgaggttaagcaatcagattcggagacgccggcgcgggagtggaagccgctgtgcgacatcacctcgaaccgccgcatcgactggtgcgagctcgacggcgacgtccgcgtgctgggcgccaacgcgagcgtcacgctggtggcgccgcccggcggggcggacggccgcaccttccgcgcggagtcgtggcgcatcaagccgtacccgcgcaaggcggacccgaacgcgatgcgcgtcgtccgcgtgctgacggtgcggtcggtgcccggcgaggcgcccgcgtgcacggaccggcacggcgtcccggcgctggtgttctcggaccgcgggtacacggggaactacttccacgcgttcacggacgtgatcctgccgctgttcctgacggcgcggcagtacgccggcgaggtgcggctgctgatcgcgcgcgcgcggacgcggcggttcgtgaacgcggaggagatcgtgcgcggcgcggagaagctcgggttcgaggtggtggtgtcggaggggacgcacgaggtggcgcccttcgcggagctggccaacagctgcgacgccatcatgggcgtgcacggcgccgggctgaccaacatggtgttcgtgccgacgggcggggtggtcatccaggtggtgccgctgggcgggctggagttcgtggcgggctacttccggggtccgtccagggacatggggctgcgctacctcgagtaccggatcacgccggaggagagcaccctgatcaaccagtacccgcgcgaccaccccatcttcacggaccccaacgggatcaagagcaagggctgggagtccctcaaggatgcctacctcgacaagcaggacgtgtcgttggacatgaagaggttccggcccacgctcaagaaggccatcgcgcacatcaggaaggccagggccaaggccaacgccggcggcggcggcaacaactaggcatcgccgtacatgtgctcattcatcctcctcttactctacttttgtttttcctcccctccttttcggattatggcagtacttgtatgtagcaagcagaaatcgatcaaatgtataatatggcagggaaagaagttagagcaaatcatatattctcttttccccccacttttcggtgagggtcaatggtggatggagagtatgatcaggactgagattctcctataaacattttagatttagtttctctcgaggaaaaaaaaaattcagatagcgaatagtacctacttagtacataatagtaattttttatacaaatttaataaaatatagtttaacaaattgctatcctaaaattacatccttgggacgaggaagtactttatttgcttcgtgattctctctaatcattgcactgtcacgccaatgatgcgtccacaacgtcctatatcacttctcgctacagaaacaatcgtgtaggagtaag

SEQ ID NO: 29590 - DNA, 3148 bp, Zea Mays
ggacgccacgccctgcccgccggggctgcttgccactcctctctcttcctcatccatcctcgccccggccccgcccccagaaccaaaccagcctccctccccagcagctcacgagagagcgcaagcaagtattactgcgcaccgcctcgcccgcgggcgtcagcgtgaagctgccgcacagctaccccgcgaggcatggggatggacgccggcggcgggaagctgccgtacagctaccccgcccaccaggacggcaagctggtgaagagcttcagccgcgtggagccccgcaagttcggcctcgccctcgtcgcgggcttcctgctcgtcacctgcgcctacttctccaccgccaagttcgacgccatccacgtcgccatgatcagccccgtctccggcaatgcggctgggatcggcccgctagtgggcgccgccaacgccgacacctccgactccaagcagcgattagatttgggcaagcaagacccggacgacgcgctgtccaggtccgaggaggaggaggggagcagggccgacgaggtgctggagaaggacgacggcaaggcatcctcgtcgtcggggacaggtacaccgcgcttccgtcaccggcaaggcatcgcctgttgttttttcgagattgagtggccgtccgtgcttgcccttcccttccatggaggcgtcaagctggccgccgcggccggactcgtgtgcccccgcccgccgtactcccaacgtcctgcaccgctgcacgcaaagccagccccaaaaatcagataaaaggaccggccggttttttcctccgcttccctttcccccactctataatcaatcgctttttttttcttttccctgtcatcaccagattccggcagcaatgcgccgctggaggacacgaggagagacgagacctttgtgggggacagcggtggtgcatcttccgcggcgggcgccaggagtgaggcggttcctgccaggcacgagcacgacgatgacgcccccgctgccgccctgcttcctcccgtgacgtcagagggagccgcgaacagcacgcaaggatcaggagttcttgaggacgaggagctgcaggtgcaggacgctgtcgccaatccttccaagaggagcaacgattcagccgccacgcgcagcagcagcagtggccgctcgccctctgtggttcactctgatcctgccatcctccctgctccctcgcagcagattgctcctgctgctcctcaagaggcagataaggctcttgctgttcagcatattccagcgatacctgaggttaagcaatcaggtatcctccctgatccttctcctcttttgtggtaaaaaggatgttttctctcctgtcaaattacggtgccggtaagcagctagtcaatgtgagggacgccgaaaagaaaagaaaagaaaaaaccgtgcttgcaattctacagcgtctcaggcatgtcgttgcaaaatgcactttggtcagcctacagtcgtagtagcgttttttttctttgcagccttctatctcaacgaagggcccgatgctgttgctgctattggaccactgcttttgatcacactctgtcctatgtgggctgtggctctgtgtccgtgctcatgttcttcgcctttcttgagatgagagcaacgtgctactactaggcagcatcatcccgttccaatagctgatggattgctccatctctaggcatctcgtccgatcatactatacttttccgtagggtccggtggacggtggtctaccatgaaccttgttcaccctccgtcaagctctttttcctgctattgaaaacacacgcacgcacgcactctctcttttggagctgccttttcttgtccagccggtcattccatgattagctgacaagcaacgtgctaaactgaaattttttttaatggtcgcaagattcggagacgccggcgcgggagtggaagccgctgtgcgacatcacctcgaaccgccgcatcgactggtgcgagctcgacggcgacgtccgcgtgctgggcgccaacgcgagcgtcacgctggtggcgccgcccggcggggcggacggccgcaccttccgcgcggagtcgtggcgcatcaagccgtacccgcgcaaggcggacccgaacgcgatgcgcgtcgtccgcgtgctgacggtgcggtcggtgcccggcgaggcgcccgcgtgcacggaccggcacggcgtcccggcgctggtgttctcggaccgcgggtacacggggaactacttccacgcgttcacggacgtgatcctgccgctgttcctgacggcgcggcagtacgccggcgaggtgcggctgctgatcgcgcgcgcgcggacgcggcggttcgtgaacgcggaggagatcgtgcgcggcgcggagaagctcgggttcgaggtggtggtgtcggaggggacgcacgaggtggcgcccttcgcggagctggccaacagctgcgacgccatcatgggcgtgcacggcgccgggctgaccaacgggatcaagagcaagggctgggagtccctcaaggatgcctacctcgacaagcaggacgtgtcgttggacatgaagaggttccggcccacgctcaagaaggccatcgcgcacatcaggaaggccagggccaaggccaacgccggcggcggcggcaacaactaggcatcgccgtacatgtgctcattcatcctcctcttactctacttttgtttttcctcccctccttttcggattatggcagtacttgtatgtagcaagcagaaatcgatcaaatgtataatatggcagggaaagaagttagagcaaatcatatattctcttttccccccacttttcggtgagggtcaatggtggatggagagtatgatcaggactgagattctcctataaacattttagatttagtttctctcgaggaaaaaaaaaattcagatagcgaatagtacctacttagtacataatagtaattttttatacaaatttaataaaatatagtttaacaaattgctatcctaaaattacatccttgggacgaggaagtactttatttgcttcgtgattctctctaatcattgcactgtcacgccaatgatgcgtccacaacgtcctatatcacttctcgctacagaaacaatcgtgtaggagtaag

SEQ ID NO: 29591 - DNA, 3066 bp, Zea Mays
gacgccacgccctgcccgccggggctgcttgccactcctctctcttcctcatccatcctcgccccggccccgcccccagaaccaaaccagcctccctccccagcagctcacgagagagcgcaagcaagtattactgcgcaccgcctcgcccgcgggcgtcagcgtgaagctgccgcacagctaccccgcgaggcatggggatggacgccggcggcgggaagctgccgtacagctaccccgcccaccaggacggcaagctggtgaagagcttcagccgcgtggagccccgcaagttcggcctcgccctcgtcgcgggcttcctgctcgtcacctgcgcctacttctccaccgccaagttcgacgccatccacgtcgccatgacagtcagccccgtctccggcaatgcggctgggatcggcccgctagtgggcgccgccaacgccgacacctccgactccaagcagcgattagatttgggcaagcaagacccggacgacgcgctgtccaggtccgaggaggaggaggggagcagggccgacgaggtgctggagaaggacgacggcaaggcatcctcgtcgtcggggacagattccggcagcaatgcgccgctggaggacacgaggagagacgagacctttgtgggggacagcggtggtgcatcttccgcggcgggcgccaggagtgaggcggttcctgccaggcacgagcacgacgatgacgcccccgctgccgccctgcttcctcccgtgacgtcagagggagccgcgaacagcacgcaaggatcaggagttcttgaggacgaggagctgcaggtgcaggacgctgtcgccaatccttccaagaggagcaacgattcagccgccacgcgcagcagcagcagtggccgctcgccctctgtggttcactctgatcctgccatcctccctgctccctcgcagcagattgctcctgctgctcctcaagaggcagataaggctcttgctgttcagcatattccagcgatacctgaggttaagcaatcaggtatcctccctgatccttctcctcttttgtggtaaaaaggatgttttctctcctgtcaaattacggtgccggtaagcagctagtcaatgtgagggacgccgaaaagaaaagaaaagaaaaaaccgtgcttgcaattctacagcgtctcaggcatgtcgttgcaaaatgcactttggtcagcctacagtcgtagtagcgttttttttctttgcagccttctatctcaacgaagggcccgatgctgttgctgctattggaccactgcttttgatcacactctgtcctatgtgggctgtggctctgtgtccgtgctcatgttcttcgcctttcttgagatgagagcaacgtgctactactaggcagcatcatcccgttccaatagctgatggattgctccatctctaggcatctcgtccgatcatactatacttttccgtagggtccggtggacggtggtctaccatgaaccttgttcaccctccgtcaagctctttttcctgctattgaaaacacacgcacgcacgcactctctcttttggagctgccttttcttgtccagccggtcattccatgattagctgacaagcaacgtgctaaactgaaattttttttaatggtcgcaagattcggagacgccggcgcgggagtggaagccgctgtgcgacatcacctcgaaccgccgcatcgactggtgcgagctcgacggcgacgtccgcgtgctgggcgccaacgcgagcgtcacgctggtggcgccgcccggcggggcggacggccgcaccttccgcgcggagtcgtggcgcatcaagccgtacccgcgcaaggcggacccgaacgcgatgcgcgtcgtccgcgtgctgacggtgcggtcggtgcccggcgaggcgcccgcgtgcacggaccggcacggcgtcccggcgctggtgttctcggaccgcgggtacacggggaactacttccacgcgttcacggacgtgatcctgccgctgttcctgacggcgcggcagtacgccggcgaggtgcggctgctgatcgcgcgcgcgcggacgcggcggttcgtgaacgcggaggagatcgtgcgcggcgcggagaagctcgggttcgaggtggtggtgtcggaggggacgcacgaggtggcgcccttcgcggagctggccaacagctgcgacgccatcatgggcgtgcacggcgccgggctgaccaacatggtgttcgtgccgacgggcggggtggtcatccaggtggtgccgctgggcgggctggagttcgtggcgggctacttccggggtccgtccagggacatggggctgcgctacctcgagtaccggatcacgccggaggagagcaccctgatcaaccagtacccgcgcgaccaccccatcttcacggaccccaacgggatcaagagcaagggctgggagtccctcaaggatgcctacctcgacaagcaggacgtgtcgttggacatgaagaggttccggcccacgctcaagaaggccatcgcgcacatcaggaaggccagggccaaggccaacgccggcggcggcggcaacaactaggcatcgccgtacatgtgctcattcatcctcctcttactctacttttgtttttcctcccctccttttcggattatggcagtacttgtatgtagcaagcagaaatcgatcaaatgtataatatggcagggaaagaagttagagcaaatcatatattctcttttccccccacttttcggtgagggtcaatggtggatggagagtatgatcaggactgagattctcctataaacattttagatttagtttctctcgaggaaaaaaaaaattcagatagcgaatagtacctacttagtacataatagtaattttttatacaaatttaataaaatatagtttaacaaattgctatcctaaaattacatccttgggacgaggaagtactttatttgcttcgtgattctctctaatcattgcactgtcacgccaatgatgcgtccacaacgtcctatatcacttctcgctacagaaacaatcgtgtaggagtaag

SEQ ID NO: 29592 - DNA, 2715 bp, Zea Mays
gacgccacgccctgcccgccggggctgcttgccactcctctctcttcctcatccatcctcgccccggccccgcccccagaaccaaaccagcctccctccccagcagctcacgagagagcgcaagcaagtattactgcgcaccgcctcgcccgcgggcgtcagcgtgaagctgccgcacagctaccccgcgaggcatggggatggacgccggcggcgggaagctgccgtacagctaccccgcccaccaggacggcaagctggtgaagagcttcagccgcgtggagccccgcaagttcggcctcgccctcgtcgcgggcttcctgctcgtcacctgcgcctacttctccaccgccaagttcgacgccatccacgtcgccatgatcagccccgtctccggcaatgcggctgggatcggcccgctagtgggcgccgccaacgccgacacctccgactccaagcagcgattagatttgggcaagcaagacccggacgacgcgctgtccaggtccgaggaggaggaggggagcagggccgacgaggtgctggagaaggacgacggcaaggcatcctcgtcgtcggggacaggtacaccgcgcttccgtcaccggcaaggcatcgcctgttgttttttcgagattgagtggccgtccgtgcttgcccttcccttccatggaggcgtcaagctggccgccgcggccggactcgtgtgcccccgcccgccgtactcccaacgtcctgcaccgctgcacgcaaagccagccccaaaaatcagataaaaggaccggccggttttttcctccgcttccctttcccccactctataatcaatcgctttttttttcttttccctgtcatcaccagattccggcagcaatgcgccgctggaggacacgaggagagacgagacctttgtgggggacagcggtggtgcatcttccgcggcgggcgccaggagtgaggcggttcctgccaggcacgagcacgacgatgacgcccccgctgccgccctgcttcctcccgtgacgtcagagggagccgcgaacagcacgcaaggatcaggagttcttgaggacgaggagctgcaggtgcaggacgctgtcgccaatccttccaagaggagcaacgattcagccgccacgcgcagcagcagcagtggccgctcgccctctgtggttcactctgatcctgccatcctccctgctccctcgcagcagattgctcctgctgctcctcaagaggcagataaggctcttgctgttcagcatattccagcgatacctgaggttaagcaatcagattcggagacgccggcgcgggagtggaagccgctgtgcgacatcacctcgaaccgccgcatcgactggtgcgagctcgacggcgacgtccgcgtgctgggcgccaacgcgagcgtcacgctggtggcgccgcccggcggggcggacggccgcaccttccgcgcggagtcgtggcgcatcaagccgtacccgcgcaaggcggacccgaacgcgatgcgcgtcgtccgcgtgctgacggtgcggtcggtgcccggcgaggcgcccgcgtgcacggaccggcacggcgtcccggcgctggtgttctcggaccgcgggtacacggggaactacttccacgcgttcacggacgtgatcctgccgctgttcctgacggcgcggcagtacgccggcgaggtgcggctgctgatcgcgcgcgcgcggacgcggcggttcgtgaacgcggaggagatcgtgcgcggcgcggagaagctcgggttcgaggtggtggtgtcggaggggacgcacgaggtggcgcccttcgcggagctggccaacagctgcgacgccatcatgggcgtgcacggcgccgggctgaccaacatggtgttcgtgccgacgggcggggtggtcatccaggtggtgccgctgggcgggctggagttcgtggcgggctacttccggggtccgtccagggacatggggctgcgctacctcgagtaccggatcacgccggaggagagcaccctgatcaaccagtacccgcgcgaccaccccatcttcacggaccccaacgggatcaagagcaagggctgggagtccctcaaggatgcctacctcgacaagcaggacgtgtcgttggacatgaagaggttccggcccacgctcaagaaggccatcgcgcacatcaggaaggccagggccaaggccaacgccggcggcggcggcaacaactaggcatcgccgtacatgtgctcattcatcctcctcttactctacttttgtttttcctcccctccttttcggattatggcagtacttgtatgtagcaagcagaaatcgatcaaatgtataatatggcagggaaagaagttagagcaaatcatatattctcttttccccccacttttcggtgagggtcaatggtggatggagagtatgatcaggactgagattctcctataaacattttagatttagtttctctcgaggaaaaaaaaaattcagatagcgaatagtacctacttagtacataatagtaattttttatacaaatttaataaaatatagtttaacaaattgctatcctaaaattacatccttgggacgaggaagtactttatttgcttcgtgattctctctaatcattgcactgtcacgccaatgatgcgtccacaacgtcctatatcacttctcgctacagaaacaatcgtgtaggagtaag

SEQ ID NO: 29593 - DNA, 3630 bp, Zea Mays
gacgccacgccctgcccgccggggctgcttgccactcctctctcttcctcatccatcctcgccccggccccgcccccagaaccaaaccagcctccctccccagcagctcacgagagagcgcaagcaagtattactgcgcaccgcctcgcccgcgggcgtcagcgtgaagctgccgcacagctaccccgcgaggcatggggatggacgccggcggcgggaagctgccgtacagctaccccgcccaccaggacggcaagctggtgaagagcttcagccgcgtggagccccgcaagttcggcctcgccctcgtcgcgggcttcctgctcgtcacctgcgcctacttctccaccgccaagttcgacgccatccacgtcgccatgacagtcagccccgtctccggcaatgcggctgggatcggcccgctagtgggcgccgccaacgccgacacctccgactccaagcagcgattagatttgggcaagcaagacccggacgacgcgctgtccaggtccgaggaggaggaggggagcagggccgacgaggtgctggagaaggacgacggcaaggcatcctcgtcgtcggggacaggtacaccgcgcttccgtcaccggcaaggcatcgcctgttgttttttcgagattgagtggccgtccgtgcttgcccttcccttccatggaggcgtcaagctggccgccgcggccggactcgtgtgcccccgcccgccgtactcccaacgtcctgcaccgctgcacgcaaagccagccccaaaaatcagataaaaggaccggccggttttttcctccgcttccctttcccccactctataatcaatcgctttttttttcttttccctgtcatcaccagattccggcagcaatgcgccgctggaggacacgaggagagacgagacctttgtgggggacagcggtggtgcatcttccgcggcgggcgccaggagtgaggcggttcctgccaggcacgagcacgacgatgacgcccccgctgccgccctgcttcctcccgtgacgtcagagggagccgcgaacagcacgcaaggatcaggagttcttgaggacgaggagctgcaggtgcaggacgctgtcgccaatccttccaagaggagcaacgattcagccgccacgcgcagcagcagcagtggccgctcgccctctgtggttcactctgatcctgccatcctccctgctccctcgcagcagattgctcctgctgctcctcaagaggcagataaggctcttgctgttcagcatattccagcgatacctgaggttaagcaatcaggtatcctccctgatccttctcctcttttgtggtaaaaaggatgttttctctcctgtcaaattacggtgccggtaagcagctagtcaatgtgagggacgccgaaaagaaaagaaaagaaaaaaccgtgcttgcaattctacagcgtctcaggcatgtcgttgcaaaatgcactttggtcagcctacagtcgtagtagcgttttttttctttgcagccttctatctcaacgaagggcccgatgctgttgctgctattggaccactgcttttgatcacactctgtcctatgtgggctgtggctctgtgtccgtgctcatgttcttcgcctttcttgagatgagagcaacgtgctactactaggcagcatcatcccgttccaatagctgatggattgctccatctctaggcatctcgtccgatcatactatacttttccgtagggtccggtggacggtggtctaccatgaaccttgttcaccctccgtcaagctctttttcctgctattgaaaacacacgcacgcacgcactctctcttttggagctgccttttcttgtccagccggtcattccatgattagctgacaagcaacgtgctaaactgaaattttttttaatggtcgcaagattcggagacgccggcgcgggagtggaagccgctgtgcgacatcacctcgaaccgccgcatcgactggtgcgagctcgacggcgacgtccgcgtgctgggcgccaacgcgagcgtcacgctggtggcgccgcccggcggggcggacggccgcaccttccgcgcggagtcgtggcgcatcaagccgtacccgcgcaaggcggacccgaacgcgatgcgcgtcgtccgcgtgctgacggtgcggtcggtgcccggcgaggcgcccgcgtgcacggaccggcacggcgtcccggcgctggtgttctcggaccgcgggtacacggggaactacttccacgcgttcacggacgtgatcctgccgctgttcctgacggcgcggcagtacgccggcgaggtgcggctgctggtgacggacctccaggcgtggtgggtgggcaagttcgcgccggtgttcaggagcatctccaactacgagctggtggacctggaccgcgacccgcgcgtgcactgcttccgccacgtccaggtggggctcaccagccacgacgacttcagcatcgacccgcgccgcgcccccaacggctactccatgctggacttcaccgggttcatgcgcgccgcctacgggctcccgcgcggcgacgtcgccgccgccgctggcccgtcgtcgaagcggcggccgaggctgctgctgatcgcgcgcgcgcggacgcggcggttcgtgaacgcggaggagatcgtgcgcggcgcggagaagctcgggttcgaggtggtggtgtcggaggggacgcacgaggtggcgcccttcgcggagctggccaacagctgcgacgccatcatgggcgtgcacggcgccgggctgaccaacatggtgttcgtgccgacgggcggggtggtcatccaggtggtgccgctgggcgggctggagttcgtggcgggctacttccggggtccgtccagggacatggggctgcgctacctcgagtaccggatcacgccggaggagagcaccctgatcaaccagtacccgcgcgaccaccccatcttcacggaccccaacgggatcaagagcaagggctgggagtccctcaaggatgcctacctcgacaagcaggacgtgtcgttggacatgaagaggttccggcccacgctcaagaaggccatcgcgcacatcaggaaggccagggccaaggccaacgccggcggcggcggcaacaactaggcatcgccgtacatgtgctcattcatcctcctcttactctacttttgtttttcctcccctccttttcggattatggcagtacttgtatgtagcaagcagaaatcgatcaaatgtataatatggcagggaaagaagttagagcaaatcatatattctcttttccccccacttttcggtgagggtcaatggtggatggagagtatgatcaggactgagattctcctataaacattttagatttagtttctctcgaggaaaaaaaaaattcagatagcgaatagtacctacttagtacataatagtaattttttatacaaatttaataaaatatagtttaacaaattgctatcctaaaattacatccttgggacgaggaagtactttatttgcttcgtgattctctctaatcattgcactgtcacgccaatgatgcgtccacaacgtcctatatcacttctcgctacagaaacaatcgtgtaggagtaag

SEQ ID NO: 29594 - DNA, 3063 bp, Zea Mays
gacgccacgccctgcccgccggggctgcttgccactcctctctcttcctcatccatcctcgccccggccccgcccccagaaccaaaccagcctccctccccagcagctcacgagagagcgcaagcaagtattactgcgcaccgcctcgcccgcgggcgtcagcgtgaagctgccgcacagctaccccgcgaggcatggggatggacgccggcggcgggaagctgccgtacagctaccccgcccaccaggacggcaagctggtgaagagcttcagccgcgtggagccccgcaagttcggcctcgccctcgtcgcgggcttcctgctcgtcacctgcgcctacttctccaccgccaagttcgacgccatccacgtcgccatgatcagccccgtctccggcaatgcggctgggatcggcccgctagtgggcgccgccaacgccgacacctccgactccaagcagcgattagatttgggcaagcaagacccggacgacgcgctgtccaggtccgaggaggaggaggggagcagggccgacgaggtgctggagaaggacgacggcaaggcatcctcgtcgtcggggacagattccggcagcaatgcgccgctggaggacacgaggagagacgagacctttgtgggggacagcggtggtgcatcttccgcggcgggcgccaggagtgaggcggttcctgccaggcacgagcacgacgatgacgcccccgctgccgccctgcttcctcccgtgacgtcagagggagccgcgaacagcacgcaaggatcaggagttcttgaggacgaggagctgcaggtgcaggacgctgtcgccaatccttccaagaggagcaacgattcagccgccacgcgcagcagcagcagtggccgctcgccctctgtggttcactctgatcctgccatcctccctgctccctcgcagcagattgctcctgctgctcctcaagaggcagataaggctcttgctgttcagcatattccagcgatacctgaggttaagcaatcaggtatcctccctgatccttctcctcttttgtggtaaaaaggatgttttctctcctgtcaaattacggtgccggtaagcagctagtcaatgtgagggacgccgaaaagaaaagaaaagaaaaaaccgtgcttgcaattctacagcgtctcaggcatgtcgttgcaaaatgcactttggtcagcctacagtcgtagtagcgttttttttctttgcagccttctatctcaacgaagggcccgatgctgttgctgctattggaccactgcttttgatcacactctgtcctatgtgggctgtggctctgtgtccgtgctcatgttcttcgcctttcttgagatgagagcaacgtgctactactaggcagcatcatcccgttccaatagctgatggattgctccatctctaggcatctcgtccgatcatactatacttttccgtagggtccggtggacggtggtctaccatgaaccttgttcaccctccgtcaagctctttttcctgctattgaaaacacacgcacgcacgcactctctcttttggagctgccttttcttgtccagccggtcattccatgattagctgacaagcaacgtgctaaactgaaattttttttaatggtcgcaagattcggagacgccggcgcgggagtggaagccgctgtgcgacatcacctcgaaccgccgcatcgactggtgcgagctcgacggcgacgtccgcgtgctgggcgccaacgcgagcgtcacgctggtggcgccgcccggcggggcggacggccgcaccttccgcgcggagtcgtggcgcatcaagccgtacccgcgcaaggcggacccgaacgcgatgcgcgtcgtccgcgtgctgacggtgcggtcggtgcccggcgaggcgcccgcgtgcacggaccggcacggcgtcccggcgctggtgttctcggaccgcgggtacacggggaactacttccacgcgttcacggacgtgatcctgccgctgttcctgacggcgcggcagtacgccggcgaggtgcggctgctgatcgcgcgcgcgcggacgcggcggttcgtgaacgcggaggagatcgtgcgcggcgcggagaagctcgggttcgaggtggtggtgtcggaggggacgcacgaggtggcgcccttcgcggagctggccaacagctgcgacgccatcatgggcgtgcacggcgccgggctgaccaacatggtgttcgtgccgacgggcggggtggtcatccaggtggtgccgctgggcgggctggagttcgtggcgggctacttccggggtccgtccagggacatggggctgcgctacctcgagtaccggatcacgccggaggagagcaccctgatcaaccagtacccgcgcgaccaccccatcttcacggaccccaacgggatcaagagcaagggctgggagtccctcaaggatgcctacctcgacaagcaggacgtgtcgttggacatgaagaggttccggcccacgctcaagaaggccatcgcgcacatcaggaaggccagggccaaggccaacgccggcggcggcggcaacaactaggcatcgccgtacatgtgctcattcatcctcctcttactctacttttgtttttcctcccctccttttcggattatggcagtacttgtatgtagcaagcagaaatcgatcaaatgtataatatggcagggaaagaagttagagcaaatcatatattctcttttccccccacttttcggtgagggtcaatggtggatggagagtatgatcaggactgagattctcctataaacattttagatttagtttctctcgaggaaaaaaaaaattcagatagcgaatagtacctacttagtacataatagtaattttttatacaaatttaataaaatatagtttaacaaattgctatcctaaaattacatccttgggacgaggaagtactttatttgcttcgtgattctctctaatcattgcactgtcacgccaatgatgcgtccacaacgtcctatatcacttctcgctacagaaacaatcgtgtaggagtaag

SEQ ID NO: 29595 - DNA, 2307 bp, Zea Mays
ctcaaacctacaactgctaacttactggagttcttgaggacgaggagctgcaggtgcaggacgctgtcgccaatccttccaagaggagcaacgattcagccgccacgcgcagcagcagcagtggccgctcgccctctgtggttcactctgatcctgccatcctccctgctccctcgcagcagattgctcctgctgctcctcaagaggcagataaggctcttgctgttcagcatattccagcgatacctgaggttaagcaatcaggtatcctccctgatccttctcctcttttgtggtaaaaaggatgttttctctcctgtcaaattacggtgccggtaagcagctagtcaatgtgagggacgccgaaaagaaaagaaaagaaaaaaccgtgcttgcaattctacagcgtctcaggcatgtcgttgcaaaatgcactttggtcagcctacagtcgtagtagcgttttttttctttgcagccttctatctcaacgaagggcccgatgctgttgctgctattggaccactgcttttgatcacactctgtcctatgtgggctgtggctctgtgtccgtgctcatgttcttcgcctttcttgagatgagagcaacgtgctactactaggcagcatcatcccgttccaatagctgatggattgctccatctctaggcatctcgtccgatcatactatacttttccgtagggtccggtggacggtggtctaccatgaaccttgttcaccctccgtcaagctctttttcctgctattgaaaacacacgcacgcacgcactctctcttttggagctgccttttcttgtccagccggtcattccatgattagctgacaagcaacgtgctaaactgaaattttttttaatggtcgcaagattcggagacgccggcgcgggagtggaagccgctgtgcgacatcacctcgaaccgccgcatcgactggtgcgagctcgacggcgacgtccgcgtgctgggcgccaacgcgagcgtcacgctggtggcgccgcccggcggggcggacggccgcaccttccgcgcggagtcgtggcgcatcaagccgtacccgcgcaaggcggacccgaacgcgatgcgcgtcgtccgcgtgctgacggtgcggtcggtgcccggcgaggcgcccgcgtgcacggaccggcacggcgtcccggcgctggtgttctcggaccgcgggtacacggggaactacttccacgcgttcacggacgtgatcctgccgctgttcctgacggcgcggcagtacgccggcgaggtgcggctgctgatcgcgcgcgcgcggacgcggcggttcgtgaacgcggaggagatcgtgcgcggcgcggagaagctcgggttcgaggtggtggtgtcggaggggacgcacgaggtggcgcccttcgcggagctggccaacagctgcgacgccatcatgggcgtgcacggcgccgggctgaccaacatggtgttcgtgccgacgggcggggtggtcatccaggtggtgccgctgggcgggctggagttcgtggcgggctacttccggggtccgtccagggacatggggctgcgctacctcgagtaccggatcacgccggaggagagcaccctgatcaaccagtacccgcgcgaccaccccatcttcacggaccccaacgggatcaagagcaagggctgggagtccctcaaggatgcctacctcgacaagcaggacgtgtcgttggacatgaagaggttccggcccacgctcaagaaggccatcgcgcacatcaggaaggccagggccaaggccaacgccggcggcggcggcaacaactaggcatcgccgtacatgtgctcattcatcctcctcttactctacttttgtttttcctcccctccttttcggattatggcagtacttgtatgtagcaagcagaaatcgatcaaatgtataatatggcagggaaagaagttagagcaaatcatatattctcttttccccccacttttcggtgagggtcaatggtggatggagagtatgatcaggactgagattctcctataaacattttagatttagtttctctcgaggaaaaaaaaaattcagatagcgaatagtacctacttagtacataatagtaattttttatacaaatttaataaaatatagtttaacaaattgctatcctaaaattacatccttgggacgaggaagtactttatttgcttcgtgattctctctaatcattgcactgtcacgccaatgatgcgtccacaacgtcctatatcacttctcgctacagaaacaatcgtgtaggagtaag

SEQ ID NO: 29596 - DNA, 938 bp, Zea Mays
tgatgccacacacagcctagggtagagctagctacaactacaaaagcagacaacttggaggaggccaaccccagcacacctccctttacccttccttctctcccatgcaagcaaggaatcgagggagggagggaggaagcaaaaggggaaaagctcgtgcaagacaagccgccctgccctgggaccattcccacccacatcgatcgtcagccagagagaggttcgttagttccagaaggacactggacagttggagacagcgagcgagcgagcgagcgagcgggaggagaggaagaagagctagggggcgatgggcggcgagatgaagcccgggaggggcctcaggacctgggcgcagcgccacctcaacgtcaccttcgccgtcggcttcctcctcgtgctgctcacctacctcgtcgtctcgcggcagctcgccgtcgccgcgcccggcggtgcagcgtcgagggtggtggcgggtaagcaggtggtcgtcagagacgccggagacaacgcagagggcgcgagcaaaaggcggcaggaatggcagccaaaacaggcggcggcggaggaggaggagacgtccggtgccgtcccaacggaggaggaggagtcgtatccgaaaagagatgaggccgacggcaaaccgtctgatttttgggccttacatccatgctgccagcatctcctcttgagcactgagtacagtggggacaacctagggtggggtggtttgtaaagcaagggcaagtacacatcaacgtactcaacaaatgtcccgtttggctaaagtggactagctgtatgtggagttaaggttaagttgttgcttttagctggtcatgtttttattactataagtagaaccgaattttaataataaacccagttattacccagaagcactccctccaagaggaaatactagagatcaaaattat

SEQ ID NO: 29597 - DNA, 1538 bp, Zea Mays
tgggtccaccacgatgaattcggaggcagtggcattcaagcggatgtcgccggtgaggtcacacacgtcagctcgtgagcccgaaaggtcgcacagcggttgccgctgctgcttcacggaggctgctgcagctgcacgtgtcatgatgtctcctgttgatgaagacgcaagtacaaaattactgcggagtacgtacactactactactacatgccgtcttgaaagaaaaaaaatagatttagattgacctaaataaaaaatatatttcatggcgattattgtatctattttttaggctacaagcatgccgttaatacaatatgtatcgggattagaaaagtatactgtgaactctagaattttgcgtgcatgacttgaagtgatggccagccagcagaaacctgggtgttggtgctgaggagacgtcgcttgcacggttgttccggcggctgcggtccgcggttaatttgtctcggtccgggtccgcatcctcggcggctttaaggagttgcagacttgcaggtcaagcttttagagcgcaagccgtgcatttatggactagcttcgttacgcagcttttggaaaggcgtactactactacctggccttgctcggtcgtcgtcggagttagatgtcgcgtcggcggcggcggcggcggcggcgctgctctctggcgccgcctcctccatctccgcttgccccccggccccgacgacgttgatgctgatctttcctctgatccctgattcctccagctccgcttccgtgaccgccttgtcgtcgtcgtcgttgctccgctgagcaacaagcagatgcttgaggtcaccctcgccgccgccgccgccgtggctgcccccctgcagctgcgacgggtggaagtcacctcggcctgaaagaacaagtacacacgcacgcgcgcacgacagtacgtgggtcgctcagatcggaagcagatcgagaaggcagaagcgcactcacgatcacgagcgtcgaggacgagggtggcgtagcgtcgggaggagagcgtgaagacgacgacgacgaagaggaggaagcagccgacggcgacgacggacagcaacctgccacctgccgccaccttcttattcttgtcgccgccgcctttcatggccgcgccgcgggccagcgcagccatatctagcttctcgtcttcggaaggtctccgagcctaagacaagagagagaggtggatcccaagaactagaggcggatcattcttcctcgatgtactcacttgttgagctcctcaagtgatcactcgctgctgggccaactctcgtagctcttgcctccaccaccaccacctaagacatatataaaatggagaccagaggagagcggattataaactcttttgctctcccatagtcccatcccatgcgcatcatgagccgtagcgtggagaaaagcgagcgatcgagcaggtcaagctatatgaggggcgtttcaccgtacctttacaccatcgccagcctaacactgccaacctactacactacatgcattgtaccgtattg

SEQ ID NO: 29598 - DNA, 1571 bp, Zea Mays
tgggtccaccacgatgaattcggaggcagtggcattcaagcggatgtcgccggtgaggtcacacacgtcagctcgtgagcccgaaaggtcgcacagcggttgccgctgctgcttcacggaggctgctgcagctgcacgtgtcatgatgtctcctgttgatgaagacgcaagtacaaaattactgcggagtacgtacactactactactacatgccgtcttgaaagaaaaaaaatagatttagattgacctaaataaaaaatatatttcatggcgattattgtatctattttttaggctacaagcatgccgttaatacaatatgtatcgggattagaaaagtatactgtgaactctagaattttgcgtgcatgacttgaagtgatggccagccagcagaaacctgggtgttggtgctgaggagacgtcgcttgcacggttgttccggcggctgcggtccgcggttaatttgtctcggtccgggtccgcatcctcggcggctttaaggagttgcagacttgcaggtcaagcttttagagcgcaagccgtgcatttatggactagcttcgttacgcagcttttggaaaggcgtactactactacctggccttgctcggtcgtcgtcggagttagatgtcgcgtcggcggcggcggcggcggcggcgctgctctctggcgccgcctcctccatctccgcttgccccccggccccgacgacgttgatgctgatctttcctctgatccctgattcctccagctccgcttccgtgaccgccttgtcgtcgtcgtcgttgctccgctgagcaacaagcagatgcttgaggtcaccctcgccgccgccgccgccgtggctgcccccctgcagctgcgacgggtggaagtcacctcggcctgaaagaacaagtgcgtacaaatcagtgggtcataacggtgcaggtacacacgcacgcgcgcacgacagtacgtgggtcgctcagatcggaagcagatcgagaaggcagaagcgcactcacgatcacgagcgtcgaggacgagggtggcgtagcgtcgggaggagagcgtgaagacgacgacgacgaagaggaggaagcagccgacggcgacgacggacagcaacctgccacctgccgccaccttcttattcttgtcgccgccgcctttcatggccgcgccgcgggccagcgcagccatatctagcttctcgtcttcggaaggtctccgagcctaagacaagagagagaggtggatcccaagaactagaggcggatcattcttcctcgatgtactcacttgttgagctcctcaagtgatcactcgctgctgggccaactctcgtagctcttgcctccaccaccaccacctaagacatatataaaatggagaccagaggagagcggattataaactcttttgctctcccatagtcccatcccatgcgcatcatgagccgtagcgtggagaaaagcgagcgatcgagcaggtcaagctatatgaggggcgtttcaccgtacctttacaccatcgccagcctaacactgccaacctactacactacatgcattgtaccgtattg

SEQ ID NO: 29599 - DNA, 1558 bp, Zea Mays
tgggtccaccacgatgaattcggaggcagtggcattcaagcggatgtcgccggtgaggtcacacacgtcagctcgtgagcccgaaaggtcgcacagcggttgccgctgctgcttcacggaggctgctgcagctgcacgtgtcatgatgtctcctgttgatgaagacgcaagtacaaaattactgcggagtacgtacactactactactacatgccgtcttgaaagaaaaaaaatagatttagattgacctaaataaaaaatatatttcatggcgattattgtatctattttttaggctacaagcatgccgttaatacaatatgtatcgggattagaaaagtatactgtgaactctagaattttgcgtgcatgacttgaagtgatggccagccagcagaaacctgggtgttggtgctgaggagacgtcgcttgcacggttgttccggcggctgcggtccgcggttaatttgtctcggtccgggtccgcatcctcggcggctttaaggagttgcagacttgcaggtcaagcttttagagcgcaagccgtgcatttatggactagcttcgttacgcagcttttggaaaggcgtactactactacctggccttgctcggtcgtcgtcggagttagatgtcgcgtcggcggcggcggcggcggcggcgctgctctctggcgccgcctcctccatctccgcttgccccccggccccgacgacgttgatgctgatctttcctctgatccctgattcctccagctccgcttccgtgaccgccttgtcgtcgtcgtcgttgctccgctgagcaacaagcagatgcttgaggtcaccctcgccgccgccgccgccgtggctgcccccctgcagctgcgacgggtggaagtcacctcggcctgaaagaacaagtgcgtacaaatcagtgggtgtacacacgcacgcgcgcacgacagtacgtgggtcgctcagatcggaagcagatcgagaaggcagaagcgcactcacgatcacgagcgtcgaggacgagggtggcgtagcgtcgggaggagagcgtgaagacgacgacgacgaagaggaggaagcagccgacggcgacgacggacagcaacctgccacctgccgccaccttcttattcttgtcgccgccgcctttcatggccgcgccgcgggccagcgcagccatatctagcttctcgtcttcggaaggtctccgagcctaagacaagagagagaggtggatcccaagaactagaggcggatcattcttcctcgatgtactcacttgttgagctcctcaagtgatcactcgctgctgggccaactctcgtagctcttgcctccaccaccaccacctaagacatatataaaatggagaccagaggagagcggattataaactcttttgctctcccatagtcccatcccatgcgcatcatgagccgtagcgtggagaaaagcgagcgatcgagcaggtcaagctatatgaggggcgtttcaccgtacctttacaccatcgccagcctaacactgccaacctactacactacatgcattgtaccgtattg

SEQ ID NO: 29600 - DNA, 2604 bp, Zea Mays
cgactccctgtgcccgtctcgtcgtctcctctcctcacctcccctccacccccacttgctattttgaccctcctcccgttcctttctttaatccatcatccgcctcgctatccctccctccctccctccctgcccgccgtggagggtttgggattttgcggacctcagcagctccatatctcagtcacacactcacgcgcgcgcgggggccgggggccgctggacccgccgttctccttctcctccccccctcgttcctctcgtctcaccactactaccctacacgcgccgcggctaggattccgccgaggagacgctgcgcgcgtggatctccggtgctgtcctgctagcgtgcgacgaggccaggcaggcgcgcggccggcgccatgagcttcgggagcctattcgacggcgggtccggcggcggcggaggaggaggagggatgcagttcccgttctcgaccgggttctcgtcctcgccggccctctccctcggtctggagaaccccggcggcggcatggtcggccggatgctccccgtgggcggcgcccccgcggccggcgggatggcgagggacgccgccgacgccgagaacgacagccgctccgggagcgaccacctggacgccatgtccgccggcgccggcgccgaggacgaggacgacgctgagccgggcaacccgcgcaagcgcaagaagcgctaccaccgccacacgccgcagcagatccaggagctcgaagcgctgttcaaggagtgccctcacccggacgagaagcagcgcggcgagctcagcaagaggctcggcctcgacccgcgccaggtcaagttctggttccagaaccgccgcacgcagatgaagagacggtggtctgatatgttctcgtgcatgattgctaaggccacagtcctagaggaggtgacatctggcattgcaggaagtaggaatggtgcgctgctgctgatgaaggctgagctacaggtgctctcacctctagtgcccatcagggaggtcacatttctcaggttttgcaagcagctggctgagggtgcatgggcagtagtggatgtgtccattgacggattggtgagagatcacaactctggaacagcatccaacgccggaaatatacggtgcaggaggttgccttctggctgtgtgatgcaggacactcccaatggctactgcaaggtcacatgggtagagtatacggaatacgacgaggcgtcagtacaccagctctatagaccactcatccggtccgggctggcctttggggccaggcggtggcttgcaatgctgcagcgccagtgcgaatgcctggccatactcatgtcccctgatacagtttcagctaatgactcgtcagtcataacacaggagggcaagcgaagcatgctgaagctggcacggcggatgacggagaacttctgcgccggggtcagcgcgtcatctgcacgtgaatggagtaagctggacggcgctgcaggcagcatcggggaggatgtgcgggtcatggcacggaaaagcgtggacgagcctggggagccgccgggcgtggtcctaagcgcagccacatcggtgtgggtgcccgtggctccggagaagctcttcaacttcctccgtgacgagcagctgcgtgcggagtgggacatcctcagcaacggaggcccgatgcaggagatggccaacatcgccaaggggcaggagcacgggaactcggtgtccctcctcagagccagccatgagtgccaaccagagcagcatgctgatcctccaggagacttgcactgatgcatcaggctcgatggtcgtgtatgctccagtggacatcccggcgatgcagctcgtcatgaacggcggggactccacctacgttgctctgctgccgtctgggttcgccatcctgcctgatggcccaagcagtgtcggcgccgagcacaagacaggcggctcgctgctcaccgtcgccttccagatcctcgtcaacagccagccgaccgccaaactcaccgtggagtcagtagagaccgtgaacaacctcatattctgcaccatcaagaagatcaagacagcgctgcagtgtgacgcttgactgtcgcgtgtcgccgcagggggggtggtcggtgatgacgagcctgagtcaagaacgaacctcgtgcgggaaagaaacctttgctaggtgataaggatccagcttggacgggtctttagcacggagcaatggtggtggttcgggtattgactcggtctctgtcatctgcttcttctccatggaccatggcaacctgttgtctgatacgggatcttgaatagtgcgtggacaatgatgtggttagatggttaaaatcttttgtttcagtcccatcgtttcatcagggaatcaaactttgagttttggccgcctcgttgttagttgtaatatacagttcattttatattgtgaggtaagctatatgccatgtgtaaacatgagagctcaggaatgttgggtagcatcatgagtgtagctaggcatcgaactatcggccaataaaatgtctgatcgataaagtggtatagttgtttacctggaaatgcttatttagctacgtgatgggccata

SEQ ID NO: 29601 - DNA, 593 bp, Zea Mays
gctggatggatcgacgattcgttcgtcgctcgtctgagttctacgccgcccctgcgcaacttcctagcgctcatctccttaagatgggcgagctctcccctggcttcgaacagcgccttcttcaagtcgccacagctcaagacgcggaccaccaccacggacatgcagtgccatgtcggccgcgctatggacggacgtgtggagcaggcgccatcggagcttgagcgacagcggcgatgcgtccgagcatgtcgagtccataggtaatgcgacgcgacctgagcactgttgccttcctcttaccataaaatataactagataggtgtccatgtgttgcgacgtaacacaaattgacgagcttaggaccctgacgacgaatgacgagagtacaatggtgatgggaacctcatgaataacagtgccatgttgtacaagagcgtgagcctgagcacgccaccactcaacgccatgagttcatcgtcctattgtggggctgccattgccacgagctccatatttaaaatgggttgttcagatcatagtaactaaaacaatggtgtgccaagtcttttgctgctacgctcaaagactc

SEQ ID NO: 29602 - DNA, 721 bp, Zea Mays
cttcttcatctgcaagccatgtttaattataaaatggacctgagatgctattttacatgtttacatgttctcaaattgctactgttcattgctgcaataattatatatggcatttatctgagttatatgcttgttttgttcggaattagaatattaaatctatttaaatatgtagaaagcatgtcacttatttctctaaatttacaacagcgccttcttcaagtcgccacagctcaagacgcggaccaccaccacggacatgcagtgccatgtcggccgcgctatggacggacgtgtggagcaggcgccatcggagcttgagcgacagcggcgatgcgtccgagcatgtcgagtccataggtaatgcgacgcgacctgagcactgttgccttcctcttaccataaaatataactagataggtgtccatgtgttgcgacgtaacacaaattgacgagcttaggaccctgacgacgaatgacgagagtacaatggtgatgggaacctcatgaataacagtgccatgttgtacaagagcgtgagcctgagcacgccaccactcaacgccatgagttcatcgtcctattgtggggctgccattgccacgagctccatatttaaaatgggttgttcagatcatagtaactaaaacaatggtgtgccaagtcttttgctgctacgctcaaagactcagacaatattgacaaatcatatatccttatt

SEQ ID NO: 29603 - DNA, 3772 bp, Zea Mays
gaaccgtgcagtccaatggaagaaaatcaattgattgaaaagaaggtaccaagtaagtgaaccggctagtattgttaaggcaagagaagggaccagcagtgctggccgcctggccggactacttggcatgaacttacttaggtcttgttcgtttgtgccggattggtgggtcggaacgattcctaaccggattgcttctctaatttatataaactttgattaggtggaacgattccaggtgcaatccaacacaaacgaacaaggccttaggcttgttcggttagggctgaatcgagggggattaaatcccttcttatccatccctaaccgaacaagcccttagaactggtttggtgaccagatccttctcaattccttagtcatcaaaacagctctaatattgcctcatccccgtaaggtctatatacatcggttgatagattggtggagatgatcttctgaaaagagcactttggattctgcaattgagagacaatgattatagtattgatgctatacccaatggaattacctttcagtagccaatatttgggtgaaccaggtgtcccacatgatagagggctggttacaaggtggaatggaaatcggatctctggtcctccttcgctgcaactggatgctgggcacttctggaagaagcttttatcactgcttgctgtggtcatcgtgattccatagttgagaaatgagagcaccaaagctacagcaaacaaattagacagttgcgtggcagaagaatggcagcaggcaaagcaaggttgcgtctacaagatttaaaaccttgttggaatcaatgaccaccaattatttgtcgtgatggccccataaccgtggtggaagatttctagctttgcggcttggtgatttggactttctgggatgtttcttgtatagtcctgcaatatagtcatccttttccacactacagccattgaccgcaaacggattagtcaataacatatacttatttgaaaagacagccatgttaaacagattaggaagccaattgaaagctggagctttggtgagctgcaaaaggactcatcccaaagcatccgctggccaactcatataactacgacttgcctcagcaacatgagttccttacatctgggcatgagaaaaagaaaaaaaaactcattgagaactgagatgagcagaggttgaagcatgtttgcaacgaatgaaggtagaaggcaaagatacgaagatatgcctgcaaaaggatctataagtggaagttcatgtcagctttactaacagataggatccgaggcttgagtgcttgacttctcttcctcttccctcctcattaaccatggtttccacaattatgacaaacactggagtgatagccactcaagggcaagccttctgtccttcttcctcctgtgggcatcttcaagacatccgatctcctttccgtatgcaaggtgacccacaaggttgtggtttcccagaatacgagctggtttgtattgatagcaaggctataattcacatcaataatggacgatactttgtgactagcatctcctatagcaactctactttctgggtcgttgatgctaatttagataacagcagctgccccattcctgcgagcaaccaacgtccctatgtaaatggtttgccatccgaaggtcgcaccctgctggatcctgacacagtaacttgggcggcctttgtgagttgttcagagatgctaagtgacgtttcttccccgttcctcagttgctgtagtggtatttaccagcctgtcaactgccgaagtacgaagaattcttttgcttatgtcttcactaccacattctttcctatggttggagacatcaagccgtcatgtagatacttgtccatgattccttttggaagtcggcatgtcaagcgaccagataatgcaagctatgatgatattgtaaagtttatgaagaatggctttgctgtaaattttccttatcgcaatggacggtcgtatcatttggtcatcaacacatgcttgaaagatgcaaatggttacttcaacgataaaatatctaactcaagcattgtggaccagacattggctgcggtttttgggatcgaccttcgtttcttaagatgtgtaaatgattactcgtacagaagtaaattgttttgggctatggtcgccatgatatctactgtagtcattgtgaagttcgtgatagtatttggaatactatcgaggtttgtgtttgcaccattaactgtactgaccttcctcgcctacaagtactggaaaacaaggatatccattgacgcagtcgagaagtttctccagatgcaacaagctcttagcccagcaaggtatgcctacactgacatcaccgcaatcacaggacacttcagagagaagctgggccaaggaggctacggatccgtgtacagaggcgtgcttccaggtgacgtcagcgttgctgtcaaaatgctgagcaactcgctgtgcaacggagatgaattcatcagcgaagtgtccaccatcggaagcatccaccatgtcaacgtggtgcgtctggtggggttctgttcggaagaaaccaagagggcgctcatctacgagtacatgcctcgtggatctctcgataagcacatcttctcttccgagcaaagcttttcgtgggataagctcaatggaatagctttaggcatcgccagagggatcaactacttgcaccaaggctgtgagatgcagattctgcactttgacatcaaaccacacaacatccttttggacaacagcttcactcctaaagttgccgactttgggctagccaagctgtacccaagggacaacagctttgtgccggtgagtgccgcgcggggaaccattgggtacatagctccggagatgatctcccgtaatttcggcgtcgtttcgtgcaagtcagacgtctacagcttcgggatgctgttgctggagatggctggtggacggaggaacctagaccagcatgcagagaggagaagccagacgtactacccagcttgggtgtatagccatctaactcggcaggaggtgggcgagatctgcgaagctttcgatgtccacgaggtggagaggaagctgtgcgttgttgggctatggtgcattcagatgaagccacatgatcggccaacgatggctgaggtcgttgggatgcttgaagctggcgctgacggtctgcagatacctccccagccattcttctgtgggggtgagcttactggtagcacttcgtatttctcctcggagttgagcgcaatctcggagaatggatgaggttactggttccacaagatgaactgccaatgtgctacaagtagctagaatctgaaaaaaaatctgttgtacttggacgatgctcaatatttagtcggttgcagtgcactgtaattcgattctatgctgtaatgcgtctgcatcaggcaccagcagcttcttggatcaaagggatgagcatgtactcgtatgatgaattaaaaaatttggtggatttcatatggataatccgtgttgctcgtacacgagttcatcttttgttcttaacacattcattgataccagcaactatttgatcacgacaatttgcggatggtataagtggccatcgttgggggaccagttagccgcgtttcgagatttttttttttggtttttttttctgccaacgcactactccagtccactttgactaccagcacccattcgtcttgtcaaagccaaccattgttgaccaagcatgttcaggaa

SEQ ID NO: 29604 - DNA, 2178 bp, Zea Mays
ccccgacgtcccctaatccccgggacccctccccattcctctcctcttctctccctcgcccctccctccccaaaaccctaacccatcgtcgaccggtccccgctctcgtggcgccggcaagatgaccctcctcgcagccatcaccaaccccgccgccgactcccgctccggctccagcgagagggctcaccctatcgtgctcacgccgggtgtcacgccgccgccgccgccatcctccacgctccccaccccaataccgtcttccacctggtcgctctccccagccgaccccaccctcgccaccgccgcttcctacctcgcggcctcgcttgcctcctgctcctccctcccgcagctccgcgcccttctcaccacctttatcaccactctgtcacgatccctcgcactcccaaccccgccggcggccctccccgccgccatccgcgctgtcgccccttacttccccgccgcaatcgcctcccttgtggcctccaaggcggtaagcctcgccgggcacgacatcctccttgctctcgcggaatcccgcctcctcccgcacccgccaccggaactcatctcgtcgctctgcgacaacgactgggtcgaccttgtctgcgtcttgctccgccaggccgccgacatacgttcctccgagatcctcgccgcgctccgttgcttcctctcgccggcctccgataaggcttacgacgccatgatggacgtcaagtgccgatggaaggacgccgcggtgcttgctgtcaacaggtgtcgggagaagagcgccgtgaagaggaagaaagttgacgctgcggcgaggctcgcggcgctgctgctcatgatggggcacgatgggttcacctccccagaggtgtgtctgcattacctatttgcatcagggaatgtggattccgtggtgcttggagcggctctggctgaacttgatggcggggaggtagtcaggttgatgagatatctcaacaagtggattcggaagtactggagcttctcggaagcgcacacttgcccggaggctgtggaaaacctcagattggagcagtgtgacagcgtgccatcgtttggagcagtggctagggcgctaggagtgctgctggataatcatttttcacatcttgtgttgaatgctgatgtgagggaggacttgagggctgcggacttgatggtgagggagctcgctgccgaagcagagtcttctgggccaatcctagacttgctgcataggtttcaactggataagtgagaggttgatcttattctgtcgaaactatttacttttttgtacttccaaagccgatgcatggaaacttttaactgttttattgcattgcagtgatgagatacgtgttgcagcattgaatattgaagaactttgcaaattgtgatatgcttgtttagttgttgtgaaattctaacgtctatctatgatccaaccatccagatccaaacaagtctggtatcaactagcctcttggattttgtaggaaataatgagtggccttaaatatgaactggtctgaggcccaagcaaaaatcctgcattcagctgctatctcactatggctgttttcttctaaagtccttcgacatgcatgttccttcctcctgaggtttaaacagttctgccaaggattggcaagtgattgggatatgatcaacagactaaggaagcatggattcccaaaaaaaagataaccaaccaaatgggcctgattttctagtagctatagagctaaagtgtgaaactttggcaagagagatgggtctcagatatcccatgccactaggagtaccatttgcaggagcagtcgagcggtccaaattcctatcggatgctcttctactttcttttattgggccttcgtatgaaggggtaatattcgaactaacaaaagattggttatgtacaacagcattatttcaagaagcattattaatattattattattcaactggttgcagaagtgcgttgagttttctacacacttaatattaccagaaatagtttgaaacatgtttcgagaatagcgtatttgaacaggcacagaccatagtcccatgcatgagctagttcgtcagcaacattcatttttaccttgaaatgttgctctggtgtttagaaacaaaacaaaacaaaaaagaaaaagaacggtagatgcttg

SEQ ID NO: 29605 - DNA, 1940 bp, Zea Mays
ccccgacgtcccctaatccccgggacccctccccattcctctcctcttctctccctcgcccctccctccccaaaaccctaacccatcgtcgaccggtccccgctctcgtggcgccggcaagatgaccctcctcgcagccatcaccaaccccgccgccgactcccgctccggctccagcgagagggctcaccctatcgtgctcacgccgggtgtcacgccgccgccgccgccatcctccacgctccccaccccaataccgtcttccacctggtcgctctccccagccgaccccaccctcgccaccgccgcttcctacctcgcggcctcgcttgcctcctgctcctccctcccgcagctccgcgcccttctcaccacctttatcaccactctgtcacgatccctcgcactcccaaccccgccggcggccctccccgccgccatccgcgctgtcgccccttacttccccgccgcaatcgcctcccttgtggcctccaaggcggtaagcctcgccgggcacgacatcctccttgctctcgcggaatcccgcctcctcccgcacccgccaccggaactcatctcgtcgctctgcgacaacgactgggtcgaccttgtctgcgtcttgctccgccaggccgccgacatacgttcctccgagatcctcgccgcgctccgttgcttcctctcgccggcctccgataaggcttacgacgccatgatggacgtcaagtgccgatggaaggacgccgcggtgcttgctgtcaacaggtgtcgggagaagagcgccgtgaagaggaagaaagttgacgctgcggcgaggctcgcggcgctgctgctcatgatggggcacgatgggttcacctccccagaggtgtgtctgcattacctatttgcatcagggaatgtggattccgtggtgcttggagcggctctggctgaacttgatggcggggaggtagtcaggttgatgagatatctcaacaagtggattcggaagtactggagcttctcggaagcgcacacttgcccggaggctgtggaaaacctcagattggagcagtgtgacagcgtgccatcgtttggagcagtggctagggcgctaggagtgctgctggataatcatttttcacatcttgtgttgaatgctgatgtgagggaggacttgagggctgcggacttgatggtgagggagctcgctgccgaagcagagtcttctgggccaatcctagacttgctgcataggtttcaactggataagtgagaggaaataatgagtggccttaaatatgaactggtctgaggcccaagcaaaaatcctgcattcagctgctatctcactatggctgttttcttctaaagtccttcgacatgcatgttccttcctcctgaggtttaaacagttctgccaaggattggcaagtgattgggatatgatcaacagactaaggaagcatggattcccaaaaaaaagataaccaaccaaatgggcctgattttctagtagctatagagctaaagtgtgaaactttggcaagagagatgggtctcagatatcccatgccactaggagtaccatttgcaggagcagtcgagcggtccaaattcctatcggatgctcttctactttcttttattgggccttcgtatgaaggggtaatattcgaactaacaaaagattggttatgtacaacagcattatttcaagaagcattattaatattattattattcaactggttgcagaagtgcgttgagttttctacacacttaatattaccagaaatagtttgaaacatgtttcgagaatagcgtatttgaacaggcacagaccatagtcccatgcatgagctagttcgtcagcaacattcatttttaccttgaaatgttgctctggtgtttagaaacaaaacaaaacaaaaaagaaaaagaacggtagatgcttg

SEQ ID NO: 29606 - DNA, 460 bp, Zea Mays
gccgtggcaccgcgcaagcgtccgacgtcaagaaccccggatcctgcgggaacaccgccaccgacgacgctggcggcatctttttcgcttcgctcgtcgatgctttttcgttagacggtggtaagtggcgatgaggctgtactgtgtgtgccagtgccagccacaggcgtagcgtggagatgaagatgacgtccttggatccggcgtatcaatggctaaatagtctggacacgcgaaagccgacggggacacgtttgtgtccgtccgatgccgatccgagggccgtcggtggcgccggtgccgctcccccggcctccgatccgatcccacctcccatccctgagaggctgagaccgagtgacggctgttgatgaaacctgtgtgagaacgaatatgctcacaatcaggaagctttagatgaatgatgatctgagatgagatggagtgtcggtgccccgtc

SEQ ID NO: 29607 - DNA, 1851 bp, Zea Mays
gcggcaccacgctcagccccagcagcttctcccgtgcgccgtcttgttttgcttcgcattgccggctttcttgcctccagcagcgaacgcactgccatccttgcttggcctcacatcctccgcagctgggcgtcaccaggacgctatgcacgctgctcccgcatctggagctcgcccaccctactcgctcatcgtctgaccatgcgcactcgctgtcggtcgcgctcggctgctcgtcgttgtcctgcctcctcgtccacgccgcagtcgtcatcgaccctctccaacctcgtctgcgttgcgacctccatcctgcctgctcgcgttttccccctctgctcaaacgtcggcgcccgtggtgaagaacacctagaagaagtgatgtttgaacaagaagtctactccagtgcctgttcatcaagtggatggagccatctaactgatcatcgtgttagaagtatctagaacctcttctctgcaacaaaggcaagccccggtgcatttgccccttccttatgttttaaatgctttttcaccttatctgatgcattaggtgataggagttgtgtgatgaaaaattgatgcattaccattccttggaaactccttaatccctgttttataaagagaactgatattgcttagccctgcttaaaaactgaaaaatcatttgttttcaaaaagaatgattgtggaacattggttatgggctttttattcaaaaatcaaaggaaactaaggtgatgactccacttcggccggagtgggctcatcattggaaaagagtacccctgccgggtaccaaaaatggggaaatgattaataaatctagaccaggcgctgagcagacagagtcgcccgtctgtgtcgattaaggaccgtaccgttgactggcctattgtggttgagactttgcaactagccacataccctggtatgggacagggtaagcttgaacccggctattccatacgtgaagagacaatcgcgcactgggagtggagagatggcgggagtagcatgtaccctcctggcacagcgcacgcctggtaggtaatgtgctctcgggtggcgcggacctattcatgtagtggaggactccatgggaacggttgacatatgcaagggttaagtgctacatatgtcgtgtggttagagatccccagctgggtataatcggttcgaatcatcgttgctcctcggttatggagactcatcccggtgaccatcatcgtagttagcaagtgaaatatgagaatgaataaaatgcagctagtataggccaagtgcttgaaatagactaggcaaatatagatgcaggtaataacctaactagtgaaataaaacttggtttaaggatcaactggtagcaagcttttctgcaaaaggagtctttgatcattgataaaccttaccttgattcccaatcaactagcatacccttgagagtcttttctttagtcgggtaagtcttgctgagtaattgcgtactcagggttttatcccctgttgtttttgcaggagaagttttattcccttatcttttggttagttacttcatgtggaggccttgaagcttagaatgtttatgtgtatctcttatggaaaggcttcaccgttccaattattgtaataagttatgcactttgggtactatcaggacttgtaataaatacatctctttctaccttgtaaaacttgagttctggaatgtaaagtgtactttgtaaaagccttccgctctatctccaatgtgtgtgtatcaaatgtgattactgtaatatacctgttgtgtgggagatccttgggatgatgagttccagttggcgaactcgatagccttgttaagtt

SEQ ID NO: 29608 - DNA, 2138 bp, Zea Mays
cggacagtgtccggtggcgcaccggactgtccggtgcgcccgtcgacagtagcctccaccaacggtcaagttttgtggttggggctataaataccccaaccacccccacattcaagtcatccaagttttcccacttctacaccttacaagagctatagcattcaatacaagacacaccaaagtgatcaaatcctctcctaattccacacaaagctttagtgattagtgagagagatttgttgtgttcatttgagctcttgcgcttggattgcttctttttctcattctttcttgcgatcatctcaattgtaatcaaggcaagagacaccaagtgtgtggtggtccttgcgggaagtttggttcccgtttgattgagaagagaagctcactcggtccgagggaccgtttgagagagggaaagggttgaaagagacccggtctttgtgaccacctcaacggggagtaggtttgcaagaatcgaacctcggtaaaacaaatccttgtgtcacactctttatttgctcgcgatttgttttacaccctctctctcagactcgttcttatttctaacgttaacccggcttgtagttgtgattaagtttgtaaatttcagattcaccctattcacccccctctaggcgactttcaggaccgacattgactctgtttatgccaactacaaagggaactgacggaggagaccatccctcgaagatcaaagaaatttcatctgaggaagaagtggagagcccatgaattttgggtcttggaggcgctgccttcagaggctcaacatcctccgaagaagaatagaagaagactgttgaaggaggcgagtcttcagggcatgaaaaggcgaaaagagagctaaaagggtcgagccctattcttgagaaagatgcagccaaagctactcagactacgggtgaagaggtagaagatcttggttttttcgtgagtcatcttggtgggggcgaacttgatgacaaagaagcttcggaaatagaaagcaaaggagaagctatggggtatgggcctagggcttcggggaggagatcaaatgctgatgtgcgtacccgatcctgatgaatcaaagattgtgagaaatatcactcgaagcattggctttctagaagttgaagaatggttgagtcaagttaaaaagagaaaactttctcatagtttggcttatactagcattaaggggttaatgttgagcaaagctctgagaattcagcaagaaaaataagatgatgagctaacaaagctacaatacgaagctggaacactccgaacttctttgcaagaaaaggagagttggattgcatctttaaaagaaaaattagtcgaagctgatgaagtaaaaaagacaagcgacaatgaagataaaagaacatgagcattctattgaagaactttgtatcagacttaaggcgacaaaatggaatactgatgacaaagtcgaagaaaataaaaaattattagagactctaaactagcttcggggtaattgctttgatcttgtgtgctggtgctatgatactatgaagaaaatcttttccccagttggtgcaaccttgagggatagctcctttgccaatggtgacaccgaaggggcacttgattggattaaaaacgaattgagtgaagttgaaaacattatcaacacccgaagcgattattgtgccatgattggatctagtggcatggccccttttcttgagaaagctggttgtgaacatgttaaggacatggggaaaatgactttggcatgaccgtagaggatatcaagactccctcgaagagtgtgcttggtatcgctaaaagatttttctttgaactgtgggataaaggtggccaataatttgtcgctttggaggctgaagaatatataagaaagagcaaagaagcgaaaaagaagaagaaggggaagaagtaaaggaaggctgaagcttagtttgattattaggtcaaggagactttgtattttggagatgaatatttatgtaattaaaccacttgttgctgtatatgacactatgctcttactttttctttaattctaagcgctttgttgcgtgtgaaatcaaatgtcgctggtattttgaaccgaaggcgaaaaacaccttccctttttt

SEQ ID NO: 29609 - DNA, 2532 bp, Zea Mays
ctcggaatgtgctggctcccaacagccgcgaagcgattctcccctcaccctcgaccacgagccgcctatataaccatctccatggctccccctcccaacccccaccagagctagcggcatcactgtcatcgagctcgaccgacgaccgtcgatcggtacccgtcgtcgtcgcggcgtcgtcgacgacggcataataatataataaccaggccagggcagggaagatggtgaagttctccaagcagtttgaggggcagcttgtccccgagtggaagcatgccttcctggactactgcctgctcaaaaaggatctcaagaggatgcagcacgcccggcaccatgctgctgccgaccgtcgccaagcagcaggcctaaccgacacgcaagaaactgccgccggccaccacgcggaacgggcctctctctctctgtcccagtggctcctggacaggctccccgctggcctcttcggctccaatgctcccaacagggatcgtcatggggtcatacacgtgcaccgccgcaagctggcggggtcggcgagcagaggcggcggcggcgacgtgtacgagacggagctgctggagccgttggccgacgacgacggcgacgcggccgcggcgcgggagttcttcgcgcgcctggacgcgcagctcaacaaggtgaaccagttctacaggggcaaggagcaggagttcctggagcggggccggtccctgcggcggcagatggacatactcgccgacctcagggcggccagggccagggaggacccctccgtcgcctccgcttccgccgcctccgaggatgagtacacaaggtatgcgatgacgtcagcatcagacacggacgcgctgcagctgagcgagcaagaagaacaagccacgccgctgccgaccgacggccccggcgtcacggctcaggaggaccaccagcagcagcaggatctagaaggctccggaaccttcgcggtgaggccgcccttgagcgggtgcgggaggaagagcctgaagatcaccatcccactgaccaccccctccaggacgatctccgcgctgacggacatcctgtgggacgagctcgccatcagccacttctcctcctcctccaagaaatgcatcccggacgggaagcagagcgtcagcaagaccaagctccggcacgcggagaagatgatcaagcgcgccttcgtcgagctctacaaggggctgggctacctcgccacctaccggagcctgaacatgatggcattcgtgaagattctgaagaagttcgagaagatcaccgggaaggaggtcctgtccatatatctcaaggtggtcgagacctcctacttcaacagctctgatgaggcgctgaagctgatggacgaggtcgaggacatcttcgtccggcacttcgccggcgacaaccggcgcaaggccatgaagtacctgaggcccgcgcagcgcagggactcgcacgccgccaccttcttcacggggctcatggccggctgcttcgccgcgctgttcgtgggctactgcgtcatggcgcacatggcggggatgtactactactactccaccccggcgccgccttctcgcgcccgcggtaccggcggcggctcggtatctgtgtcggtgtcggtgtccgtgtacatggagaccgcgtacccggtgctgagcatgttcgcgctgctgttcctgcacctgctcctctacgggtgcaacatggtggcgtggcgcaggtgccgcgtcaactacggcttcatcttcgagtcgtcgccgtcgcccgccggcggggagctcgggccccgggacgtgttcctcgtctgcgccgcgtccatggccgccgtcgccggcgtcatgttcgcgcacctcgccctcgtgctcaggtggggctaccacgcgtcgccgcacgtggaagccatccccgcgttcttgctcctggtgttcctgctgctgctgttctgcccgatcaacgtcgtgtaccggtccagtcggtttcagttcctcaggatactgaggaacattgtactgtcaccgctctacaaggttgtaatggtagacttcttcatggccgatcagctttgcagccaggtgcctatgctacggagcctggagtacctggcgtgctattacatcagtgggagctactggacgcaggagtacggctactgcaccaacaccaagcacatcagagacctggcctacgccgtctccttcctgccgtactactggagagccatgcagtgcgcacggaggtggttcgacgagggggacacgagccacctggtgaacctgggcaagtacgtctccgccatgctcgccgccggcgccaaagtggcgtacgagaaggacaggagcctggcgtcgctgtcgctcctcgtcgccgtgtccagcggcgcgacggtgtaccagctgtactgggacttcgtcaaggactggggcctgctccagcccaactccaagaacccctggctcaggaacgacctcatcctcaggaggaaatccatatactacctgtcaatgatggacgagcatgctattt

SEQ ID NO: 29610 - DNA, 3894 bp, Zea Mays
ctcggaatgtgctggctcccaacagccgcgaagcgattctcccctcaccctcgaccacgagccgcctatataaccatctccatggctccccctcccaacccccaccagagctagcggcatcactgtcatcgagctcgaccgacgaccgtcgatcggtacccgtcgtcgtcgcggcgtcgtcgacgacggcataataatataataaccaggccagggcagggaagatggtgaagttctccaagcagtttgaggggcagcttgtccccgagtggaagcatgccttcctggactactgcctgctcaaaaaggatctcaagaggatgcagcacgcccggcaccatgctgctgccgaccgtcgccaagcagcaggcctaaccgacacgcaagaaactgccgccggccaccacgcggaacgggcctctctctctctgtcccagtggctcctggacaggctccccgctggcctcttcggctccaatgctcccaacagggatcgtcatggggtcatacacgtgcaccgccgcaagctggcggggtcggcgagcagaggcggcggcggcgacgtgtacgagacggagctgctggagccgttggccgacgacgacggcgacgcggccgcggcgcgggagttcttcgcgcgcctggacgcgcagctcaacaaggtgaaccagttctacaggggcaaggagcaggagttcctggagcggggccggtccctgcggcggcagatggacatactcgccgacctcagggcggccagggccagggaggacccctccgtcgcctccgcttccgccgcctccgaggatgagtacacaaggtatgcgatgacgtcagcatcagacacggacgcgctgcagctgagcgagcaagaagaacaagccacgccgctgccgaccgacggccccggcgtcacggctcaggaggaccaccagcagcagcaggatctagaaggctccggaaccttcgcggtgaggccgcccttgagcgggtgcgggaggaagagcctgaagatcaccatcccactgaccaccccctccaggacgatctccgcgctgacggacatcctgtgggacgagctcgccatcagccacttctcctcctcctccaagaaatgcatcccggacgggaagcagagcgtcagcaagaccaagctccggcacgcggagaagatgatcaagcgcgccttcgtcgagctctacaaggggctgggctacctcgccacctaccggagcctgaacatgatggcattcgtgaagattctgaagaagttcgagaagatcaccgggaaggaggtcctgtccatatatctcaaggtggtcgagacctcctacttcaacagctctgatgaggcgctgaagctgatggacgaggtcgaggacatcttcgtccggcacttcgccggcgacaaccggcgcaaggccatgaagtacctgaggcccgcgcagcgcagggactcgcacgccgccaccttcttcacggggctcatggccggctgcttcgccgcgctgttcgtgggctactgcgtcatggcgcacatggcggggatgtactactactactccaccccggcgccgccttctcgcgcccgcggtaccggcggcggctcggtatctgtgtcggtgtcggtgtccgtgtacatggagaccgcgtacccggtgctgagcatgttcgcgctgctgttcctgcacctgctcctctacgggtgcaacatggtggcgtggcgcaggtgccgcgtcaactacggcttcatcttcgagtcgtcgccgtcgcccgccggcggggagctcgggccccgggacgtgttcctcgtctgcgccgcgtccatggccgccgtcgccggcgtcatgttcgcgcacctcgccctcgtgctcaggtggggctaccacgcgtcgccgcacgtggaagccatccccgcgttcttgctcctgtcggtttcagttcctcaggatactgaggaacattgtactgtcaccgctctacaaggttgtaatggtagacttcttcatggccgatcagctttgcagccaggtgcctatgctacggagcctggagtacctggcgtgctattacatcagtgggagctactggacgcaggagtacggctactgcaccaacaccaagcacatcagagacctggcctacgccgtctccttcctgccgtactactggagagccatgcagtgcgcacggaggtggttcgacgagggggacacgagccacctggtgaacctgggcaagtacgtctccgccatgctcgccgccggcgccaaagtggcgtacgagaaggacaggagcctggcgtcgctgtcgctcctcgtcgccgtgtccagcggcgcgacggtgtaccagctgtactgggacttcgtcaaggactggggcctgctccagcccaactccaagaacccctggctcaggaacgacctcatcctcaggaggaaatccatatactacctgtcaatgggactgaaccttgtgctgaggctcgcttggctgcagaccatcatccatccaaattttgggagcttggattctagggtcacttccttcttcctagcggccctcgaggtgatccggcgagggcattggaacttctataggctggagaatgagcatctgaacaacgctggcaagttccgtgcggtgaagacggttccactgccttttcatgaagtggacgacgactaaatgcacatctactgaaccatctgaccgtcactgctactgctagatcgaacagctttgttccttcaacactctgctgaaattttttttgaactcaagacgtggagaattgttcagatccttagctgttcgcctgttcttgcgtgtaattcgttccttcagggagtggcgtctctatgtaaccgaagatgcttgaatcatttgttcgttcctagatgcgtcaaggtgtaaataagaggcatcgcaatcgcatttcgcagtagtttgtgtgagcaagtggtggtgagtcgggtattaccacatcggctgacggtgcagggccggacacgtcctccagatcagccggcgacggcgcggcgggagctggcgggctcagcggctgcggcgcttccgcgggcgcctccttcttgccgtgctgcttcctcctcctcttgtgcttgttcttgcccttggacggcgcctcggcgggcggcagctccgcgggggcctcggccacgggcgggggcgtcgtcgcgggaggcagcgacgcgggcgcctcggccggaggcgtcgccgtcggcggaggcgccgcggcgggcggcagcacggcgggtgggagcaccgcgggcggcgtcgcgggtggaggcgtcgcgggaggaggtgtcactggtggcggcgtcaccggcgggggtttggccggcgcgaccgcgggcgcgaccggcggcggcttcgctggcgcgactggggtggcggtgggcgctggcgttgtcggagccggcggcgggtttgctggcgcgaccggggtggcggcaggggtcgtcggtgcagccggagtcgtgggtgcgataggtgtcgtcggtgcagccggagtcgtgggtgcggccggggtcgtgggtgcggccggagtcgttggtgcggcaggggtcgtgggtgtagccggagtcgtgggtgcggcaggggtcgtgggtgcggccggagtcgttggtgcggcaggggtcgtgggtgtagttggcggcgactgcgccacggcggcgatgaggtggagcccgaggagggcgccgagcacggcgaggctgcgccattgccgaagcagcggcgcggccatgcttccggcggtggtggtctgcttggagaggaggcgcgcggatgctgagccctgagctcgccggtgagaatgcgagtgatggatctcggggcgatgagtagcgtagcacgcgagcagagtatata

SEQ ID NO: 29611 - DNA, 3352 bp, Zea Mays
ggcgcgggagttcttcgcgcgcctggacgcgcagctcaacaaggtgaaccagttctacaggggcaaggagcaggagttcctggagcggggccggtccctgcggcggcagatggacatactcgccgacctcagggcggccagggccagggaggacccctccgtcgcctccgcttccgccgcctccgaggatgagtacacaaggtatgcgatgacgtcagcatcagacacggacgcgctgcagctgagcgagcaagaagaacaagccacgccgctgccgaccgacggccccggcgtcacggctcaggaggaccaccagcagcagcaggatctagaaggctccggaaccttcgcggtgaggccgcccttgagcgggtgcgggaggaagagcctgaagatcaccatcccactgaccaccccctccaggacgatctccgcgctgacggacatcctgtgggacgagctcgccatcagccacttctcctcctcctccaagaaatgcatcccggacgggaagcagagcgtcagcaagaccaagctccggcacgcggagaagatgatcaagcgcgccttcgtcgagctctacaaggggctgggctacctcgccacctaccggagcctgaacatgatggcattcgtgaagattctgaagaagttcgagaagatcaccgggaaggaggtcctgtccatatatctcaagcactgaagctgacgacgctgctcttccgtccgattcgctgcgccgcgccgcgctgcactgcaggcgctgaagctgatggacgaggtcgaggacatcttcgtccggcacttcgccggcgacaaccggcgcaaggccatgaagtacctgaggcccgcgcagcgcagggactcgcacgccgccaccttcttcacggggctcatggccggctgcttcgccgcgctgttcgtgggctactgcgtcatggcgcacatggcggggatgtactactactactccaccccggcgccgccttctcgcgcccgcggtaccggcggcggctcggtatctgtgtcggtgtcggtgtccgtgtacatggagaccgcgtacccggtgctgagcatgttcgcgctgctgttcctgcacctgctcctctacgggtgcaacatggtggcgtggcgcaggtgccgcgtcaactacggcttcatcttcgagtcgtcgccgtcgcccgccggcggggagctcgggccccgggacgtgttcctcgtctgcgccgcgtccatggccgccgtcgccggcgtcatgttcgcgcacctcgccctcgtgctcaggtggggctaccacgcgtcgccgcacgtggaagccatccccgcgttcttgctcctggtgttcctgctgctgctgttctgcccgatcaacgtcgtgtaccggtccagtcggtttcagttcctcaggatactgaggaacattgtactgtcaccgctctacaaggttgtaatggtagacttcttcatggccgatcagctttgcagccaggtgcctatgctacggagcctggagtacctggcgtgctattacatcagtgggagctactggacgcaggagtacggctactgcaccaacaccaagcacatcagagacctggcctacgccgtctccttcctgccgtactactggagagccatgcagtgcgcacggaggtggttcgacgagggggacacgagccacctggtgaacctgggcaagtacgtctccgccatgctcgccgccggcgccaaagtggcgtacgagaaggacaggagcctggcgtcgctgtcgctcctcgtcgccgtgtccagcggcgcgacggtgtaccagctgtactgggacttcgtcaaggactggggcctgctccagcccaactccaagaacccctggctcaggaacgacctcatcctcaggaggaaatccatatactacctgtcaatgggactgaaccttgtgctgaggctcgcttggctgcagaccatcatccatccaaattttgggagcttggattctagggtcacttccttcttcctagcggccctcgaggtgatccggcgagggcattggaacttctataggctggagaatgagcatctgaacaacgctggcaagttccgtgcggtgaagacggttccactgccttttcatgaagtggacgacgactaaatgcacatctactgaaccatctgaccgtcactgctactgctagatcgaacagctttgttccttcaacactctgctgaaattttttttgaactcaagacgtggagaattgttcagatccttagctgttcgcctgttcttgcgtgtaattcgttccttcagggagtggcgtctctatgtaaccgaagatgcttgaatcatttgttcgttcctagatgcgtcaaggtgtaaataagaggcatcgcaatcgcatttcgcagtagtttgtgtgagcaagtggtggtgagtcgggtattaccacatcggctgacggtgcagggccggacacgtcctccagatcagccggcgacggcgcggcgggagctggcgggctcagcggctgcggcgcttccgcgggcgcctccttcttgccgtgctgcttcctcctcctcttgtgcttgttcttgcccttggacggcgcctcggcgggcggcagctccgcgggggcctcggccacgggcgggggcgtcgtcgcgggaggcagcgacgcgggcgcctcggccggaggcgtcgccgtcggcggaggcgccgcggcgggcggcagcacggcgggtgggagcaccgcgggcggcgtcgcgggtggaggcgtcgcgggaggaggtgtcactggtggcggcgtcaccggcgggggtttggccggcgcgaccgcgggcgcgaccggcggcggcttcgctggcgcgactggggtggcggtgggcgctggcgttgtcggagccggcggcgggtttgctggcgcgaccggggtggcggcaggggtcgtcggtgcagccggagtcgtgggtgcgataggtgtcgtcggtgcagccggagtcgtgggtgcggccggggtcgtgggtgcggccggagtcgttggtgcggcaggggtcgtgggtgtagccggagtcgtgggtgcggcaggggtcgtgggtgcggccggagtcgttggtgcggcaggggtcgtgggtgtagttggcggcgactgcgccacggcggcgatgaggtggagcccgaggagggcgccgagcacggcgaggctgcgccattgccgaagcagcggcgcggccatgcttccggcggtggtggtctgcttggagaggaggcgcgcggatgctgagccctgagctcgccggtgagaatgcgagtgatggatctcggggcgatgagtagcgtagcacgcgagcagagtatata

SEQ ID NO: 29612 - DNA, 162 bp, Zea Mays
cgaacaagacttaaaattatttagacgcagacgatcgagcagcaaaaaaaatgcgactctggtctctgggtggggccgttcacgaaagaaaagaaaaaccaaagctgtcagttgagctcacgacgaagtccaaaatggcggcttctcggttgatcaaacaac

SEQ ID NO: 29613 - DNA, 1041 bp, Zea Mays
aaacttcattcatggtttcaagctttccatctccttttaacttcctcccatgcatggaataatcgaactaaacgatccatctacagtaattcagccaaaacatcaatctcagtcaatagcgacgtatataatcactatcttaaaacattgataaaagtatatttaaaaaaaagaatctgcagataggtggacgcgcggggcacgagatacggagatggaggcactagctagctagcagccgctgtcgccggacctggaggctggtccgatcagccgcacaggcacagctgcctcctcctccgtgtgctcctctcctcccaacgctttctgcctgcgcatggctttcggtttcgggcggttcgttgccttgattggctgatgctgctgcagctgggcagggccatgcatggcggccggcaaccgtacgtacgtccggccccggtggcgcgtgacacggccgtccatcccgcgtctgttgttcgttgaaaagctgcgcacagtgagatacctcggcccggcgggcgggagctggggactgtcctgccctgcacatcgtcatttacacacacagacacacaccggtgtagtgaaggagtcgtcggcatacggcggccaggctactcttccttccttttaacccacatgcacctccactgtgccgtatccatcctgcaactctcttcaagcctcgtcgcagcagcagcaggggcaggagggccatctgaaccgagccatggacgatggactgccctgcgcagaggtgagagaggtccgcgatccagctccgtctccatgattagcgatcagcggcggtacacagtttcgtaccgatacgaagaagaagaagacgacgctgcactacctctgccgactgtgcgtgcgtgaggtgagagtgggagtgggaggaatctgctgcgtcgctgttgcggttgcggcgttgcagggcagacctgctgcaactccccgccctcccgtatggttctcctgctggctgctgcatactacagagggacgcaattcaaaatcccagtgagcgctgcc

SEQ ID NO: 29614 - DNA, 2795 bp, Zea Mays
attttattatattgattcggtcacgtgcatatacctactttaattaattaatcataccaaagcccgtttaacggagagcagcgaggagagcgagcgcaccaacgggatctgagcatctgaccagccgcttgctagggtttcgtcccccctctccctcggccagcaccacctcgcatccctagctctagccttgctcgccccgggatcctgtagcggccatggcggcggaagcgccaccgtcggcttcggcgtcttcttcctcggccccgcggccgcctgccgcggcggcctctgcctccggcggcggggcggccgggtccgcggagtcgtacatcgggagcctcattagcctgacttcgaagagcgagatcaggtacgagggcgtcctttacaaaatcaacaccgaggagtccagcatcggcctgcgcaatgtgcggtcctttgggaccgaaggtcggaagaaagatggaatgcagattcctgctagcgacaaagtatacgagtatatcctctttcggggaactgatatcaaggatttgcaagttaagtcatcaccaccgccgccgccacctcaagcagcttccctgcacaatgaccctgccataatccagtcacattattctcaaccagcatcaacatcgtcaaatttgccttccgctgggggtgcagttttaccagacctcagctcccaggcagttcaatatgggcttcagaggccaacttttcagagtaaccttcctctataccaaccagggaatgctccacggggctcttcagcggcacctccagcaggaaatgctccgtggggctcttcagcagaacctccagcaggaacgacactttcggttccctcaatgtactggcatggatactatgcgccttcaagtgggctgccacctcatttgcagcaacctctgctgcttcagccaacaccaggattgtcagttccccagaatcttcaatatccaggactaaatccttctttgccatctgggatgcaaaagctgtcagaactccaaccttcattgatgccacctattaatagtcaaggttcttcaggtatcctgcctactacaacagctcctgcttctgctaccttattagctccagaaagctcaaagcctcaggtgccaaacatgggatctttgtttactcctgcaacatctcttggtgcaacttttccttatccaagccagccaacaccggtggctgaaactagtgcaacagtgtcacagaacataacttcatttagtagcaacaaggctactgctcttccaggctcaacactgtcataccaaactgcatctcagtctgtttcttcgactattgccccatctagctcagcacaagtggagatggctgtgcctttgttggcatcatcaggtcaactattgcagaacacatcatccatgctttcatcatcacactcgatgcaggcaccattacaggtagctagcaaagaagtcaagccggttgagccaaaggctaaggttgcagaaccattactgcctgaccctttgctaccagacccaccatcacagtctctgcctgaaaataaggagcctatattgccattgcccaaacagacacctcagaagttttcacagtcagtaacaacattcactgaagaatttgatttcacggccatgaatgagaagtttaacaaagatgaagtctggggtcatcttggaaagaaatcgcagtcaagggacaaggatggtgaggtgggagatgatgtgtttgatgaagacctggaggttgaggaaactgataacccagagctatctgttaagcctgtttatgtcaaggatgatttttttgattccctctctagtggaacatttggacgtggaggaccaaatggaaggggtagaccttctgaacggcgcagagtagatacagagacttttggcgaatttccacggcacaggcaaccctaccgtggtggcgcccgaggttaccgtggcggtggacgttcccgaggttcatattatggtggcagaggctatggaaacacagggaccggaggctatggaaacacagggacaggtggccctggaaattcttattctcaccggggctatgggagagattgattatagcagaaatgtgcaggcaaccatacttgtgggtgttgtagtcttttaccacatgtatgatgtatcccttactactggtgcagcggtgagaagtcgttttcccactgagccgagccaaaggtttaatgggctctaaattttacactataagatttaaggattggattaggatcggactctatttctattcatttttaactaaaatttatttagggccctaccattctgtgaagaatcatttggatcctaatcaattaccacccctaggttttagattcaacgcagcaaaagaatgtagatgtaagacttaccttgttattcccttggagagtgcactcgtgggagtcgccagcactaggtctgcgagtctgtccattatgcatcccttaatattcaacaaataaatggagcttaccagcatgtcacttgggtgtgccttgtccagacaaggcgtgtagcgtttggtcattgacgtggtacacccgtgttctgtaggagagttaccagtagatgagcggatgatgctggataggtataagcttgtggcccttgatgtgtataccttacgcttgggatttagttgtataggccgatctcgatgcaggcatgcaacgcctggcctagctcagtaactttttcctttaacaaagttctgccatgttgtcttttgtattggtgatagtgtaacttaaaaat

SEQ ID NO: 29615 - DNA, 2743 bp, Zea Mays
aggagagcgagcgcaccaacgggatctgagcatctgaccagccgcttgctagggtttcgtcccccctctccctcggccagcaccacctcgcatccctagctctagccttgctcgccccgggatcctgtagcggccatggcggcggaagcgccaccgtcggcttcggcgtcttcttcctcggccccgcggccgcctgccgcggcggcctctgcctccggcggcggggcggccgggtccgcggagtcgtacatcgggagcctcattagcctgacttcgaagagcgagatcaggtacgagggcgtcctttacaaaatcaacaccgaggagtccagcatcggcctgcgcaatgtgcggtcctttgggaccgaaggtcggaagaaagatggaatgcagattcctgctagcgacaaagtatacgagtatatcctctttcggggaactgatatcaaggatttgcaagttaagtcatcaccaccgccgccgccacctcaagcagcttccctgcacaatgaccctgccataatccagtcacattattctcaaccagcatcaacatcgtcaaatttgccttccgctgggggtgcagttttaccagacctcagctcccaggcagttcaatatgggcttcagaggccaacttttcagagtaaccttcctctataccaaccagggaatgctccacggggctcttcagcggcacctccagcaggaaatgctccgtggggctcttcagcagaacctccagcaggaacgacactttcggttccctcaatgtactggcatggatactatgcgccttcaagtgggctgccacctcatttgcagcaacctctgctgcttcagccaacaccaggattgtcagttccccagaatcttcaatatccaggactaaatccttctttgccatctgggatgcaaaagctgtcagaactccaaccttcattgatgccacctattaatagtcaaggttcttcaggtatcctgcctactacaacagctcctgcttctgctaccttattagctccagaaagctcaaagcctcaggtgccaaacatgggatctttgtttactcctgcaacatctcttggtgcaacttttccttatccaagccagccaacaccggtggctgaaactagtgcaacagtgtcacagaacataacttcatttagtagcaacaaggctactgctcttccaggctcaacactgtcataccaaactgcatctcagtctgtttcttcgactattgccccatctagctcagcacaagtggagatggctgtgcctttgttggcatcatcaggtcaactattgcagaacacatcatccatgctttcatcatcacactcgatgcaggcaccattacaggtagctagcaaagaagtcaagccggttgagccaaaggctaaggttgcagaaccattactgcctgaccctttgctaccagacccaccatcacagtctctgcctgaaaataaggagcctatattgccattgcccaaacagacacctcagaagtacaatggatctggtttgcacaaccatcacaactttaggggccgtggaaggggtagagggagtgcgttttcacagtcagtaacaacattcactgaagaatttgatttcacggccatgaatgagaagtttaacaaagatgaagtctggggtcatcttggaaagaaatcgcagtcaagggacaaggatggtgaggtgggagatgatgtgtttgatgaagacctggaggttgaggaaactgataacccagagctatctgttaagcctgtttatgtcaaggatgatttttttgattccctctctagtggaacatttggacgtggaggaccaaatggaagggacttttggcgaatttccacggcacaggcaaccctaccgtggtggcgcccgaggttaccgtggcggtggacgttcccgaggttcatattatggtggcagaggctatggaaacacagggaccggaggctatggaaacacagggacaggtggccctggaaattcttattctcaccggggctatgggagagattgattatagcagaaatgtgcaggcaaccatacttgtgggtgttgtagtcttttaccacatgtatgatgtatcccttactactggtgcagcggtgagaagtcgttttcccactgagccgagccaaaggtttaatgggctctaaattttacactataagatttaaggattggattaggatcggactctatttctattcatttttaactaaaatttatttagggccctaccattctgtgaagaatcatttggatcctaatcaattaccacccctaggttttagattcaacgcagcaaaagaatgtagatgtaagacttaccttgttattcccttggagagtgcactcgtgggagtcgccagcactaggtctgcgagtctgtccattatgcatcccttaatattcaacaaataaatggagcttaccagcatgtcacttgggtgtgccttgtccagacaaggcgtgtagcgtttggtcattgacgtggtacacccgtgttctgtaggagagttaccagtagatgagcggatgatgctggataggtataagcttgtggcccttgatgtgtataccttacgcttgggatttagttgtataggccgatctcgatgcaggcatgcaacgcctggcctagctcagtaactttttcctttaacaaagttctgccatgttgtcttttgtattggtgatagtgtaacttaaaaat

SEQ ID NO: 29616 - DNA, 2431 bp, Zea Mays
ctggtccctggtgcgctcagcgaggcgaatccttgtccccctagcccccccccctaccaatgtcagggtctcagggattgaggggaattcgaaattttccaattgcggtcctttgggaccgaaggtcggaagaaagatggaatgcagattcctgctagcgacaaagtatacgagtatatcctctttcggggaactgatatcaaggatttgcaagttaagtcatcaccaccgccgccgccacctcaagcagcttccctgcacaatgaccctgccataatccagtcacattattctcaaccagcatcaacatcgtcaaatttgccttccgctgggggtgcagttttaccagacctcagctcccaggcagttcaatatgggcttcagaggccaacttttcagagtaaccttcctctataccaaccagggaatgctccacggggctcttcagcggcacctccagcaggaaatgctccgtggggctcttcagcagaacctccagcaggaacgacactttcggttccctcaatgtactggcatggatactatgcgccttcaagtgggctgccacctcatttgcagcaacctctgctgcttcagccaacaccaggattgtcagttccccagaatcttcaatatccaggactaaatccttctttgccatctgggatgcaaaagctgtcagaactccaaccttcattgatgccacctattaatagtcaaggttcttcaggtatcctgcctactacaacagctcctgcttctgctaccttattagctccagaaagctcaaagcctcaggtgccaaacatgggatctttgtttactcctgcaacatctcttggtgcaacttttccttatccaagccagccaacaccggtggctgaaactagtgcaacagtgtcacagaacataacttcatttagtagcaacaaggctactgctcttccaggctcaacactgtcataccaaactgcatctcagtctgtttcttcgactattgccccatctagctcagcacaagtggagatggctgtgcctttgttggcatcatcaggtcaactattgcagaacacatcatccatgctttcatcatcacactcgatgcaggcaccattacaggtagctagcaaagaagtcaagccggttgagccaaaggctaaggttgcagaaccattactgcctgaccctttgctaccagacccaccatcacagtctctgcctgaaaataaggagcctatattgccattgcccaaacagacacctcagaagttttcacagtcagtaacaacattcactgaagaatttgatttcacggccatgaatgagaagtttaacaaagatgaagtctggggtcatcttggaaagaaatcgcagtcaagggacaaggatggtgaggtgggagatgatgtgtttgatgaagacctggaggttgaggaaactgataacccagagctatctgttaagcctgtttatgtcaaggatgatttttttgattccctctctagtggaacatttggacgtggaggaccaaatggaagggacttttggcgaatttccacggcacaggcaaccctaccgtggtggcgcccgaggttaccgtggcggtggacgttcccgaggttcatattatggtggcagaggctatggaaacacagggaccggaggctatggaaacacagggacaggtggccctggaaattcttattctcaccggggctatgggagagattgattatagcagaaatgtgcaggcaaccatacttgtgggtgttgtagtcttttaccacatgtatgatgtatcccttactactggtgcagcggtgagaagtcgttttcccactgagccgagccaaaggtttaatgggctctaaattttacactataagatttaaggattggattaggatcggactctatttctattcatttttaactaaaatttatttagggccctaccattctgtgaagaatcatttggatcctaatcaattaccacccctaggttttagattcaacgcagcaaaagaatgtagatgtaagacttaccttgttattcccttggagagtgcactcgtgggagtcgccagcactaggtctgcgagtctgtccattatgcatcccttaatattcaacaaataaatggagcttaccagcatgtcacttgggtgtgccttgtccagacaaggcgtgtagcgtttggtcattgacgtggtacacccgtgttctgtaggagagttaccagtagatgagcggatgatgctggataggtataagcttgtggcccttgatgtgtataccttacgcttgggatttagttgtataggccgatctcgatgcaggcatgcaacgcctggcctagctcagtaactttttcctttaacaaagttctgccatgttgtcttttgtattggtgatagtgtaacttaaaaat

SEQ ID NO: 29617 - DNA, 2420 bp, Zea Mays
cccccccctaccaatgtcagggtctcagggattgaggggaattcgaaattttccaattgcggtcctttgggaccgaaggtcggaagaaagatggaatgcagattcctgctagcgacaaagtatacgagtatatcctctttcggggaactgatatcaaggatttgcaagttaagtcatcaccaccgccgccgccacctcaagcagcttccctgcacaatgaccctgccataatccagtcacattattctcaaccagcatcaacatcgtcaaatttgccttccgctgggggtgcagttttaccagacctcagctcccaggcagttcaatatgggcttcagaggccaacttttcagagtaaccttcctctataccaaccagggaatgctccacggggctcttcagcggcacctccagcaggaaatgctccgtggggctcttcagcagaacctccagcaggaacgacactttcggttccctcaatgtactggcatggatactatgcgccttcaagtgggctgccacctcatttgcagcaacctctgctgcttcagccaacaccaggattgtcagttccccagaatcttcaatatccaggactaaatccttctttgccatctgggatgcaaaagctgtcagaactccaaccttcattgatgccacctattaatagtcaaggttcttcaggtatcctgcctactacaacagctcctgcttctgctaccttattagctccagaaagctcaaagcctcaggtgccaaacatgggatctttgtttactcctgcaacatctcttggtgcaacttttccttatccaagccagccaacaccggtggctgaaactagtgcaacagtgtcacagaacataacttcatttagtagcaacaaggctactgctcttccaggctcaacactgtcataccaaactgcatctcagtctgtttcttcgactattgccccatctagctcagcacaagtggagatggctgtgcctttgttggcatcatcaggtcaactattgcagaacacatcatccatgctttcatcatcacactcgatgcaggcaccattacaggtagctagcaaagaagtcaagccggttgagccaaaggctaaggttgcagaaccattactgcctgaccctttgctaccagacccaccatcacagtctctgcctgaaaataaggagcctatattgccattgcccaaacagacacctcagaagttttcacagtcagtaacaacattcactgaagaatttgatttcacggccatgaatgagaagtttaacaaagatgaagtctggggtcatcttggaaagaaatcgcagtcaagggacaaggatggtgaggtgggagatgatgtgtttgatgaagacctggaggttgaggaaactgataacccagagctatctgttaagcctgtttatgtcaaggatgatttttttgattccctctctagtggaacatttggacgtggaggaccaaatggaaggggtagaccttctgaacggcgcagagtagatacagagacttttggcgaatttccacggcacaggcaaccctaccgtggtggcgcccgaggttaccgtggcggtggacgttcccgaggttcatattatggtggcagaggctatggaaacacagggaccggaggctatggaaacacagggacaggtggccctggaaattcttattctcaccggggctatgggagagattgattatagcagaaatgtgcaggcaaccatacttgtgggtgttgtagtcttttaccacatgtatgatgtatcccttactactggtgcagcggtgagaagtcgttttcccactgagccgagccaaaggtttaatgggctctaaattttacactataagatttaaggattggattaggatcggactctatttctattcatttttaactaaaatttatttagggccctaccattctgtgaagaatcatttggatcctaatcaattaccacccctaggttttagattcaacgcagcaaaagaatgtagatgtaagacttaccttgttattcccttggagagtgcactcgtgggagtcgccagcactaggtctgcgagtctgtccattatgcatcccttaatattcaacaaataaatggagcttaccagcatgtcacttgggtgtgccttgtccagacaaggcgtgtagcgtttggtcattgacgtggtacacccgtgttctgtaggagagttaccagtagatgagcggatgatgctggataggtataagcttgtggcccttgatgtgtataccttacgcttgggatttagttgtataggccgatctcgatgcaggcatgcaacgcctggcctagctcagtaactttttcctttaacaaagttctgccatgttgtcttttgtattggtgatagtgtaacttaaaaat

SEQ ID NO: 29618 - DNA, 2402 bp, Zea Mays
caccaatgtaattatgcattttgggcttttggcccatcagtttgaggttctgatggattcaaaagcaacaatgaagttatcttatcatcaaacgaagccaaactcacatgatttgcaagttaagtcatcaccaccgccgccgccacctcaagcagcttccctgcacaatgaccctgccataatccagtcacattattctcaaccagcatcaacatcgtcaaatttgccttccgctgggggtgcagttttaccagacctcagctcccaggcagttcaatatgggcttcagaggccaacttttcagagtaaccttcctctataccaaccagggaatgctccacggggctcttcagcggcacctccagcaggaaatgctccgtggggctcttcagcagaacctccagcaggaacgacactttcggttccctcaatgtactggcatggatactatgcgccttcaagtgggctgccacctcatttgcagcaacctctgctgcttcagccaacaccaggattgtcagttccccagaatcttcaatatccaggactaaatccttctttgccatctgggatgcaaaagctgtcagaactccaaccttcattgatgccacctattaatagtcaaggttcttcaggtatcctgcctactacaacagctcctgcttctgctaccttattagctccagaaagctcaaagcctcaggtgccaaacatgggatctttgtttactcctgcaacatctcttggtgcaacttttccttatccaagccagccaacaccggtggctgaaactagtgcaacagtgtcacagaacataacttcatttagtagcaacaaggctactgctcttccaggctcaacactgtcataccaaactgcatctcagtctgtttcttcgactattgccccatctagctcagcacaagtggagatggctgtgcctttgttggcatcatcaggtcaactattgcagaacacatcatccatgctttcatcatcacactcgatgcaggcaccattacaggtagctagcaaagaagtcaagccggttgagccaaaggctaaggttgcagaaccattactgcctgaccctttgctaccagacccaccatcacagtctctgcctgaaaataaggagcctatattgccattgcccaaacagacacctcagaagtacaatggatctggtttgcacaaccatcacaactttaggggccgtggaaggggtagagggagtgcgttttcacagtcagtaacaacattcactgaagaatttgatttcacggccatgaatgagaagtttaacaaagatgaagtctggggtcatcttggaaagaaatcgcagtcaagggacaaggatggtgaggtgggagatgatgtgtttgatgaagacctggaggttgaggaaactgataacccagagctatctgttaagcctgtttatgtcaaggatgatttttttgattccctctctagtggaacatttggacgtggaggaccaaatggaagggacttttggcgaatttccacggcacaggcaaccctaccgtggtggcgcccgaggttaccgtggcggtggacgttcccgaggttcatattatggtggcagaggctatggaaacacagggaccggaggctatggaaacacagggacaggtggccctggaaattcttattctcaccggggctatgggagagattgattatagcagaaatgtgcaggcaaccatacttgtgggtgttgtagtcttttaccacatgtatgatgtatcccttactactggtgcagcggtgagaagtcgttttcccactgagccgagccaaaggtttaatgggctctaaattttacactataagatttaaggattggattaggatcggactctatttctattcatttttaactaaaatttatttagggccctaccattctgtgaagaatcatttggatcctaatcaattaccacccctaggttttagattcaacgcagcaaaagaatgtagatgtaagacttaccttgttattcccttggagagtgcactcgtgggagtcgccagcactaggtctgcgagtctgtccattatgcatcccttaatattcaacaaataaatggagcttaccagcatgtcacttgggtgtgccttgtccagacaaggcgtgtagcgtttggtcattgacgtggtacacccgtgttctgtaggagagttaccagtagatgagcggatgatgctggataggtataagcttgtggcccttgatgtgtataccttacgcttgggatttagttgtataggccgatctcgatgcaggcatgcaacgcctggcctagctcagtaactttttcctttaacaaagttctgccatgttgtcttttgtattggtgatagtgtaacttaaaaat

SEQ ID NO: 29619 - DNA, 3011 bp, Zea Mays
ctcctaaatatgcacaactgcaaagaaaccagcaagaatgcgccggcggtttatagttccccgctactgcaccgctctctgctgcaggctgcagctttgactaccaactcatacagtactagtactatactagagtactactacgccattagcacggtggttgcataggccgtggtctggaggtctctctcagctcagacgaggatcgtcggagcaagcagcagcgcgtgcagcctctgggagaccctggcggcgtcgacgccgatcctggggctgagcgcctgcgagtggacggtgtagaatatcttgtccccgatgacggagaagctggcgctgaccacctcggcgccctcctgctccagcacggtgatgacctcgtgcagcttgaagggcctggcggcctcgctgatgagcaccacgtccagcgtcccgtcctggcaccgcacctcgatgaccggcatgcgcacgcctccgccgccgccggtggacccggccgccgcccccgccttccgctgcttcagcgcctcgatccgctccttgagctgcttgatgtacgccgccgcgctgtccagctggtccagctgcgtcaccgcgtcctgcgatgggaacatcgagctactgtcagtgtcactgtgccggggacaggacaggaggttctctgtctcgccagaaatcccataatttccttacttttatttaaaaagctttgatgaaaagattagcaggtgcaggggcgaagctaggttgaatgcggtggatgcagatgcaacctccacaaaatgcaaatcctataaatttaattaaaattttactatatatgcacccctaaaaaattcttatgcacctaaatacacaatgctcaattttgctctagcttggccattgagcaggagcatgccatgctatatatattgctatttctgactgtctccttttttttactataattggagcaacatgtcagtgcatgtataaacagagtaccagtatactgtagaaggagacaccacgccagtgctcgctgttcagctacagctcagccgatggagactgtagtttggtttcccttgcgcacaaggggcatggcacaggatggtacctattttctgactgtagtttggtttcccgtttggtaggtggatcgaggaatcgtggcgtagcacaggaataatcaggcgagtgcgggtattgtttattatccgaccgaatggtccctattttctattgcgcccacgagttcctcctctcgggcatccggcacgtgcgcctaagccaaataatgacgtgacgtgtgacccccgagcaaacccgcgtggctgtcacctgtcaccggagaggagggccccaccacgtattcattcattcacgtgaagtggaacgtgggtgaatggagtggacctcgagggagagggaatctcagtatggtctactatttcagtgatgtgtgtgtggtctatacgccctccgtccaaaacaaatgtcgttgttctcgctttggctctcaagagagttgagacttctcgcgttggctctcaagagagttgagactagctaaataactcggcaaaccaaattttggctacttaatagtaaaataactctccaacagattagctatctgattggccaaactatctggctcttcaaattgactctatcactagctaaatttggctagtcacttgaccagccaaactagatagatagtctattggagtgagatgctacatatagagtgcaatctttatgaaaagttaaatagataatcaaatatagagctaaaaatgaggagtctcttgaagacgctcttaaacgttttcagctttgaatttattatcagatactctatctttttttatttgttgcgttttagctcaaaataaattagtaagccacaaatatttaagaaacggatgtagtatattattaaatttacttttataataatttatctagatgtattgctgatatcgttttaaaatctacataaatttagaatagtgatcacgcggcccttttttttggacggagggaagcagtgttttctgcctcgtagaggaaacgtgactgaaaacgatggtgattggtggcttatgcctgattgcctggctcgatgcgcggccggtcgcggtggggtgtctggggtggggtgggggcatatactcacaaacaaaaacagcggacagctaatcagatcgaatcgattgggtgtggcaaatcgctgatccagagctgatgctttttgtcctttatttgtagtaataacagtaatcaaaacagtaaaaggcagtctcgttcccgctctttttgcacactcgttttgaccctttgtctgttttacacgtgctaggccgcgaatgacttgaaacaggggtactgtaaatgttttatgctaggcgagatggataatattattcttatactatggcttatccggctccaactataggcaggactgcaggaatatatggctcagtttcattgcaaacattattgtcacaggttgggagttgaagattttgacgctactagttattggttgtcttttagaggattggagggttttaaggaggggaactgattgcgacatgaagaggatattaaccgattgtatggatttgatgtgaacaattcgttttacagtgcattcattgctctccgacactgtgtaataacacgtcgttaagttggcttctggacttctcagtactatcatttacttactagtacctatttctaaaacttgtggcgaggaaggccatggatgcagtgattcggaatcggccagttcgttgcgcttgcgcccgatagagcaatgaatgtatggtccgaggagatctgatgggctcggaaccgccgtgggaagtggggggggagcgaggaatcgagggcgagaggttgctgttgcctttttacctgcttgttgccgggattggaggacaccgccgccgacgcggcgtcggagaggagggaggcgtgcgtggtggcggcggcgggagggatgagggagg

SEQ ID NO: 29620 - DNA, 2307 bp, Zea Mays
cgctcggcactttccaatcaggccgccgtcctccttatctgaatcgcgtgccttccaggcttccagccctctgcccgctgtgccccacgcccggccccccgatccgacccacccagcgccatgtcccccgcgtgcgccacgccggcggcggcgcgcccgctcaacacggttccgacacgccgctcgccgccctctgccgcgcgcccgccatcggccatccccgcccgccgctccgccggctgctgcttctgcgcctcctcctcatcctcggcatcgtcgccctccacctgggactggacccgatggagccgccacttcgacgaggtcgaccaggccgagagctacgcatccctcctccagttccagctggaggaggcggtggagaacgaggatttcgcggaggccgccaagctcaagagggatatcatagcggccacaggaaacgacgccgtagcccacgtcatggccgaactcaagagtgctatagaggagcagcggtaccaggacgcctcgaggttgacaaggcttgctgggaccagcttggtaggttggtgggtgggatatgctaagggcattgatgattccattgggagaattgtacgaataagccctggtgttggcagatatgtggccaaaagctacagcccgaggcaattggtcactgcatcttcagggaccccattgtttgaaattttccttgtcagagaagatgacaagacatatacaatgaaggtagtacacttgcgaccaacaaaaggaactttaggtgcatcatccatatcatcagcaataacagaaagcccagcaacggtagagacaccagaaagtagtgctatatctgatagtattacagaggaggcaaatatagatactccagtaaaaggaaatggggatgctgaagagaaagagcaagatgttggtagcagcaaggatactagtgttgatggatttaaaagtcttttgaatttttttaagtctcgaattcctgaattcaaagttcaggtgataaatgttgatgtgtctgaggaaactgaattggctgcaaattcgtccgaagaatcagtgcaagacgatgtgaagagtactccagaaggctcattggaagagccaaccactgaggaacttgagcaggaggaggatgttccagaagaagatatggatgaagaaagtaaaagtacgaaagtgaagctttttatcagtggtgtggttcacaataaagaagatgctggaacaaaatcatacgttcgtgttccagctgaaataaataacatggaaaaagactcctttgacctgtacattcctggaaatggttctggtcatgatctgcctgaaacgaaggctgcaaaacagaaagttgcagatatggctgctaaattagcctcagagcttatgccgtctgatgttgccaaggcattatggggtacaaccaagagttcttcaaagataaataaagaagttcaggagcttttaaggcttaccttaagcaaggcccgagtcaagctgaccgatgataccttttttaaccggatcattatggacactaacagcatggatccatttaatgtccatatggaccagaaattgtgcagctccgtcggaagttcggccactggaatagttccgatgacgttgagtttttcgagtatgtcgaagcagtaaagttgactggtgatctgagtgtccctgctggccagataacattccgtgcgaagattgggaagggcaagcgacttgagaatcggggcgcgtatccagaggaattcggtgtgattgccagttataaaggtcagggtagaatagctcagcctggattcaaaaatcctcgatgggtggatggtgagctgttggtgctcaatggcaagagtacaatcccacaccttggaggcgcagagctcggtttcctgtacagtgtacctgagcagagttttctggttctcttcgatcggcttaaccttcccgagtgttgagactcctaaaaggagcagatttctcacatgtagattgcatgaacgcacagaggctggccccagttccaagtgttcgaacaagtctgtggcctgcgggcccttttttccgtcgtcctctgggctattttgctacctgagatgcctgccaatcttttctccgctcctactcggcaggagctgaactgcttttgtgagggaaggctgaccagttttgtgggttttcccccttcactgttggtttcagtaaggtaggatggaaaacaaattaaacaaaatcgttctgttgtatcaggatgttacatatataataataaaaaggcaaataaagtcccatgatttg

SEQ ID NO: 29621 - DNA, 2594 bp, Zea Mays
cgctcggcactttccaatcaggccgccgtcctccttatctgaatcgcgtgccttccaggcttccagccctctgcccgctgtgccccacgcccggccccccgatccgacccacccagcgccatgtcccccgcgtgcgccacgccggcggcggcgcgcccgctcaacacggttccgacacgccgctcgccgccctctgccgcgcgcccgccatcggccatccccgcccgccgctccgccggctgctgcttctgcgcctcctcctcatcctcggcatcgtcgccctccacctgggactggacccgatggagccgccacttcgacgaggtcgaccaggccgagagctacgcatccctcctccagttccagctggaggaggcggtggagaacgaggatttcgcggaggccgccaagctcaagagggatatcatagcggccacaggaaacgacgccgtagcccacgtcatggccgaactcaagagtgctatagaggagcagcggtaccaggacgcctcgaggttgacaaggcttgctgggaccagcttggtaattaccaatacatcactgattacttttttttcctgtaccttttgattctgtcatatgcattcagggacagaattatttgtcttttaaagtcacacattgcacatcccatcctaactaaccaaactattcatgtggcgaatcgctaatcttgtgccaacatggtaatgaacctaataaaaaagacgacccatgatagatgatagtgccaaaaccatccattttcataaggaaaagctctggcttccaaccatttccatttcaggtaggttggtgggtgggatatgctaagggcattgatgattccattgggagaattgtacgaataagccctggtgttggcagatatgtggccaaaagctacagcccgaggcaattggtcactgcatcttcagggaccccattgtttgaaattttccttgtcagagaagatgacaagacatatacaatgaaggtagtacacttgcgaccaacaaaaggaactttaggtgcatcatccatatcatcagcaataacagaaagcccagcaacggtagagacaccagaaagtagtgctatatctgatagtattacagaggaggcaaatatagatactccagtaaaaggaaatggggatgctgaagagaaagagcaagatgttggtagcagcaaggatactagtgttgatggatttaaaagtcttttgaatttttttaagtctcgaattcctgaattcaaagttcaggtgataaatgttgatgtgtctgaggaaactgaattggctgcaaattcgtccgaagaatcagtgcaagacgatgtgaagagtactccagaaggctcattggaagagccaaccactgaggaacttgagcaggaggaggatgttccagaagaagatatggatgaagaaagtaaaagtacgaaagtgaagctttttatcagtggtgtggttcacaataaagaagatgctggaacaaaatcatacgttcgtgttccagctgaaataaataacatggaaaaagactcctttgacctgtacattcctggaaatggttctggtcatgatctgcctgaaacgaaggctgcaaaacagaaagttgcagatatggctgctaaattagcctcagagcttatgccgtctgatgttgccaaggcattatggggtacaaccaagagttcttcaaagataaataaagaagttcaggagcttttaaggcttaccttaagcaaggcccgagtcaagctgaccgatgataccttttttaaccggatcattatggacactaacagcatggatccatttaatggtctctatgtgggagcatttagtccatatggaccagaaattgtgcagctccgtcggaagttcggccactggaatagttccgatgacgttgagtttttcgagtatgtcgaagcagtaaagttgactggtgatctgagtgtccctgctggccagataacattccgtgcgaagattgggaagggcaagcgacttgagaatcggggcgcgtatccagaggaattcggtgtgattgccagttataaaggtcagggtagaatagctcagcctggattcaaaaatcctcgatgggtggatggtgagctgttggtgctcaatggcaagagtacaatcccacaccttggaggcgcagagctcggtttcctgtacagtgtacctgagcagagttttctggttctcttcgatcggcttaaccttcccgagtgttgagactcctaaaaggagcagatttctcacatgtagattgcatgaacgcacagaggctggccccagttccaagtgttcgaacaagtctgtggcctgcgggcccttttttccgtcgtcctctgggctattttgctacctgagatgcctgccaatcttttctccgctcctactcggcaggagctgaactgcttttgtgagggaaggctgaccagttttgtgggttttcccccttcactgttggtttcagtaaggtaggatggaaaacaaattaaacaaaatcgttctgttgtatcaggatgttacatatataataataaaaaggcaaataaagtcccatgatttg

SEQ ID NO: 29622 - DNA, 2579 bp, Zea Mays
cgctcggcactttccaatcaggccgccgtcctccttatctgaatcgcgtgccttccaggcttccagccctctgcccgctgtgccccacgcccggccccccgatccgacccacccagcgccatgtcccccgcgtgcgccacgccggcggcggcgcgcccgctcaacacggttccgacacgccgctcgccgccctctgccgcgcgcccgccatcggccatccccgcccgccgctccgccggctgctgcttctgcgcctcctcctcatcctcggcatcgtcgccctccacctgggactggacccgatggagccgccacttcgacgaggtcgaccaggccgagagctacgcatccctcctccagttccagctggaggaggcggtggagaacgaggatttcgcggaggccgccaagctcaagagggatatcatagcggccacaggaaacgacgccgtagcccacgtcatggccgaactcaagagtgctatagaggagcagcggtaccaggacgcctcgaggttgacaaggcttgctgggaccagcttggtaattaccaatacatcactgattacttttttttcctgtaccttttgattctgtcatatgcattcagggacagaattatttgtcttttaaagtcacacattgcacatcccatcctaactaaccaaactattcatgtggcgaatcgctaatcttgtgccaacatggtaatgaacctaataaaaaagacgacccatgatagatgatagtgccaaaaccatccattttcataaggaaaagctctggcttccaaccatttccatttcaggtaggttggtgggtgggatatgctaagggcattgatgattccattgggagaattgtacgaataagccctggtgttggcagatatgtggccaaaagctacagcccgaggcaattggtcactgcatcttcagggaccccattgtttgaaattttccttgtcagagaagatgacaagacatatacaatgaaggtagtacacttgcgaccaacaaaaggaactttaggtgcatcatccatatcatcagcaataacagaaagcccagcaacggtagagacaccagaaagtagtgctatatctgatagtattacagaggaggcaaatatagatactccagtaaaaggaaatggggatgctgaagagaaagagcaagatgttggtagcagcaaggatactagtgttgatggatttaaaagtcttttgaatttttttaagtctcgaattcctgaattcaaagttcaggtgataaatgttgatgtgtctgaggaaactgaattggctgcaaattcgtccgaagaatcagtgcaagacgatgtgaagagtactccagaaggctcattggaagagccaaccactgaggaacttgagcaggaggaggatgttccagaagaagatatggatgaagaaagtaaaagtacgaaagtgaagctttttatcagtggtgtggttcacaataaagaagatgctggaacaaaatcatacgttcgtgttccagctgaaataaataacatggaaaaagactcctttgacctgtacattcctggaaatggttctggtcatgatctgcctgaaacgaaggctgcaaaacagaaagttgcagatatggctgctaaattagcctcagagcttatgccgtctgatgttgccaaggcattatggggtacaaccaagagttcttcaaagataaataaagaagttcaggagcttttaaggcttaccttaagcaaggcccgagtcaagctgaccgatgataccttttttaaccggatcattatggacactaacagcatggatccatttaatgcatttagtccatatggaccagaaattgtgcagctccgtcggaagttcggccactggaatagttccgatgacgttgagtttttcgagtatgtcgaagcagtaaagttgactggtgatctgagtgtccctgctggccagataacattccgtgcgaagattgggaagggcaagcgacttgagaatcggggcgcgtatccagaggaattcggtgtgattgccagttataaaggtcagggtagaatagctcagcctggattcaaaaatcctcgatgggtggatggtgagctgttggtgctcaatggcaagagtacaatcccacaccttggaggcgcagagctcggtttcctgtacagtgtacctgagcagagttttctggttctcttcgatcggcttaaccttcccgagtgttgagactcctaaaaggagcagatttctcacatgtagattgcatgaacgcacagaggctggccccagttccaagtgttcgaacaagtctgtggcctgcgggcccttttttccgtcgtcctctgggctattttgctacctgagatgcctgccaatcttttctccgctcctactcggcaggagctgaactgcttttgtgagggaaggctgaccagttttgtgggttttcccccttcactgttggtttcagtaaggtaggatggaaaacaaattaaacaaaatcgttctgttgtatcaggatgttacatatataataataaaaaggcaaataaagtcccatgatttg

SEQ ID NO: 29623 - DNA, 2571 bp, Zea Mays
cgctcggcactttccaatcaggccgccgtcctccttatctgaatcgcgtgccttccaggcttccagccctctgcccgctgtgccccacgcccggccccccgatccgacccacccagcgccatgtcccccgcgtgcgccacgccggcggcggcgcgcccgctcaacacggttccgacacgccgctcgccgccctctgccgcgcgcccgccatcggccatccccgcccgccgctccgccggctgctgcttctgcgcctcctcctcatcctcggcatcgtcgccctccacctgggactggacccgatggagccgccacttcgacgaggtcgaccaggccgagagctacgcatccctcctccagttccagctggaggaggcggtggagaacgaggatttcgcggaggccgccaagctcaagagggatatcatagcggccacaggaaacgacgccgtagcccacgtcatggccgaactcaagagtgctatagaggagcagcggtaccaggacgcctcgaggttgacaaggcttgctgggaccagcttggtaattaccaatacatcactgattacttttttttcctgtaccttttgattctgtcatatgcattcagggacagaattatttgtcttttaaagtcacacattgcacatcccatcctaactaaccaaactattcatgtggcgaatcgctaatcttgtgccaacatggtaatgaacctaataaaaaagacgacccatgatagatgatagtgccaaaaccatccattttcataaggaaaagctctggcttccaaccatttccatttcaggtaggttggtgggtgggatatgctaagggcattgatgattccattgggagaattgtacgaataagccctggtgttggcagatatgtggccaaaagctacagcccgaggcaattggtcactgcatcttcagggaccccattgtttgaaattttccttgtcagagaagatgacaagacatatacaatgaagacaggtagtacacttgcgaccaacaaaaggaactttaggtgcatcatccatatcatcagcaataacagaaagcccagcaacggtagagacaccagaaagtagtgctatatctgatagtattacagaggaggcaaatatagatactccagtaaaaggaaatggggatgctgaagagaaagagcaagatgttggtagcagcaaggatactagtgttgatggatttaaaagtcttttgaatttttttaagtctcgaattcctgaattcaaagttcaggtgataaatgttgatgtgtctgaggaaactgaattggctgcaaattcgtccgaagaatcagtgcaagacgatgtgaagagtactccagaaggctcattggaagagccaaccactgaggaacttgagcaggaggaggatgttccagaagaagatatggatgaagaaagtaaaagtacgaaagtgaagctttttatcagtggtgtggttcacaataaagaagatgctggaacaaaatcatacgttcgtgttccagctgaaataaataacatggaaaaagactcctttgacctgtacattcctggaaatggttctggtcatgatctgcctgaaacgaaggctgcaaaacagaaagttgcagatatggctgctaaattagcctcagagcttatgccgtctgatgttgccaaggcattatggggtacaaccaagagttcttcaaagataaataaagaagttcaggagcttttaaggcttaccttaagcaaggcccgagtcaagctgaccgatgataccttttttaaccggatcattatggacactaacagcatggatccatttaatgtccatatggaccagaaattgtgcagctccgtcggaagttcggccactggaatagttccgatgacgttgagtttttcgagtatgtcgaagcagtaaagttgactggtgatctgagtgtccctgctggccagataacattccgtgcgaagattgggaagggcaagcgacttgagaatcggggcgcgtatccagaggaattcgattgccagttataaaggtcagggtagaatagctcagcctggattcaaaaatcctcgatgggtggatggtgagctgttggtgctcaatggcaagagtacaatcccacaccttggaggcgcagagctcggtttcctgtacagtgtacctgagcagagttttctggttctcttcgatcggcttaaccttcccgagtgttgagactcctaaaaggagcagatttctcacatgtagattgcatgaacgcacagaggctggccccagttccaagtgttcgaacaagtctgtggcctgcgggcccttttttccgtcgtcctctgggctattttgctacctgagatgcctgccaatcttttctccgctcctactcggcaggagctgaactgcttttgtgagggaaggctgaccagttttgtgggttttcccccttcactgttggtttcagtaaggtaggatggaaaacaaattaaacaaaatcgttctgttgtatcaggatgttacatatataataataaaaaggcaaataaagtcccatgatttg

SEQ ID NO: 29624 - DNA, 2572 bp, Zea Mays
cgctcggcactttccaatcaggccgccgtcctccttatctgaatcgcgtgccttccaggcttccagccctctgcccgctgtgccccacgcccggccccccgatccgacccacccagcgccatgtcccccgcgtgcgccacgccggcggcggcgcgcccgctcaacacggttccgacacgccgctcgccgccctctgccgcgcgcccgccatcggccatccccgcccgccgctccgccggctgctgcttctgcgcctcctcctcatcctcggcatcgtcgccctccacctgggactggacccgatggagccgccacttcgacgaggtcgaccaggccgagagctacgcatccctcctccagttccagctggaggaggcggtggagaacgaggatttcgcggaggccgccaagctcaagagggatatcatagcggccacaggaaacgacgccgtagcccacgtcatggccgaactcaagagtgctatagaggagcagcggtaccaggacgcctcgaggttgacaaggcttgctgggaccagcttggtaattaccaatacatcactgattacttttttttcctgtaccttttgattctgtcatatgcattcagggacagaattatttgtcttttaaagtcacacattgcacatcccatcctaactaaccaaactattcatgtggcgaatcgctaatcttgtgccaacatggtaatgaacctaataaaaaagacgacccatgatagatgatagtgccaaaaccatccattttcataaggaaaagctctggcttccaaccatttccatttcaggtaggttggtgggtgggatatgctaagggcattgatgattccattgggagaattgtacgaataagccctggtgttggcagatatgtggccaaaagctacagcccgaggcaattggtcactgcatcttcagggaccccattgtttgaaattttccttgtcagagaagatgacaagacatatacaatgaaggtagtacacttgcgaccaacaaaaggaactttaggtgcatcatccatatcatcagcaataacagaaagcccagcaacggtagagacaccagaaagtagtgctatatctgatagtattacagaggaggcaaatatagatactccagtaaaaggaaatggggatgctgaagagaaagagcaagatgttggtagcagcaaggatactagtgttgatggatttaaaagtcttttgaatttttttaagtctcgaattcctgaattcaaagttcaggtgataaatgttgatgtgtctgaggaaactgaattggctgcaaattcgtccgaagaatcagtgcaagacgatgtgaagagtactccagaaggctcattggaagagccaaccactgaggaacttgagcaggaggaggatgttccagaagaagatatggatgaagaaagtaaaagtacgaaagtgaagctttttatcagtggtgtggttcacaataaagaagatgctggaacaaaatcatacgttcgtgttccagctgaaataaataacatggaaaaagactcctttgacctgtacattcctggaaatggttctggtcatgatctgcctgaaacgaaggctgcaaaacagaaagttgcagatatggctgctaaattagcctcagagcttatgccgtctgatgttgccaaggcattatggggtacaaccaagagttcttcaaagataaataaagaagttcaggagcttttaaggcttaccttaagcaaggcccgagtcaagctgaccgatgataccttttttaaccggatcattatggacactaacagcatggatccatttaatgtccatatggaccagaaattgtgcagctccgtcggaagttcggccactggaatagttccgatgacgttgagtttttcgagtatgtcgaagcagtaaagttgactggtgatctgagtgtccctgctggccagataacattccgtgcgaagattgggaagggcaagcgacttgagaatcggggcgcgtatccagaggaattcggtgtgattgccagttataaaggtcagggtagaatagctcagcctggattcaaaaatcctcgatgggtggatggtgagctgttggtgctcaatggcaagagtacaatcccacaccttggaggcgcagagctcggtttcctgtacagtgtacctgagcagagttttctggttctcttcgatcggcttaaccttcccgagtgttgagactcctaaaaggagcagatttctcacatgtagattgcatgaacgcacagaggctggccccagttccaagtgttcgaacaagtctgtggcctgcgggcccttttttccgtcgtcctctgggctattttgctacctgagatgcctgccaatcttttctccgctcctactcggcaggagctgaactgcttttgtgagggaaggctgaccagttttgtgggttttcccccttcactgttggtttcagtaaggtaggatggaaaacaaattaaacaaaatcgttctgttgtatcaggatgttacatatataataataaaaaggcaaataaagtcccatgatttg

SEQ ID NO: 29625 - DNA, 853 bp, Zea Mays
ataagatcttgtttagctgagctggatttagcctacatgatggtttaatccatggatgtcattctggaccagatcaaatataagtccacacaaaccatggttatatctgtggttagatcgtaatctaattgatcagatggtttgcctgcatgtttataaagaaggatagcttgcatagtaatcgttgccacagtttagtccacatgtgtttgcaaacttagcccaataaaaaaaaaactgaatgccgacctggaattagtctacgactcaatagccgtggaatccatcccggccacggtcggaggaagtgactccgccgcgggccgccatcttcgtcggtgatcttttctcctcaagtcaacaatcaaggcaacgatctaccacaaaactttgttgatctaccagatggcgatcaagacaacgatcaagaaaatgtacaaggcaataatcttagagatgcaatagcacaagaaacgtggaatgattaccaacaacataaaaattagtggtacatttgttgagctatttgttcgtagaaactgtctttgtttattgttgcttcctaatgaaaaacatgttacagatgagcttactttgaagatatggttccctgtaaccactatgcctcctaattatgtcatgttgctgtttatgtcatatatgttgcttcctaattagtggtacatttgttgtggtattgttgcttcctaattctgttgtgtgtgtattgcttactctgaagatctggttggtttgtaactacaagtaggacatagattctttattttgtgaaatgtttcagttatagcaggttttataaacagcggcattcatcgttttatatgcatgcagt

SEQ ID NO: 29626 - DNA, 2204 bp, Zea Mays
cagagacccagactcccccgctcccaatcccaccaccacccaccttcttgcaattgcagccgccagccggtagtggcagtacggcaatttcagcctcagctgaaggtcactgtctctcttccatctttttctctctcaacaaaactccctgaattgcaaactccaccaaaacaaactccaagcccatccatcaccagtcctctgtcccctccccgaccgcaacgatctgctttgcatcttccccttcctccaattccagtcccatgcgtaatcgtctttcggaattgaatctctccatgtcatggcgctctgagcaagtacagctgcagtcagtgagagaaatgtaggcaccacaaatcggtccagcaaatccctgctcgtgctctaccaaaaaatccagtctttttccagcccaaatccgcctcttccgctgctgccataaagtccggactttacgaggctttcacgacgtgcgagatttctgttatcgatctccacgaacccgatagcctgccataaagtctgcacagacgcttcgcattgcttcaaccaaagatccatccaaactctgcaccccagaaagctagtacgatctcggggggacatgaagcgcctgcagtgcttcaagcagagcagcggcggcggcaatggtggcgggccggggaagcgcctggagcggcggctgtcgctgggcgagtacaagaaggcagtgtcgtggtccaagtacctcgtagcgccgccgggggctaggatccggagcggcggcgaggagctgtggagcgccgacctgtccaagctggagatccggggcaagtttgcgtcaggccggcacagccgcgtctactccggcaggtacaccggccgcgaggtggccatcaagatggtcagtcagccggaggaggacgccgcgctcgccgctgagctagagcgccagttcgcctccgaggtcgcgctcctacttcgcctccaccacccaaacatcatctcgcatgcaagaaaccaccagtattctgcatcatcactgagttcatggcagggggctcccttaggaagtatctacatcagcaggagcctcactcagttcccctcaacctagtgctgaaattagctctagatatcgctcgcggaatgagctacctacactcccagggtatactccatagagacctgaaatcagagaacatacttctgggagaagatatgtcagtcaaagtcgcagatttcgggatttcatgcttggaatcacagtgtggaagtggcaaggggtttacaggaacctacaggtggatggctccggagatgatcaaagaggaacatcatactaggaaagtggacgtgtacagctttggaatcgtcatgtgggagatcttgactgctttggtcccgttcagcgacatgactccagagcaggctgctgttgctgttgccctgaagaatgcaaggccgccactgcctgcttcatgccctgtggcaataagccacctgatcatgcagtgctgggcgaccaaccctgacaaaagacctcagtttgatgacatcgtggcgatcctcgagagctacaaggaagcccttgatgaggacccgtcgttcttcttgtcgtatataccacctccaccggaccacggccaccaccaccatcatcagagccttctccggtgcttccctcgctccatgcgaaggtctgcatctctgaaagtatgatcaggccgggatgttgcctctgctcatcgatgctgtgtacaatatgcaccccctttcgactttctttgttttctatgcgcgcgtcggccctctattatgcggcattagcatgctatatgagctagtttatgctctcattttctccttgttggttaattatttccgtcattgatgccttgagtaatgtagagatgacaggcaggcatgcagcttccggttattatctatggatgccatttgcttttggtgatgggaaacatgaaagagccccagtaaatgtaatataattaagctctccattcaattgtgtttgtgcttcttcctttcggctgttatcatactcgtcgcaaatgcgtaggcaggcagtagagtttgaatcggttggtgttttgtttctaaaatggaaaacttgaactgaaaacagtttgtgctttatagtatgtctgccttttggtcaacaacaaaagtcccctccaaaagacaaaaggatttggcaaaatagt

SEQ ID NO: 29627 - DNA, 1728 bp, Zea Mays
aaatcttaaacccgttatgggtacaaattttttaatgggcataaatattttttacgcggggatgttccagcgcgtcgtcgtcgtccgattctgtctccctcaggtcgagattcgagagttcccgtgttcgtccatccgcgctgtgaggttctccgatggccgagaagtcacccagctccgcgccgcagggtggttctggtgggaatgaatcattcgataatcttgtaattcaagctccacagcttatgagggaggattacatacagaatgctgtgaagtttctttcacatccgaaagtgaagggttctccagtatttcacaggcgttccttcctggaaaagaaaggccttacaagtgaagaaattgatgaggccttttgtagagttcctgaccctaagccaaatggaacagatgctgtagctgctggtaggcaacaagcaaacaatcccagtcaatctgttgtgctgcaaccttatacagaagttcaaccacaagcagctactgcctctgccactgctggaccaattgttccacatacaaaggcacagttgagctgggtaaacacactccttggtgcaggtctttttcttggtttaggggctagtgctgccataaccctaaagaaattggtcatccctagtctgaaatcttggactcgtagagtcgttgctgaaggagatgaaaatgcaaagagtgaacatacttccaaactttgtgaagaaattagggaagccataaaagtttctgcatcagccttttctgatattgctaaaataaaccaagaagtgcttgcttcaaaagatgaagggccaattgactatcaagggagagcttttcagcaaactaatatgtatgcaacaccaccaaacaacagttttgacacagggaggaactcattcatgccattagctgctgaatcttcttatggaccatttccaggatcctactctgagcagcgggtgcagaggcctggtggatacggattccagcaacagacaagcagcgaccgattgaatgttgttggcccacggagcagctaccaagggggttcttctaatcaccatgctggtagtaatgccatggatgacccggcagcggttgcagcagaattgcagcgccgctgggttcccccacagccaccaggcgtcatcatgccagaggctgcggccgccatccgacaggccaggtcggttccgaggcagctgccaagcggcgatgggcgcctgggcgctgatgtcccgagacagcctgagcctgccattgccatggcgacaacagagcacgtgaacgttgcccctgaagcacctggcggggagttgccaagcgatggtggtggtgccatgactgctgatgccagcaacggtggtgggagtggagagcagcaggagcaggaagcctcttgagtgaagctttttggacgccctttgatttggttctttgagaggatctagcttgcacctgtacctgtgtgtgtagcatatgcatatgcatctgcataggtttgtgacataatgtgcctcgtgttcgaaactgcagctgtattgtagatatataaactgatcaactttacacgtgtgttacctgtgtgttctgtcataagtgtatcagctatgaggacgtatttgcttcggcccatgctaaaatattcgcaaagtttgggccaagcatgggctgaactgagcattctaatcagcaatggcccaattttgagccatgtgctttcagata

SEQ ID NO: 29628 - DNA, 1725 bp, Zea Mays
aaatcttaaacccgttatgggtacaaattttttaatgggcataaatattttttacgcggggatgttccagcgcgtcgtcgtcgtccgattctgtctccctcaggtcgagattcgagagttcccgtgttcgtccatccgcgctgtgaggttctccgatggccgagaagtcacccagctccgcgccgcagggtggttctggtgggaatgaatcattcgataatcttgtaattcaagctccacagcttatgagggaggattacatacagaatgctgtgaagtttctttcacatccgaaagtgaagggttctccagtatttcacaggcgttccttcctggaaaagaaaggccttacaagtgaagaaattgatgaggccttttgtagagttcctgaccctaagccaaatggaacagatgctgtagctgctggtaggcaacaagcaaacaatcccagtcaatctgttgtgctgcaaccttatacagaagttcaaccacaagcagctactgcctctgccactgctggaccaattgttccacatacaaaggcacagttgagctgggtaaacacactccttggtgcaggtctttttcttggtttaggggctagtgctgccataaccctaaagaaattggtcatccctagtctgaaatcttggactcgtagagtcgttgctgaaggagatgaaaatgcaaagagtgaacatacttccaaactttgtgaagaaattagggaagccataaaagtttctgcatcagccttttctgatattgctaaaataaaccaagaagtgcttgcttcaaaagatgaagggccaattgactatcaagggagagcttttcagcaaactaatatgtatgcaacaccaccaaacaacagttttgacacagggaggaactcattcatgccattagctgctgaatcttcttatggaccatttccaggatcctactctgagcgggtgcagaggcctggtggatacggattccagcaacagacaagcagcgaccgattgaatgttgttggcccacggagcagctaccaagggggttcttctaatcaccatgctggtagtaatgccatggatgacccggcagcggttgcagcagaattgcagcgccgctgggttcccccacagccaccaggcgtcatcatgccagaggctgcggccgccatccgacaggccaggtcggttccgaggcagctgccaagcggcgatgggcgcctgggcgctgatgtcccgagacagcctgagcctgccattgccatggcgacaacagagcacgtgaacgttgcccctgaagcacctggcggggagttgccaagcgatggtggtggtgccatgactgctgatgccagcaacggtggtgggagtggagagcagcaggagcaggaagcctcttgagtgaagctttttggacgccctttgatttggttctttgagaggatctagcttgcacctgtacctgtgtgtgtagcatatgcatatgcatctgcataggtttgtgacataatgtgcctcgtgttcgaaactgcagctgtattgtagatatataaactgatcaactttacacgtgtgttacctgtgtgttctgtcataagtgtatcagctatgaggacgtatttgcttcggcccatgctaaaatattcgcaaagtttgggccaagcatgggctgaactgagcattctaatcagcaatggcccaattttgagccatgtgctttcagata

SEQ ID NO: 29629 - DNA, 4050 bp, Zea Mays
atattttttacgcggggatgttccagcgcgtcgtcgtcgtccgattctgtctccctcaggtcgagattcgagagttcccgtgttcgtccatccgcgctgtgaggttctccgatggccgagaagtcacccagctccgcgccgcagggtggttctggtgggaatgaatcattcgataatcttgtaattcaagctccacagcttatgagggaggattacatacagaatgctgtgaagtttctttcacatccgaaagtgaagggttctccagtatttcacaggcgttccttcctggaaaagaaaggccttacaagtgaagaaattgatgaggccttttgtagagttcctgaccctaagccaaatggaacagatgctgtagctgctggtaggcaacaagcaaacaatcccagtcaatctgttgtgctgcaaccttatacagaagttcaaccacaagcagctactgcctctgccactgctggaccaattgttccacatacaaaggcacagttgagctgggtaaacacactccttggtgcaggtctttttcttggtttaggggctagtgctgccataaccctaaagaaattggtcatccctagtctgaaatcttggactcgtagagtcgttgctgaaggagatgaaaatgcaaagagtgaacatacttccaaactttgtgaagaaattagggaagccataaaagtttctgcatcagccttttctgatattgctaaaataaaccaagaagtgcttgcttcaaaagatgaagataggaaggtactcatgaagttaacagaagcattcgagtcacaagaaaatgtgtttaaatcattgagtgagaccttaaatcgtatcagggagaatcagctttcggattgcaatttcagaaattttgggctgctcaattcagccctcattacccttttgccaaagcttgagggtgcagcccttgtgaaggacttccgtccgatcagcctcatacatagcttcgccaagctggtaacaaagatgatggcaaataggctggctggacacttgggtgcaatggtttcacccaatcagacggcttttatcaaaaaaaggttcattcttgacaacttcatattggtgcagcgtacggccagatatctccatcaacaaagacaggctcgtatcctcttcaagttagacatttctaaggcttttgattcggtgtcatggccgtttctcattgaggttttgaggaaaatggggtttgggcagatttggtgtgatgttgtgtgtggactgttggcttcttcctccacaagaattttgctaaatggcgttcctggggagatcatttcacaccagaggggccttaggcaaggagacccactatcccctttgttgttcattttggttatggatgttctgaacttgctcattcaaaaggcttccgatgaagggttacttcagcagctatcttctgggactttacatcacaggctttctctctacgcggatgacgcggtggtttttcttaggccggtggcttcagacatcagcttggtcctggagatccttcggctttttggggaagcctcggggctcaagaccaatgtcctgaaaagtagtgtgttccccattcgttgtaccgaagatgatttgatgcgggtccaagcttctctcccctgccccatttctgattttccgtgtcaatatcttggactgcccctgtccttgggaaagctttcaaaggcccagttacaggcattggtggacaaggcagctagtgttctcccaggttggaaggccgacctgatgacaaaggcgggtcgtgctgtttatgttcagtttgttctcacggcaaaaatgatttatgctgcgatggctttggacctccctatttggaccatcaaagctattgacaagataagaagaggtttcctttggaaaggaagaaaacaagccaatggtggtcactgtttagtggcgtggggcaaggtcactaggcctaaagttctgggcggccttgggatcactgatctttggcttttgagcgtggcgcttcgagctaggtggccttggctccagagaaccgatcactctaagccttggtcggttctccctgttcaggcatgtggtgcggtggaagccttgatcaatgttgcagttgtgtctcaattgggtgatggacaggatatcctcttttggaaggatcggtggctgaatggtagaagaatcagtgaggtggcacctgaggttcttgagcatgtacctaagtgtgttgtttccaaaaggctggtaaaagatgctttaacaaatctgaattgggtggctgatataaggggtgcgctttcagttagggcgcttgcacaggttttggatctctgtgacttgctggagggcttagttcttcaacctgggattcctgataagcattcttggaagttcagcgcgtcgggggattactcctctagttctgcctaccaggttcttctccttggagctgttgaatttaggccggctgaacggatttggaagacctgggcaccaaggaaatgcaaattttttatgtggctggttgtgcatgatagatgttggacagctgacaggttggcaaaaaggggaatggatcatcccgtctgctgtccgctttgtgaccaggcggatgaaactattaatcacttattggtcgagtgcagctttgcgaagcagttttggttccttttccttcggtctggggacttccaggtgctctgtccctctacaggggatggctgctttgactcttggtgggagaagagtgccgaggtggtgggcaagcctttgtcgggtggtttcaactcgctggtcatattgggtgcgtggtcgatctggaaacacaggaataggtgtgtgtttgatggttgtagcccgaatgttgaggtcgccctttcggcagctagggaggagttgatgtgctggcgtttggctggcgctaaaactctctctttcttccatttagaggagctgtcttaggcgttaatggtggtgtgagtttgtaaaactgttgtttctgttttggggttccccccttttttcttcttaatataaaaatacgcagacctcctgcgtattcaagaaaaaaacaacacagcctattggaagagcatgttcagccttcatcatggaacgggccaattgactatcaagggagagcttttcagcaaactaatatgtatgcaacaccaccaaacaacagttttgacacagggaggaactcattcatgccattagctgctgaatcttcttatggaccatttccaggatcctactctgagcgggtgcagaggcctggtggatacggattccagcaacagacaagcagcgaccgattgaatgttgttggcccacggagcagctaccaagggggttcttctaatcaccatgctggtagtaatgccatggatgacccggcagcggttgcagcagaattgcagcgccgctgggttcccccacagccaccaggcgtcatcatgccagaggctgcggccgccatccgacaggccaggtcggttccgaggcagctgccaagcggcgatgggcgcctgggcgctgatgtcccgagacagcctgagcctgccattgccatggcgacaacagagcacgtgaacgttgcccctgaagcacctggcggggagttgccaagcgatggtggtggtgccatgactgctgatgccagcaacggtggtgggagtggagagcagcaggagcaggaagcctcttgagtgaagctttttggacgccctttgatttggttctttgagaggatctagcttgcacctgtacctgtgtgtgtagcatatgcatatgcatctgcataggtttgtgacataatgtgcctcgtgttcgaaactgcagctgtattgtagatatataaactgatcaactttacacgtgtgttacctgtgtgttctgtcataagtgtatcagctatgaggacgtatttgcttcggcccatgctaaaatattcgcaaagtttgggccaagcatgggctgaactgagcattctaatcagcaatggcccaattttgagccatgtgctttcagata

SEQ ID NO: 29630 - DNA, 3724 bp, Zea Mays
cggggatgttccagcgcgtcgtcgtcgtccgattctgtctccctcaggtcgagattcgagagttcccgtgttcgtccatccgcgctgtgaggttctccgatggccgagaagtcacccagctccgcgccgcagggtggttctggtgggaatgaatcattcgataatcttgtaattcaagctccacagcttatgagggaggattacatacagaatgctgtgaagtttctttcacatccgaaagtgaagggttctccagtatttcacaggcgttccttcctggaaaagaaaggccttacaagtgaagaaattgatgaggccttttgtagagttcctgaccctaagccaaatggaacagatgctgtagctgctggtaggcaacaagcaaacaatcccagtcaatctgttgtgctgcaaccttatacagaagttcaaccacaagcagctactgcctctgccactgctggaccaattgttccacatacaaaggcacagttgagctgggtaaacacactccttggtgcaggtctttttcttggtttaggggctagtgctgccataaccctaaagaaattggtcatccctagtctgaaatcttggactcgtagagtcgttgctgaaggagatgaaaatgcaaagagtgaacatacttccaaactttgtgaagaaattagggaagccataaaagtttctgcatcagccttttctgatattgctaaaataaaccaagaagtgcttgcttcaaaagatgaagataggaaggtactcatgaagttaacagaagcattcgagtcacaagaaaatgtgtttaaatcattgagtgagaccttaaatcgtatcagggagaatcagctttcggattgcaatttcagaaattttgggctgctcaattcagccctcattacccttttgccaaagcttgagggtgcagcccttgtgaaggacttccgtccgatcagcctcatacatagcttcgccaagctggtaacaaagatgatggcaaataggctggctggacacttgggtgcaatggtttcacccaatcagacggcttttatcaaaaaaaggttcattcttgacaacttcatattggtgcagcgtacggccagatatctccatcaacaaagacaggctcgtatcctcttcaagttagacatttctaaggcttttgattcggtgtcatggccgtttctcattgaggttttgaggaaaatggggtttgggcagatttggtgtgatgttgtgtgtggactgttggcttcttcctccacaagaattttgctaaatggcgttcctggggagatcatttcacaccagaggggccttaggcaaggagacccactatcccctttgttgttcattttggttatggatgttctgaacttgctcattcaaaaggcttccgatgaagggttacttcagcagctatcttctgggactttacatcacaggctttctctctacgcggatgacgcggtggtttttcttaggccggtggcttcagacatcagcttggtcctggagatccttcggctttttggggaagcctcggggctcaagaccaatgtcctgaaaagtagtgtgttccccattcgttgtaccgaagatgatttgatgcgggtccaagcttctctcccctgccccatttctgattttccgtgtcaatatcttggactgcccctgtccttgggaaagctttcaaaggcccagttacaggcattggtggacaaggcagctagtgttctcccaggttggaaggccgacctgatgacaaaggcgggtcgtgctgtttatgttcagtttgttctcacggcaaaaatgatttatgctgcgatggctttggacctccctatttggaccatcaaagctattgacaagataagaagaggtttcctttggaaaggaagaaaacaagccaatggtggtcactgtttagtggcgtggggcaaggtcactaggcctaaagttctgggcggccttgggatcactgatctttggcttttgagcgtggcgcttcgagctaggtggccttggctccagagaaccgatcactctaagccttggtcggttctccctgttcaggcatgtggtgcggtggaagccttgatcaatgttgcagttgtgtctcaattgggtgatggacaggatatcctcttttggaaggatcggtggctgaatggtagaagaatcagtgaggtggcacctgaggttcttgagcatgtacctaagtgtgttgtttccaaaaggctggtaaaagatgctttaacaaatctgaattgggtggctgatataaggggtgcgctttcagttagggcgcttgcacaggttttggatctctgtgacttgctggagggcttagttcttcaacctgggattcctgataagcattcttggaagttcagcgcgtcgggggattactcctctagttctgcctaccaggttcttctccttggagctgttgaatttaggccggctgaacggatttggaagacctgggcaccaaggaaatgcaaattttttatgtggctggttgtgcatgatagatgttggacagctgacaggttggcaaaaaggggaatggatcatcccgtctgctgtccgctttgtgaccaggcggatgaaactattaatcacttattggtcgagtgcagctttgcgaagcagttttggttccttttccttcggtctggggacttccaggtgctctgtccctctacaggggatggctgctttgactcttggtgggagaagagtgccgaggtggtgggcaagcctttgtcgggtggtttcaactcgctggtcatattggggccaattgactatcaagggagagcttttcagcaaactaatatgtatgcaacaccaccaaacaacagttttgacacagggaggaactcattcatgccattagctgctgaatcttcttatggaccatttccaggatcctactctgagcgggtgcagaggcctggtggatacggattccagcaacagacaagcagcgaccgattgaatgttgttggcccacggagcagctaccaagggggttcttctaatcaccatgctggtagtaatgccatggatgacccggcagcggttgcagcagaattgcagcgccgctgggttcccccacagccaccaggcgtcatcatgccagaggctgcggccgccatccgacaggccaggtcggttccgaggcagctgccaagcggcgatgggcgcctgggcgctgatgtcccgagacagcctgagcctgccattgccatggcgacaacagagcacgtgaacgttgcccctgaagcacctggcggggagttgccaagcgatggtggtggtgccatgactgctgatgccagcaacggtggtgggagtggagagcagcaggagcaggaagcctcttgagtgaagctttttggacgccctttgatttggttctttgagaggatctagcttgcacctgtacctgtgtgtgtagcatatgcatatgcatctgcataggtttgtgacataatgtgcctcgtgttcgaaactgcagctgtattgtagatatataaactgatcaactttacacgtgtgttacctgtgtgttctgtcataagtgtatcagctatgaggacgtatttgcttcggcccatgctaaaatattcgcaaagtttgggccaagcatgggctgaactgagcattctaatcagcaatggcccaattttgagccatgtgctttcagata

SEQ ID NO: 29631 - DNA, 3723 bp, Zea Mays
cggggatgttccagcgcgtcgtcgtcgtccgattctgtctccctcaggtcgagattcgagagttcccgtgttcgtccatccgcgctgtgaggttctccgatggccgagaagtcacccagctccgcgccgcagggtggttctggtgggaatgaatcattcgataatcttgtaattcaagctccacagcttatgagggaggattacatacagaatgctgtgaagtttctttcacatccgaaagtgaagggttctccagtatttcacaggcgttccttcctggaaaagaaaggccttacaagtgaagaaattgatgaggccttttgtagagttcctgaccctaagccaaatggaacagatgctgtagctgctggtaggcaacaagcaaacaatcccagtcaatctgttgtgctgcaaccttatacagaagttcaaccacaagcagctactgcctctgccactgctggaccaattgttccacatacaaaggcacagttgagctgggtaaacacactccttggtgcaggtctttttcttggtttaggggctagtgctgccataaccctaaagaaattggtcatccctagtctgaaatcttggactcgtagagtcgttgctgaaggagatgaaaatgcaaagagtgaacatacttccaaactttgtgaagaaattagggaagccataaaagtttctgcatcagccttttctgatattgctaaaataaaccaagaagtgcttgcttcaaaagatgaaggaaggtactcatgaagttaacagaagcattcgagtcacaagaaaatgtgtttaaatcattgagtgagaccttaaatcgtatcagggagaatcagctttcggattgcaatttcagaaattttgggctgctcaattcagccctcattacccttttgccaaagcttgagggtgcagcccttgtgaaggacttccgtccgatcagcctcatacatagcttcgccaagctggtaacaaagatgatggcaaataggctggctggacacttgggtgcaatggtttcacccaatcagacggcttttatcaaaaaaaggttcattcttgacaacttcatattggtgcagcgtacggccagatatctccatcaacaaagacaggctcgtatcctcttcaagttagacatttctaaggcttttgattcggtgtcatggccgtttctcattgaggttttgaggaaaatggggtttgggcagatttggtgtgatgttgtgtgtggactgttggcttcttcctccacaagaattttgctaaatggcgttcctggggagatcatttcacaccagaggggccttaggcaaggagacccactatcccctttgttgttcattttggttatggatgttctgaacttgctcattcaaaaggcttccgatgaagggttacttcagcagctatcttctgggactttacatcacaggctttctctctacgcggatgacgcggtggtttttcttaggccggtggcttcagacatcagcttggtcctggagatccttcggctttttggggaagcctcggggctcaagaccaatgtcctgaaaagtagtgtgttccccattcgttgtaccgaagatgatttgatgcgggtccaagcttctctcccctgccccatttctgattttccgtgtcaatatcttggactgcccctgtccttgggaaagctttcaaaggcccagttacaggcattggtggacaaggcagctagtgttctcccaggttggaaggccgacctgatgacaaaggcgggtcgtgctgtttatgttcagtttgttctcacggcaaaaatgatttatgctgcgatggctttggacctccctatttggaccatcaaagctattgacaagataagaagaggtttcctttggaaaggaagaaaacaagccaatggtggtcactgtttagtggcgtggggcaaggtcactaggcctaaagttctgggcggccttgggatcactgatctttggcttttgagcgtggcgcttcgagctaggtggccttggctccagagaaccgatcactctaagccttggtcggttctccctgttcaggcatgtggtgcggtggaagccttgatcaatgttgcagttgtgtctcaattgggtgatggacaggatatcctcttttggaaggatcggtggctgaatggtagaagaatcagtgaggtggcacctgaggttcttgagcatgtacctaagtgtgttgtttccaaaaggctggtaaaagatgctttaacaaatctgaattgggtggctgatataaggggtgcgctttcagttagggcgcttgcacaggttttggatctctgtgacttgctggagggcttagttcttcaacctgggattcctgataagcattcttggaagttcagcgcgtcgggggattactcctctagttctgcctaccaggttcttctccttggagctgttgaatttaggccggctgaacggatttggaagacctgggcaccaaggaaatgcaaattttttatgtggctggttgtgcatgatagatgttggacagctgacaggttggcaaaaaggggaatggatcatcccgtctgctgtccgctttgtgaccaggcggatgaaactattaatcacttattggtcgagtgcagctttgcgaagcagttttggttccttttccttcggtctggggacttccaggtgctctgtccctctacaggggatggctgctttgactcttggtgggagaagagtgccgaggtggtgggcaagcctttgtcgggtggtttcaactcgctggtcatattggggccaattgactatcaagggagagcttttcagcaaactaatatgtatgcaacaccaccaaacaacagttttgacacagggaggaactcattcatgccattagctgctgaatcttcttatggaccatttccaggatcctactctgagcagcgggtgcagaggcctggtggatacggattccagcaacagacaagcagcgaccgattgaatgttgttggcccacggagcagctaccaagggggttcttctaatcaccatgctggtagtaatgccatggatgacccggcagcggttgcagcagaattgcagcgccgctgggttcccccacagccaccaggcgtcatcatgccagaggctgcggccgccatccgacaggccaggtcggttccgaggcagctgccaagcggcgatgggcgcctgggcgctgatgtcccgagacagcctgagcctgccattgccatggcgacaacagagcacgtgaacgttgcccctgaagcacctggcggggagttgccaagcgatggtggtggtgccatgactgctgatgccagcaacggtggtgggagtggagagcagcaggagcaggaagcctcttgagtgaagctttttggacgccctttgatttggttctttgagaggatctagcttgcacctgtacctgtgtgtgtagcatatgcatatgcatctgcataggtttgtgacataatgtgcctcgtgttcgaaactgcagctgtattgtagatatataaactgatcaactttacacgtgtgttacctgtgtgttctgtcataagtgtatcagctatgaggacgtatttgcttcggcccatgctaaaatattcgcaaagtttgggccaagcatgggctgaactgagcattctaatcagcaatggcccaattttgagccatgtgctttcagata

SEQ ID NO: 29632 - DNA, 3758 bp, Zea Mays
cggggatgttccagcgcgtcgtcgtcgtccgattctgtctccctcaggtcgagattcgagagttcccgtgttcgtccatccgcgctgtgaggttctccgatggccgagaagtcacccagctccgcgccgcagggtggttctggtgggaatgaatcattcgataatcttgtaattcaagctccacagcttatgagggaggattacatacagaatgctgtgaagtttctttcacatccgaaagtgaagggttctccagtatttcacaggcgttccttcctggaaaagaaaggccttacaagtgaagaaattgatgaggccttttgtagagttcctgaccctaagccaaatggaacagatgctgtagctgctggtaggcaacaagcaaacaatcccagtcaatctgttgtgctgcaaccttatacagaagttcaaccacaagcagctactgcctctgccactgctggaccaattgttccacatacaaaggcacagttgagctgggtaaacacactccttggtgcaggtctttttcttggtttaggggctagtgctgccataaccctaaagaaattggtcatccctagtctgaaatcttggactcgtagagtcgttgctgaaggagatgaaaatgcaaagagtgaacatacttccaaactttgtgaagaaattagggaagccataaaagtttctgcatcagccttttctgatattgctaaaataaaccaagaagtgcttgcttcaaaagatgaagataggaaggtactcatgaagttaacagaagcattcgagtcacaagaaaatgtgtttaaatcattgagtgagaccttaaatcgtatcagggagaatcagctttcggattgcaatttcagaaattttgggctgctcaattcagccctcattacccttttgccaaagcttgagggtgcagcccttgtgaaggacttccgtccgatcagcctcatacatagcttcgccaagctggtaacaaagatgatggcaaataggctggctggacacttgggtgcaatggtttcacccaatcagacggcttttatcaaaaaaaggttcattcttgacaacttcatattggtgcagcgtacggccagatatctccatcaacaaagacaggctcgtatcctcttcaagttagacatttctaaggcttttgattcggtgtcatggccgtttctcattgaggttttgaggaaaatggggtttgggcagatttggtgtgatgttgtgtgtggactgttggcttcttcctccacaagaattttgctaaatggcgttcctggggagatcatttcacaccagaggggccttaggcaaggagacccactatcccctttgttgttcattttggttatggatgttctgaacttgctcattcaaaaggcttccgatgaagggttacttcagcagctatcttctgggactttacatcacaggctttctctctacgcggatgacgcggtggtttttcttaggccggtggcttcagacatcagcttggtcctggagatccttcggctttttggggaagcctcggggctcaagaccaatgtcctgaaaagtagtgtgttccccattcgttgtaccgaagatgatttgatgcgggtccaagcttctctcccctgccccatttctgattttccgtgtcaatatcttggactgcccctgtccttgggaaagctttcaaaggcccagttacaggcattggtggacaaggcagctagtgttctcccaggttggaaggccgacctgatgacaaaggcgggtcgtgctgtttatgttcagtttgttctcacggcaaaaatgatttatgctgcgatggctttggacctccctatttggaccatcaaagctattgacaagataagaagaggtttcctttggaaaggaagaaaacaagccaatggtggtcactgtttagtggcgtggggcaaggtcactaggcctaaagttctgggcggccttgggatcactgatctttggcttttgagcgtggcgcttcgagctaggtggccttggctccagagaaccgatcactctaagccttggtcggttctccctgttcaggcatgtggtgcggtggaagccttgatcaatgttgcagttgtgtctcaattgggtgatggacaggatatcctcttttggaaggatcggtggctgaatggtagaagaatcagtgaggtggcacctgaggttcttgagcatgtacctaagtgtgttgtttccaaaaggctggtaaaagatgctttaacaaatctgaattgggtggctgatataaggggtgcgctttcagttagggcgcttgcacaggttttggatctctgtgacttgctggagggcttagttcttcaacctgggattcctgataagcattcttggaagttcagcgcgtcgggggattactcctctagttctgcctaccaggttcttctccttggagctgttgaatttaggccggctgaacggatttggaagacctgggcaccaaggaaatgcaaattttttatgtggctggttgtgcatgatagatgttggacagctgacaggttggcaaaaaggggaatggatcatcccgtctgctgtccgctttgtgaccaggcggatgaaactattaatcacttattggtcgagtgcagctttgcgaagcagttttggttccttttccttcggtctggggacttccaggtgctctgtccctctacaggggatggctgctttgactcttggtgggagaagagtgccgaggtggtgggcaagcctttgtcgggtggtttcaactcgctggtcatattgggtgcgtggtcgatctggaaacacaggaatagggccaattgactatcaagggagagcttttcagcaaactaatatgtatgcaacaccaccaaacaacagttttgacacagggaggaactcattcatgccattagctgctgaatcttcttatggaccatttccaggatcctactctgagcagcgggtgcagaggcctggtggatacggattccagcaacagacaagcagcgaccgattgaatgttgttggcccacggagcagctaccaagggggttcttctaatcaccatgctggtagtaatgccatggatgacccggcagcggttgcagcagaattgcagcgccgctgggttcccccacagccaccaggcgtcatcatgccagaggctgcggccgccatccgacaggccaggtcggttccgaggcagctgccaagcggcgatgggcgcctgggcgctgatgtcccgagacagcctgagcctgccattgccatggcgacaacagagcacgtgaacgttgcccctgaagcacctggcggggagttgccaagcgatggtggtggtgccatgactgctgatgccagcaacggtggtgggagtggagagcagcaggagcaggaagcctcttgagtgaagctttttggacgccctttgatttggttctttgagaggatctagcttgcacctgtacctgtgtgtgtagcatatgcatatgcatctgcataggtttgtgacataatgtgcctcgtgttcgaaactgcagctgtattgtagatatataaactgatcaactttacacgtgtgttacctgtgtgttctgtcataagtgtatcagctatgaggacgtatttgcttcggcccatgctaaaatattcgcaaagtttgggccaagcatgggctgaactgagcattctaatcagcaatggcccaattttgagccatgtgctttcagata

SEQ ID NO: 29633 - DNA, 1819 bp, Zea Mays
ataagtttcaagagtaggctacaaaatggatgctctagcttcttgcatcaggcgaaatcataaaaggcgcgcccttttgtggacacagcctaatgactgctggtggttaggactgtgcaaggctggaactaaggtggttctggtgggaatgaatcattcgataatcttgtaattcaagctccacagcttatgagggaggattacatacagaatgctgtgaagtttctttcacatccgaaagtgaagggttctccagtatttcacaggcgttccttcctggaaaagaaaggccttacaagtgaagaaattgatgaggccttttgtagagttcctgaccctaagccaaatggaacagatgctgtagctgctggtaggcaacaagcaaacaatcccagtcaatctgttgtgctgcaaccttatacagaagttcaaccacaagcagctactgcctctgccactgctggaccaattgttccacatacaaaggcacagttgagctgggtaaacacactccttggtgcaggtctttttcttggtttaggggctagtgctgccataaccctaaagaaattggtcatccctagtctgaaatcttggactcgtagagtcgttgctgaaggagatgaaaatgcaaagagtgaacatacttccaaactttgtgaagaaattagggaagccataaaagtttctgcatcagccttttctgatattgctaaaataaaccaagaagtgcttgcttcaaaagatgaagataggaaggtactcatgaagttaacagaagcattcgagtcacaagaaaatgtgtttaaatcattgagtgagaccttaaatcgtatcagggagaatcagctttcacaacacagcctattggaagagcatgttcagccttcatcatggaacgggccaattgactatcaagggagagcttttcagcaaactaatatgtatgcaacaccaccaaacaacagttttgacacagggaggaactcattcatgccattagctgctgaatcttcttatggaccatttccaggatcctactctgagcgggtgcagaggcctggtggatacggattccagcaacagacaagcagcgaccgattgaatgttgttggcccacggagcagctaccaagggggttcttctaatcaccatgctggtagtaatgccatggatgacccggcagcggttgcagcagaattgcagcgccgctgggttcccccacagccaccaggcgtcatcatgccagaggctgcggccgccatccgacaggccaggtcggttccgaggcagctgccaagcggcgatgggcgcctgggcgctgatgtcccgagacagcctgagcctgccattgccatggcgacaacagagcacgtgaacgttgcccctgaagcacctggcggggagttgccaagcgatggtggtggtgccatgactgctgatgccagcaacggtggtgggagtggagagcagcaggagcaggaagcctcttgagtgaagctttttggacgccctttgatttggttctttgagaggatctagcttgcacctgtacctgtgtgtgtagcatatgcatatgcatctgcataggtttgtgacataatgtgcctcgtgttcgaaactgcagctgtattgtagatatataaactgatcaactttacacgtgtgttacctgtgtgttctgtcataagtgtatcagctatgaggacgtatttgcttcggcccatgctaaaatattcgcaaagtttgggccaagcatgggctgaactgagcattctaatcagcaatggcccaattttgagccatgtgctttcagata

SEQ ID NO: 29634 - DNA, 1319 bp, Zea Mays
gttcttctccttggagctgttgaatttaggccggctgaacggatttggaagacctgggcaccaaggaaatgcaaattttttatgtggctggttgtgcatgatagatgttggacagctgacaggttggcaaaaaggggaatggatcatcccgtctgctgtccgctttgtgaccaggcggatgaaactattaatcacttattggtcgagtgcagctttgcgaagcagttttggttccttttccttcggtctggggacttccaggtgctctgtccctctacaggggatggctgctttgactcttggtgggagaagagtgccgaggtggtgggcaagcctttgtcgggtggtttcaactcgctggtcatattgggtgcgtggtcgatctggaaacacaggaatagggccaattgactatcaagggagagcttttcagcaaactaatatgtatgcaacaccaccaaacaacagttttgacacagggaggaactcattcatgccattagctgctgaatcttcttatggaccatttccaggatcctactctgagcgggtgcagaggcctggtggatacggattccagcaacagacaagcagcgaccgattgaatgttgttggcccacggagcagctaccaagggggttcttctaatcaccatgctggtagtaatgccatggatgacccggcagcggttgcagcagaattgcagcgccgctgggttcccccacagccaccaggcgtcatcatgccagaggctgcggccgccatccgacaggccaggtcggttccgaggcagctgccaagcggcgatgggcgcctgggcgctgatgtcccgagacagcctgagcctgccattgccatggcgacaacagagcacgtgaacgttgcccctgaagcacctggcggggagttgccaagcgatggtggtggtgccatgactgctgatgccagcaacggtggtgggagtggagagcagcaggagcaggaagcctcttgagtgaagctttttggacgccctttgatttggttctttgagaggatctagcttgcacctgtacctgtgtgtgtagcatatgcatatgcatctgcataggtttgtgacataatgtgcctcgtgttcgaaactgcagctgtattgtagatatataaactgatcaactttacacgtgtgttacctgtgtgttctgtcataagtgtatcagctatgaggacgtatttgcttcggcccatgctaaaatattcgcaaagtttgggccaagcatgggctgaactgagcattctaatcagcaatggcccaattttgagccatgtgctttcagata

SEQ ID NO: 29635 - DNA, 1911 bp, Zea Mays
caagcgagcaatacaaaatcagcgagcaggcgggctggcatcggccggttgcggtggcatccataggactctcagattcccatctcgtcttcttatctccacttctccctccacacacatcccctcctctctctcctctgtttataaaactcgccaggcgcaatctctctcgctccgtccatccccgtcgccagcatcgcttccacttcggtctcagcgacggtcgccaccaccgctcccctccctctccccctcctcgcccagcggcaattaccacagcctccccagcaagccgggatggctgcactcaaggcatcgttccggggtgagctcagcgccgcttccttcctcgactccagcaggggacctctcgtccagcacaaagtggattttacgtttcaaaggaagggcaaacgagctatttcactgagaaggacatgctgttctatgcaacaggctccaccaccagcatggcctgggcgagctgttgctgagcctggccggaggtcatgggatggcccaaagcctatctcgattgttggttcaactggttccataggaacacagacattggacattgttgcggagaatcctgataagttcagagttgttgctcttgctgctggatccaatgtcacgcttctagctgatcaggtcaaaacattcaaacctaagttggttgctgtaagaaacgaatcattagttgatgaattgaaagaagccttggctgattgcgaagagaagccagaaattattcctggggagcaaggtgtcatagaagttgctcgccatccagatgcagttacagttgtcacagggatagtaggttgtgcagggctgaagcctacagttgctgcaattgaagctggtaaagacatagcattggcaaacaaagagacacttattgcaggtggtccttttgtgcttccccttgcacacaaacacaaagtgaaaattcttccagctgattctgagcactctgcaatatttcagtgtatacaaggcttgtccgaaggtgcacttcgtcgcattattctaactgcatcaggtggtgctttcagggactggccagttgacaggctgaaagatgtaaaagttgctgacgctttaaagcatccaaactggaatatgggaaggaagatcacagtagattctgctactttattcaacaagggtttagaagttattgaagcacattatttatttggtgctgaatatgatgacattgagattgtgattcacccacagtctatcatacactctatggttgaaacccaggattcatctgtcctagctcagttgggatggccagatatgcggttaccaatcttatacaccttatcatggccagatagaatctattgctctgaggtcacctggcctcgtctggatctttgcaagttgggttcactgacattcaaagctcccgacaacgtaaaatacccatcaatggacctagcctatgcagctggccgggctgggggcaccatgacaggagttctgagcgctgctaatgagaaggccgtggagttgttcattgacgagaactacctggacatattcaaggtggtggagcttacatgtaacgcgcatcggaacgagctggtaacaagcccgtcactggaggagatcgtccattacgatctgtgggcgaggagatatgcagccagtctacaaccatcttctggcctgagccctgtccctgcataataggtcgtcacgacaacgttgtacagcaggagttctaagatatgatgtgtttgtggctcctgtttccatgttcaattttcaggcctccacatgaataaaatgcatctattccatgtgatttcttttatggatgaagtgtgcgaagtcgggtgggaatcagatgcatccctttcggtggagttcttacgtagggttgagcag

SEQ ID NO: 29636 - DNA, 1910 bp, Zea Mays
caagcgagcaatacaaaatcagcgagcaggcgggctggcatcggccggttgcggtggcatccataggactctcagattcccatctcgtcttcttatctccacttctccctccacacacatcccctcctctctctcctctgtttataaaactcgccaggcgcaatctctctcgctccgtccatccccgtcgccagcatcgcttccacttcggtctcagcgacggtcgccaccaccgctcccctccctctccccctcctcgcccagcggcaattaccacagcctccccagcaagccgggatggctgcactcaaggcatcgttccggggtgagctcagcgccgcttccttcctcgactccagcaggggacctctcgtccagcacaaagtggattttacgtttcaaaggaagggcaaacgagctatttcactgagaaggacatgctgttctatgcaacaggctccaccaccagcatggcctgggcgagctgttgctgagcctggccggaggtcatgggatggcccaaagcctatctcgattgttggttcaactggttccataggaacacagacattggacattgttgcggagaatcctgataagttcagagttgttgctcttgctgctggatccaatgtcacgcttctagctgatcaggtcaaaacattcaaacctaagttggttgctgtaagaaacgaatcattagttgatgaattgaaagaagccttggctgattgcgaagagaagccagaaattattcctggggagcaaggtgtcatagaagttgctcgccatccagatgcagttacagttgtcacagggatagtaggttgtgcagggctgaagttgctgcaattgaagctggtaaagacatagcattggcaaacaaagagacacttattgcaggtggtccttttgtgcttccccttgcacacaaacacaaagtgaaaattcttccagctgattctgagcactctgcaatatttcagtgtatacaaggcttgtccgaaggtgcacttcgtcgcattattctaactgcatcaggtggtgctttcagggactggccagttgacaggctgaaagatgtaaaagttgctgacgctttaaagcatccaaactggaatatgggaaggaagatcacagtagattctgctactttattcaacaagggtttagaagttattgaagcacattatttatttggtgctgaatatgatgacattgagattgtgattcacccacagtctatcatacactctatggttgaaacccaggattcatctgtcctagctcagttgggatggccagatatgcggttaccaatcttatacaccttatcatggccagatagaatctattgctctgaggtcacctggcctcgtctggatctttgcaagttgggttcactgacattcaaagctcccgacaacgtaaaatacccatcaatggacctagcctatgcagctggccgggctgggggcaccatgacaggagttctgagcgctgctaatgagaaggccgtggagttgttcattgacgagaagattagctacctggacatattcaaggtggtggagcttacatgtaacgcgcatcggaacgagctggtaacaagcccgtcactggaggagatcgtccattacgatctgtgggcgaggagatatgcagccagtctacaaccatcttctggcctgagccctgtccctgcataataggtcgtcacgacaacgttgtacagcaggagttctaagatatgatgtgtttgtggctcctgtttccatgttcaattttcaggcctccacatgaataaaatgcatctattccatgtgatttcttttatggatgaagtgtgcgaagtcgggtgggaatcagatgcatccctttcggtggagttcttacgtagggttgagcag

SEQ ID NO: 29637 - DNA, 521 bp, Zea Mays
ctgcttccacctcaaccaccctggtcttctagctcagacttcaccgttgggttataaatcgcaagcgctgcagcctcctcgtcctcccaaccctagagttctagacgtcgagctcacccaggacctgactcgtggaaaagcagagaggagcattgccacctggttactcgcccatgctgtcgttctgagcgcatggtcgagtcaaggtgcatcgcgggtggttggtgaagtcgttcatgggctcgacggcaaggattgaccattggggcggtggagattgctcaccggaaccactgcgccgtcgtggagctgcgttccatcatgggcgattgtctctacgcccgaatccgcgatgagcaagtgatcgaggacctcggtaccctgtgggtggaaaatactgagcaggaactcgttgaaggcaagttgtgcccttgatcactcttcgttacctaataatgttcgatgttaatcactgtgacttgctcatgttaatttgatgggatctaatagctttccctagc

SEQ ID NO: 29638 - DNA, 4236 bp, Zea Mays
gttcatgttgtattgggtctcatatagagtccttgttgtacatggtctctatcctgtatcagtgtatatatttgggtctattgccctcgtacaatatttgtgctattcataacatgctgagttgtgtgctatggctcttgcaaccaaaggggctcgacaacttgggtagtggatgctctggattctaaattagccccaggtgctaagccacccatgttggccctgcctgaacctggtcctggacctctggtccttgcttcggatgatatgtccctaagtgaccaggcaccagactctctaacgagttatgaagcaagaaagatggacttcttcaacacaatcagtaaaaggccaattgaaattctcccgattctaaagcccagtcagaggaaagtgacatccttagggctggctgctcctcgtcgaagcaggagagtacctgggagtaggaatggaattcagcatgcaagactggggtagcagatctgtcagaaaagtcatgaagaccctgccaatcatcaatgattctggtgatattagtcctcaagcccttgatgaatatgctaagcttttcaagcatccccttccacaaatccatgtggaggccctggcggctctttttggctggtcctttcaagcatccccttccattagagctctatctttcttctttggtggtctggttgttgtgtcttttttatggatccttcaaaacttttgatctggaatgtgaggggtttgaactcttctgtaagacaagattcggtgaaagaatttgtgatttcctcctaggtggatgtgatctgcatttaggaaactaaaatgcaaagtgtccctagaggatctatcatttctatgctagttgcataattcactgcttatgtttttctcccatcaattggggcaagtgggggagtgcttgtagcctggaagcggcatattggttatacaggacagcatagaattgacagtcattgtatttcagtccaattttgcaatgacaaaggacatctctggtggttgacttgtgtctatggtccacagggagacagtgaaaagattcagccaggaaatcagagatgtaagagctgcatgcctgcatgtgagggaccttggatattggccggtgatttcaacctcatctataaggcatctgacaaaaataaatccaatatcaacagggccatgatgggccggtttagaagaatgattaatgatttagctctcaaggcaatccctctacatggacgcaaatacacagggtctaatcaacaggataatcctgtcctggttaaactggacaggtgttcagctcagttgattgggaaataatgttcccaaatgtcctcctccagagtgcagcttctctggactctgaccactgccccctgatcttgggtcttagagataacatgtttgggaaacgtagatttcacttcgagtccttttggaccaaaatcgaaggctttcatgaacctgtccaggcagcatgggactcggtggaaactgacaattctcctttcctgacccttgacaagaaacttaaggtgacaactaaaagattgcagggttggagtgagaagcgggtgggtcatgttcgatcttagttggctttggcaaaggagttgttacatacgcttcagatggcgcaggatattagaaccctctccccggctaaggtctggctcaagaataaactgaaaaaacagaccctgctgcttgcttctttcaagcgcactatggcaagactgagatcaaggattacatggcttaaagaaggggatgctaactcaaagttgttccacatgcatgcaaggcatcgcaaaaggaagaatccggtcactaaactggtggatggagaccttatccatataaaccatactgattggtggtgaatgacttctactccactctcattggtcagcttgggaacagagaaaggacaattgatctagaggcccttggtctgccaagacatgcactatcggatcttgactcctttctcagagcatgaagtttgggaaaccatcagtgagcttccttataaaccagactaatcaggttaaggacttttgcccaataagcctagtgcacagttttgcaaagcagattactaagatcctggctaatcggttggcaaaaagattgaatgcgatggtttccccaagtcaaagcgctttcataaaaggaaggttcatccaagataatttcatgttagtgcaacaaacctcaaagttgttccatcaacataacatgcctagaatgtttttcaagttggacataacaaaggctttcgactctgtctcttggcccatcctaattgaagtaatgcagcagatgggttttggacatatctggcgagacattgtctgtggtttattaccctcttccactactcaggtgttgctcaatggtgtcccgggtaaactgattatgcatagaagaggacttaggcagggagatcctctctccccgatgctatttatccttgctatggatgttcttggccttctgtattccaaagctgagggagcgggcttactccaacaaccgtcaagaaggaaaaggcttcacagagtctcgatgtatgcagatgatgtggcgttgttcttgcaccctacagctatagacatttcaacttctctggatatcctcttgctttttgtgatgcgtcaggcctttgctataatccacagaaatcaaatgtgtaccctatcaaatgccccgaggagactattgacgaaattgggattgcagcctttgcttgcagatatctgggtctccccttgtctttacataaattatccaggaatcaggctcagcagtttgtagacaaaattgcagaccgcctaccaaactggaaggccgacctgatgagtagagcaggaagaagaattctagtgcagcatgtcctcactagcatgacggtctatatggcatatggccattgaagcaattgataaaataagaaaaggttttctctggcgaggtagaaaggaggtgaaaggggggcattacttggtggcatggggaaaagtgtgtcgtcctttgcaacttggaggtctgggtattgctagccttcctaacctctgttgggccctccacatgcaatggctttggttgcaaaaaactgacccaagacgcccttggtctagcatgtccatccaagttcctagcacgacccgttccttctccaaggtgctgatctctgaggtggggaatgggaccaacatcatgttttggacagataaatggatccatggcaaaagggtctcagatattgctcccagattattcagcattattccaaaaataattattaacagaaggactatgcagcacgccctattgaacagacgatggattgcagacatcaaagtggctcttacagttggagccattgtagattatctacacctctggaatatccttgcagattttgtgctgcagcctaacactgaggatagacacattttcagcttatcttcgaatggaagatactctgcaaagtcatcttatattggttttttccatgggtctaccacatttgggcactataaaagggtttggagatcttgggctccaccaaagtgttgttttttcatttggttggtggcacataatagatgttggacagctgatcgcttggcaaaaaggggattgaatcaccctatcagatgtcctttatgtgacgagcaaggtgaaaccgtgaaccacttgctcgtgaattgtgtcttctcaagagttttctggtacaacctgctaagaaagtttgggctgcatagtttagccccaaagccatatgcagtttcttttatggattggtgggagatggtatcagagacagcaaatggtctggtaagggaaggtcttgactccctcatcattttaggatcgtggatgatttggaagcatcgtaatagaatcattttttatggagggcctcctagccttcctctgattatggagcatgcagatgaggaaagaagaggctgggaaattgttggagccaaagggctctccctcttgggtgcccccctgcataggttgctgtagggagtgtgtgtgtgtgtatgtttatggatcctttcatgtacgagtgttactggcctgcagccctccatagggagtgcgttgttttttgggtctatttagacccttgtctctctcttcttaatatatatttaaaacgcagtcctcctgcgtttttcaaaaaaaagggcattaacatggtct

SEQ ID NO: 29639 - DNA, 4785 bp, Zea Mays
gtaaataaagcgataaggcgacataaggaaatcgacccctttttaccttttaagcggtaaagcgtaaggcgagacgataccttaattatatagataaatataaaaattagaccaaatattagtctaacaaatacaaaaaaacacgaaaaaagaaagaaaaaaaagcccattaccaactagcctagcccagccaaacaccacaattttaggttaaccccagcacaacagtcgcagttcttccacgcacaaccgcttgagcacttctttgtcgcagatccctcgccgcagcctccctataccaccgccgccgtctcttcctcgcacgcctccgcctcttccccgtgtgccgcctcttcccctcgccttaactttgcttcctcccagttgccttaccgctttagcaacgccttaattgcacgcagaaattgtccctatctaatatcaagatatacaatacccagaattaataaggtataaagagttcacaatggtccactagcactggaatattatcacaaccctactagggaggggtcatggccgctgcagttggtgtggaagagggggatgggttgtggctagggcaggggaggaggcgtagggagagagggaggtaagcacatagagagggagaatcaatagctctattttgctcagatcaaaatcgttacaatgtccccatacaatgtccccatatttatggtttcctaatcaaactctactttatttattacaaacttatcaaaggctatctccgaatttccatctattcccaattttggattctcccgacacgaggactctaggggctacacccccttgctcatgtgcctccctagtagcacgccaagtgaggtggcggctcgccagggcccggtgttgggtctttgtttacccgataggcttgttgcagcggcccatatttaaacctatgacaaatacagtacatgcactgatgcatttatgagtacgactgcactacatgtggtgtattgttaaaacaggaaacctaaacacaattatagcaaatagctactccagtgttatcaaatccaagagtgctcataaattaatgttatgacacttatcttgaacatttggatgctagaccctaatcattgttatgatagacatgtaatccctagcattgttttcagatcgtccgactaatcgcaattagtcaggttgatcggtactctcagctagatcatggtgttcgattcgatcaggttagctgatcatctgtatcgtccgattagtcgacgatatggaatgattaatcgtctagttagcgatcagtcacgataaatactcagggtcagggtagtccaacagtagagttagccccactagatcctcctgtctcttcgtcttccctagaatccctacagacatggtacctgtaccctgcagaccaagagcccacgacgactgctgtgctacaggattggcggctcccttctctctcccttgttcaccgttctctctacaccggctgcccagacacacaggaactggagatgagtacctcgctgaaggtatatgtctgtagtcgcccaatcttttctcattttgttgttcggttcagacttcggatcaaaatttcaaacttcagtttagacttcagacttcagagctcctgtcttggcaatgttatgtacttcagacttcagagctttatatagacttgttgctagtgttgtactgctgtttgtactattcatttcatactaatgccttgtctatactatatacttgtgcttgtcctgagcaagtctctatactatataagtatatatctatatatagtatacatatatatcactatgtatactatatatagatatgtcctggaaatacataaggtgaccaggtggacgattagggtcgatcaggggcgactaatcaccttgatcgtcgcctaatcgcgactaatcagttgattgtccagtagcatcgatcagacgaccaggcgatccgaaaacaatgctccctatattcaatcattttcatgagtactagtagttgatactgctatcatataggaaggatatcactttgctcttttcttttacaagcaatggtcaaaaacagtatgcagtaaggaatagtggaaggcgaagtagttgatagatcaagctcagtagttggtcatttatttagccatggcggtggacttacgagtttgggtgcttaaagctattgataagattcaccggggttatcattggcaaggaggcgaaaggaggacattgtcatgtggcttggggacaggtttgtcggcctcttgagctaggcggacttggcatttccagccttagggatataaaaaaaactcgacctgcggggggtaagacagcactcgggcattgtattaagaagaagaccttctcacacaggtcgagaaaacccccgaacccctgccccacccatacacagcgacatcgaagcccatgtgagaacgaccacgaccggggctgagccttagacctgtgctttggcgtgggacagacgaggggattttttttaaccacagcctgaaattcgctcccacggggagtcgaacccaggacctgaggagtgctacttagaccacctacccaactcagtagaggccctttcagccttagggatattgcttgggcacttagaatgtgttggctttggctggcaaaaacataaccgaatcggccatgggcttccttaattattcaggtacctaaggttgtaagataattctttttggtgactatgcaaactgaaattggtaatggtgcccagctctattttggtcggatagatggttgatgggacacagaattagggacctggcaccccgcctatatgagactatccctaaacagaaggtgcgcaagaggatagttttggaggctctcacaaaccaggagctagatttctgacatacaaggaggtctcactgttggagttatttctgattatttaactttgtgcgacttggttgactcagttcagctgtggcctagaggatttgcattctttccgccttgcagccaacgggaaatattctgtaaaagaagcttatgagggtcttttcgttgggtcaacaaagtttgaaccttttcacgggatatggaaaacttggggccccccgaagaccaagttctttttgtggctggtggctcaaaggagagtttggactgttgataggctgcaaaaaagggcatggaccaccctgaaagatgccccttattgatcaagcacaagaaactttggatcatctgctgattggttgtgtctttgctagggaattctggtttaagttgttatctcaactgaatatccaaaacacggcccccagctaggcaatggagctttcatggagtggtggcataagatctgtagtcaggtccatggtgtggcacaggaaggatggaatagattgatcatccttggggtttggaccttgtggaagaactgtaatggatgtgtctttgacaaaaacgacatggtgtgcctgatgaaggtcttcatgcgctcaaaccacttgtcgagaccgcgaaggaggttgaggacgagcagacgatcggacacggcttcaccaagatccactagggcatcgaccatgcccttcatcttgcggaagtagacactgatggagggatcgccttgtacgaaggtgtagaaacagtgttaaggtggaggcacgagtctcctggttgcataatagagaaggatatagacaaccaatctcaaatgtttgatgaaaataaaagtagacacttggaatagcacccagtgctagagactcccacacgagtggggtcttcgaaagggataagctaaagcaaaccttcatccagcaaatgcggaaaggttgcttctaacccgcgatctggtgactcaatgagacagctctcgccaatgcaccagacatacccaaaagaaataacatgacatgatgaattgatgatagagtctacaagtttgcagcagccagacaacatgattctctccacggatttaatatcgcatatcacaattgagagcaacacggtcagatatcccaaataaatgtggcatgctcattactaggaaaaaaggataaagaataaagtaccttcttccatgatgatgatggggttgtcactggtgatcgactttttgatctagcagatctaccatcctaatagttcaaatggtaggtcaatgatgagataaatatgaataacattgttcaggcaaaattatacaatagacatttagacaaaggtagtgataactgacaataacattaccaatactttctggatactggctaatgcaaaaaaaggaaacatatgtcccttccctaggagagagcatcactagaaaatagaatcaacaaaggttatacaaaattagccaaaactcaattggtcactgaatagtgcacgctagcagtttcaggtaatcatcaacagggcttcttgaggacagatgagattcatgtgaagaataacagtggtcacatgaagcctccttggcttaaagatgttaacaatataagtaacaagtctagttgatataggtagacagatgggaggcagcgattaagtattcaatgagtttacttgttttacagttggttatggtataagaaatagatcatttcaattactacttcaacatgaaatatgcaacacgtggtgcacttcaatagagaacaacagtaacaacataccttgagagtattagaagggaaagttctggctttttcagcaacataaaaagatctaatgacattcagtgcatccagaaacagat

SEQ ID NO: 29640 - DNA, 1341 bp, Zea Mays
aaaggaggcgcggcctgccgaattctcctcgtcctaaaaaaccctaaccccaactccccacactcgtctcgccgggggcggcgcgatgagggctatcaccggcggcgtcgtctcctcccagccctgtcccctccacaaggccgccctcttcctcaaacgcttcaccgagtctgccgcctcccacctaccctcctccgactgctgtaactacctccgcaacgccgccgacgccacaacacagctcagccgcttccgcaaggaactcggcggcagccacaagcagggtgccgccaactccgatgcccactactatgatgatccggtgaagggcaatagaaatcacgaagatcaggagagcaaaggggacatggcgattgccgctgatgattccaaccgcgattctgccgctgaggcgaagctagatgttgcctccggtaagaagggcaataagaagaagaatggggatccactggaggatagagcggttgcccgtgctaactcgcacattctcccttcaccagaaattgccactgagaagagtaagaagaagagtcgtccgaataaggaaatcatcgtcgatgtgaagcaggagcctagttttgtggtggaagaagagctggtgagtgaaaagaagagcaagaagaaaaaagagaaggatcatgtgaaactggaggagaatgtgaatgaggtggaagagaaaattgtcaatgacagtgcagcagaacaaagagttgccataactgagagggaaaggaagaaaaagaagcataaacaagaggaatgcactgaggttgtgaaggagaagaaaatcactgatggtgatctagaccgagagaagaagaggaaaaagaagagggatagaggtgacaattatgacaatgctccagagcaggtagaacatataaataagaagcaaaagaagcatctggggattagttaggagaatccttactcattggagatgtatgggagtttgtgactggagcatttaagaagcgctgagtgggtaaccgggtgccgcctagtgcctaggccttcgtacatttggcttattaatgcacgaaaggtagaaaaacatacgtaaaaaatagagatatcaatagacaaaactgagagaagtgtgcctagcactatgccactatgcaaggtggtgatgcttgctcttcctagtgcagtagtgcctgtgcgctgtttttgttttttttttgaacaaacatatatatgaccaacttgattgagcagaaatgcataggctgtaattgttctgataggaaattgcagcggacagactaccagagattggctttgacataaccgatcccttgcaaagacacttacgag

SEQ ID NO: 29641 - DNA, 1472 bp, Zea Mays
gacaaatttcacagttcgccaatcgaacgcaacgacaaccaccagtccgtcgccttgcatcgacatcgatcgataacctacgcacggaaccagctgctaggagtgttttcctttcctatatatagtgatgtttgattgtcagctccacaaatcgataggctaaggaagctccatcgatcctgcgttattttgccggtaattgattgatagatggcgtcggagaagagcaagatcctggtggtcggcggcacggggtacctgggcaggcacgtcgtggcggcgagcgcgcggctgggccaccccacctcggcgctcgtcagggacacggcgccgtccgacccggccaaagcggcgctgctcaagaccttccaggacgccggtgtgacgctcctcaagggcgacctgtacgaccaggctagcctggtgagcgcggtgaagggcgcggacgtggtcatctccgtgctcggatcgatgcagatcgccgaccagagccggctcgtcgacgccatcaaggaggccggcaacgtcaagaggttcttcccgtcggagttcggcctggacgtggaccgcacgggcatcgtggagccggccaagtccatcctaggcgccaaggtgggcatccgccgcgccaccgaggccgcgggcataccctacacctacgccgtggccggcttcttcgcgggcttcgcgctccccaacatcgggcagctcctcgcccccggcccgcccgcggacaaggcggtcgtcctcggcgacggcgacaccaaggcggtgttcgtggaggagggcgacatcgccacgtacacggtgctggcggccgacgacccgcgcgcggagaacaaggtgctgtacatcaagccgccggccaacacgctgtcgcacaacgagctgctgtcgctgtgggagaagaagaccggcaagacgttccggcgggagtacgtgccggaggaagccgtgctcaagcagatccaagctgtaagctgtgtcgtatgcatgcagagtcgccgttccctctgaacatcatcctggcgatcgggcacgcggcgttcgtgcgtggggagcagacgggcttcgagatcgacccggccaagggggtggacgccagcgaactgtacccggatgtcaagtacaccaccgtcgacgagtacctcaaccgcttcctctgagcctgaggtctcaacaaacaggacgtcacgtacggccgcgccggggccatgatgtgtggacgtcctcatcgtcagctgcttacctaaacatcactagcagcataccgtagtgtacgctacggtagaaatggaaagacaatatgttttctaaataataagatagattaaggttcatgtcaaaagggatttatgatgagttatatcacattgttgagctaacaaaaaatatgcttaaaagagtaacattatcatagctacaatatcttttgaagccacctaaattctcacgcgaataagatgtttctg

SEQ ID NO: 29642 - DNA, 1651 bp, Zea Mays
gagacttgcaatcccatctgctccggacagagccctcgctccacaccgccggcgacctttttcctcctccgctcgaggagtgggccaacggagggagaccatatgggcgcggaggcagcgcatgggcatccgcagcagcagcctccctcgtccctccgacccggcagggaggccgcggcgccgcccgcggtggtggggctgcagctctcggcgctgatcgaccacgtcgcgcgcgtcgactggtccctcctcgaccgcgtccctggcgaccgcggcggctcgcagcaggtatccattgatgagctgaatcatattcttgatgaagtgaatgcccacatccttccttcccgcaatgatctcactccggtaactacaatagccggtggaagtgttgccaacacaatccgtgggctctcagctggttttgggatatcaactggaataattggagcttgtggagatgacaaccagggacttctgtttgtcaacaatatgagctttagtggtgtagatctcacaagattaagggcgaaaaaagggcacaccgctcagtgtgtgtgcttggtcgatgcaagcggcaatcgcaccatgcggccatgcctatctagtgcagtcaagatacaggccaatgaatttagaaaggaggatttcaaaggctccaagtggctcattgtgagatatgcacaacagaacatggaacagattgtcgaagctattaggattgcgaaacaggaaggcctttcagtatcattagatttggccagtttcgagatggttcgtgactctaggtctaaacttgttaaccttttggagactggtaacattgacctttgcttcgccaacgaagatgaagctagggaggttataggcctggaatcagatccagaggaggcgcttgcattcttgggcaagtactgcaaatgggccgtggtgacacttgcttcaaagggatgcatggcaaagcatggcaaacaggtcgttcgagtcccggccatcggggagagcaacgcggtggacacaactggagcgggcgacctgttcgcgagcgggttcctgtacgggctggtgaaggggctgccgctggaggagtgctgcaaggtcggggcgtgcagcggcgggtcggtgacgcgggcgctcggcggggaggtgcggccggagaactggcagtggatgtacaagcagatgcacgccaggggcttgctgctcccggagctcaagaactgaatgaaactattgctgctgtagctttagctagctaaatgcctgcatgctgcaccagctgttgtatctcccagctctcgaagactcgtagcatcacccagggccggtcgagtggccagtatccagccttccgttgttaattgctggcgttacctttcccctgctagtctgttaatgttactagaatattggtgtccatgaccatgcttgattgctggcatggtgaaggacgggcagatacattagttgatttgtagagccactcctaagactgaatcaatcagatggagtatattgattactgcacttcatgtgtgtgctagctgcctagctagagtactattttctacgcccaaaatttgtatgctgttttgtctttgtaagtacatactcattccgtccaaaaataaaatttgttttagactaaaca

SEQ ID NO: 29643 - DNA, 1905 bp, Zea Mays
gagacttgcaatcccatctgctccggacagagccctcgctccacaccgccggcgacctttttcctcctccgctcgaggagtgggccaacggagggagaccatatgggcgcggaggcagcgcatgggcatccgcagcagcagcctccctcgtccctccgacccggcagggaggccgcggcgccgcccgcggtggtggggctgcagctctcggcgctgatcgaccacgtcgcgcgcgtcgactggtccctcctcgaccgcgtccctggcgaccgcggcggctcgcagcaggtatccattgatgagctgaatcatattcttgatgaagtgaatgcccacatccttccttcccgcaatgatctcactccggtaactacaatagccggtggaagtgttgccaacacaatccgtgggctctcagctggttttgggatatcaactggaataattggagcttgtggagatgacaaccagggacttctgtttgtcaacaatatgagctttagtggtgtagatctcacaagattaagggcgaaaaaagggcacaccgctcagtgtgtgtgcttggtcgatgcaagcggcaatcgcaccatgcggccatgcctatctagtgcagtcaagatacaggccaatgaatttagaaaggaggatttcaaaggctccaaggtgcctttcttcttccctttttggcgcacatttcattttgtgatatatgcattcctcttaggagaaacatccagagcatatgtctttgttaagggctcctttggaacgcaggaaattcacaggaatggtataggaacttcacatgaattagttcaaaaacacaggaaaaacacaggattcaggaaataatcttttgatccaaagaaggtcgaagtctgaatttctcactgctatttactttcatgcagtggctcattgtgagatatgcacaacagaacatggaacagattgtcgaagctattaggattgcgaaacaggaaggcctttcagtatcattagatttggccagtttcgagatggttcgtgactctaggtctaaacttgttaaccttttggagactggtaacattgacctttgcttcgccaacgaagatgaagctagggaggttatagggggaagcctggaatcagatccagaggaggcgcttgcattcttgggcaagtactgcaaatgggccgtggtgacacttgcttcaaagggatgcatggcaaagcatggcaaacaggtcgttcgagtcccggccatcggggagagcaacgcggtggacacaactggagcgggcgacctgttcgcgagcgggttcctgtacgggctggtgaaggggctgccgctggaggagtgctgcaaggtcggggcgtgcagcggcgggtcggtgacgcgggcgctcggcggggaggtgcggccggagaactggcagtggatgtacaagcagatgcacgccaggggcttgctgctcccggagctcaagaactgaatgaaactattgctgctgtagctttagctagctaaatgcctgcatgctgcaccagctgttgtatctcccagctctcgaagactcgtagcatcacccagggccggtcgagtggccagtatccagccttccgttgttaattgctggcgttacctttcccctgctagtctgttaatgttactagaatattggtgtccatgaccatgcttgattgctggcatggtgaaggacgggcagatacattagttgatttgtagagccactcctaagactgaatcaatcagatggagtatattgattactgcacttcatgtgtgtgctagctgcctagctagagtactattttctacgcccaaaatttgtatgctgttttgtctttgtaagtacatactcattccgtccaaaaataaaatttgttttagactaaaca

SEQ ID NO: 29644 - DNA, 1015 bp, Zea Mays
ttggaacgcaggaaattcacaggaatgtggctcattgtgagatatgcacaacagaacatggaacagattgtcgaagctattaggattgcgaaacaggaaggcctttcagtatcattagatttggccagtttcgagatggttcgtgactctaggtctaaacttgttaaccttttggagactggtaacattgacctttgcttcgccaacgaagatgaagctagggaggttataggcctggaatcagatccagaggaggcgcttgcattcttgggcaagtactgcaaatgggccgtggtgacacttgcttcaaagggatgcatggcaaagcatggcaaacaggtcgttcgagtcccggccatcggggagagcaacgcggtggacacaactggagcgggcgacctgttcgcgagcgggttcctgtacgggctggtgaaggggctgccgctggaggagtgctgcaaggtcggggcgtgcagcggcgggtcggtgacgcgggcgctcggcggggaggtgcggccggagaactggcagtggatgtacaagcagatgcacgccaggggcttgctgctcccggagctcaagaactgaatgaaactattgctgctgtagctttagctagctaaatgcctgcatgctgcaccagctgttgtatctcccagctctcgaagactcgtagcatcacccagggccggtcgagtggccagtatccagccttccgttgttaattgctggcgttacctttcccctgctagtctgttaatgttactagaatattggtgtccatgaccatgcttgattgctggcatggtgaaggacgggcagatacattagttgatttgtagagccactcctaagactgaatcaatcagatggagtatattgattactgcacttcatgtgtgtgctagctgcctagctagagtactattttctacgcccaaaatttgtatgctgttttgtctttgtaagtacatactcattccgtccaaaaataaaatttgttttagactaaaca

SEQ ID NO: 29645 - DNA, 882 bp, Zea Mays
ctcatcggttccctttttgagtagcgactcatcggtttctcaccatcacttccacttggggatttcaatcgaatggaccctgcggcgcggcttcttcgtggagaagaggttgctgccgaagccaccgccaggtagccatgtcgtcctccgtgctgagggctgcggccgacagggccattcgcaggcaggccctcacgctgacgaacgccgcggtgtccaggatccggcagctcctcagcctaaggcaacggccatacctgcggctgggtgtcaaagcgcgaggttgcaacggcctctcctacaccctcaactatgccgatgaaaaggggaagttcgatgagcttgtcgaggagaaaggagttaaagtactgatcgaccccaaggctttgatgcatgttataggcaccaagatggactatgttgatgatccattaaagtccgagtttgtgttcataaacccaaattccaaagggcagtgtggctgcggtgagtctttcatgactacaggcagcaaagggtcgacgtcatgaggcgtttttcagtgtaaatgcttagccaagtgtctgcaggctccagctacagattttcttgtgtctgttgcgtcgcagttcattcatatatataataacacagcagtgggtttgtactggatatgcaactaactcgcatttacttgtaagttcacctcaaatgttgttattacatggtctgactctgattatccatgttgtgtatatttgatcgctcgcgatttaagacctcgaaatttgcacgctgcagttggttatttgtaatcgtattcagccgctctgcctctgcataactgcaggagaagagattgtatatatctgactgttatttactgcttagcaaaaaaaaaaa

SEQ ID NO: 29646 - DNA, 824 bp, Zea Mays
cttgctggaagatgccgccacggagaacagaaatggtagaaggattaggcttgattttccaaaaggtaagtcgattgaggtggagagatgatgatttaaggctctaaacgtacggcttcttgcaatcactacaccactgctccattggttatcacccgtgccacaaggatgtcctcgctaagaaggcttatttcctgtaagcgcaatcgagaacacaaggaagaacatggaagttctagtcaactgaatcgattatgaagatgaaaaggggaagttcgatgagcttgtcgaggagaaaggagttaaagtactgatcgaccccaaggctttgatgcatgttataggcaccaagatggactatgttgatgatccattaaagtccgagtttgtgttcataaacccaaattccaaagggcagtgtggctgcggtgagtctttcatgactacaggcagcaaagggtcgacgtcatgaggcgtttttcagtgtaaatgcttagccaagtgtctgcaggctccagctacagattttcttgtgtctgttgcgtcgcagttcattcatatatataataacacagcagtgggtttgtactggatatgcaactaactcgcatttacttgtaagttcacctcaaatgttgttattacatggtctgactctgattatccatgttgtgtatatttgatcgctcgcgatttaagacctcgaaatttgcacgctgcagttggttatttgtaatcgtattcagccgctctgcctctgcataactgcaggagaagagattgtatatatctgactgttatttactgcttagcaaaaaaaaaaa

SEQ ID NO: 29647 - DNA, 1383 bp, Zea Mays
cactgctccaattcttagaacggatcggcgctggagctggagctcgtcttgtccgacggcgctcctgggcgctcctctccctggtcctcggccctgtcatcgctgattggttggagctccctggcccgacggtcttctctgcccgagctccctcccggcggcaagccggtcccgttcaatcccggcggagctcccatccatctcttcctcgcgcctcgtcaggtacgtgttcccttatcttcttcttgtcaataatctgactcatgacgtgttcccttatcagctcgtcttgtcatcttggagcagtgtttactctgtttctctggttgttagccacacttgtctaacctgtatatttgctgaatgttgtgcccaaaggcacactacaataatccaataattgtgcctctttaatttgtaatatgtggagctccaagctgtttattctggaacttttagaactaaaattgcatgctaaatcacatggaaacagtaccttaatacctacatggccaatatctacctctattttagcattgtatgcttctttgttttgcattgaagttactgtcgagttaccgcgcggccgtgctgaacttgaactatcaggttacctcagtagcttgttttctgaagtgagctgccaagttttctgaagttagctgccaagttttctcaagtttgttatatgctgcataacaaaggttttgcctaagtgtgtacatacataattcacctgggttatttgacttaaattgtgatgtagctgaagctcacctttggaaatagctgacacacttctggaatgacttcaacaagaaggtcggcgccttttcggtatactaatctactgaccacaacaataactatttcatcatagtttaagcgcttgggagagggagtaaacattgcagtgtcaactgcattaggaaccatgaaaaccttctctagagatatcccagacctcaagacagtgttctatttgcttctaagtgagacacatattgcctgatcaatatctgcaagagtaaactgcagcaccttattcatgtgaatgcttccagcatcagcaaaaccataaagtgagtgatctgtgaagacaactttgtaccccattgtcctagcatgtattaatgcttcatgacacaatgttgaaaaagcttgatgtccatgcacgacagaaatcttcttgttgaaaaaactttgtaccccattgtccatgtgttgcaaacagaaagctatatagtttatgaggaaaataggaccttatggccaagcttaagtagacattgtgacaggtagtagatatggctttccaccccaccaaagtttgggaagaaaaagttgaattcattacactgggcacacatagttgaagataca

SEQ ID NO: 29648 - DNA, 821 bp, Zea Mays
aacggatcggcgctggagctggagctcgtcttgtccgacggcgctcctgggcgctcctctccctggtcctcggccctgtcatcgctgattggttggagctccctggcccgacggtcttctctgcccgagctccctcccggcggcaagccggtcccgttcaatcccggcggagctcccatccatctcttcctcgcgcctcgtcagctgaagctcacctttggaaatagctgacacacttctggaatgacttcaacaagaaggtcggcgccttttcggtatactaatctactgaccacaacaataactatttcatcatagtttaagcgcttgggagagggagtaaacattgcagtgtcaactgcattaggaaccatgaaaaccttctctagagatatcccagacctcaagacagtgttctatttgcttctaagtgagacacatattgcctgatcaatatctgcaagagtaaactgcagcaccttattcatgtgaatgcttccagcatcagcaaaaccataaagtgagtgatctgtgaagacaactttgtaccccattgtcctagcatgtattaatgcttcatgacacaatgttgaaaaagcttgatgtccatgcacgacagaaatcttcttgttgaaaaaactttgtaccccattgtccatgtgttgcaaacagaaagctatatagtttatgaggaaaataggaccttatggccaagcttaagtagacattgtgacaggtagtagatatggctttccaccccaccaaagtttgggaagaaaaagttgaattcattacactgggcacacatagttgaagataca

SEQ ID NO: 29649 - DNA, 296 bp, Zea Mays
ctccctggcccgacggtcttctctgcccgagctccctcccggcggcaagccggtcccgttcaatcccggcggagctcccatccatctcttcctcgcgcctcgtcagctgaagctcacctttggaaatagctgacacacttctggaatgacttcaacaagaaggtcggcgccttttcggaatggatcttggagatttctccatggccgcggggaagcaacctacgacgagctgctcaagattgacggctacagcgctgacctacgacgggagtcgagcaccagggagaggagcgcca

SEQ ID NO: 29650 - DNA, 1937 bp, Zea Mays
ctgaagctcacctttggaaatagctgacacacttctggaatgacttcaacaagaagcatcttgccctgatggttggcaaggcggccctgttcagaacagatgcttcatgtacatatcagcctccctttcttgggatagatccgaggctgtctgccataactacagcgggcatcttgctgcagtatcatcagtccaggagctaaacttcgtgaagtctctctgtggatcatcatccacaggatgctgggttggagggcatcactacagcactagtaccggtaacggttggaaatggtctgatgattcctctgtttggaatgaaactgtcttccttggtgagccattgcctgccaactgcagtgatcctgcatgtaaagtagccaccagcaacgatttctgtactttggtcaccaatggtcagccttcaactattactgaaaaaaggtgcagtgagtcccatggtctgatctgcaggatgaaccacgtggacagatgctaccatgatcattgccacaaggagtatttcatatccattattgctgtgagtggtttcatcctggcaaccactctagccgttgtggtttggctgcttgtctacaggcgaagcaagaaaagaagaagatcgcgagaagtgttaagtgcctcagctgctgcattggtagcaccgcaatggaaagtattcaccagtgaagaacttagatcgatcacaaagaacttcagcgagggtaaccggcttcccggcaacgcaaagacaggcggaacctatagtggaatcttaccggatggatccaaagtagcaatcaagaggcttaagaggtcgagcctgcaaaggaaaaaggacttctactctgagatccggagagttgcaaagctatatcaccctaatttggttgctgtaaaaggatgctgctatgatcatggtgaccggtttattgtctatgagtttgtcgcgaatggtcctttggatgtgtggctgcatcatattcccagaggagggcggagccttgattgggcaatgagaatgagagctgccacaactcttgctcagggaattgcgttcttgcacgacaaggtaaagccgcaggtggtgcaccgtgacatccgtgcaagcaacgtcctactcgacgaggatttcgggtcgcatctgatgggggtggggctttcgaagttcgtgccgtgggaggtgatgcacgagagaaccgtcaaggccgcgtcctacggctacctcgcccccgagttcatatacaggaacgagctgacgacgaagagcgacgtgtacagcttcggcgtgctcctcctggaaatcatcagcgggcgccgccccgcgcagtcggtcgagtccgtcgggtggcagaccatcttcgaatgggccactccgctggtgcagtcccaccgctacctggatctgctggacccgctcatccaggagtcgccggacgcgggggtcgtccagaaggtcgtcgaccttgtctactcctgcacccagcacgtcccttcggtgcgcccgaggatgtcgcacgtcgtgcatcagctgcagcagcttgagctcaagtctgcagcgtccgagcagcagctaaggagcgggacgagcaccagcgcgacgtctccaatgctgccgttggaggtccggactcctcgctgaaatgtgctgccagaaattgatagcctttttaagtactctctagctctgtaggtggtaccacattccttgtgggccaccgttatcttgatcagttgtagacttgtcatctgtaacctctaatctgctacatatgtcgtgggttttcaatgtgtgacctaaagaagctttaggcttatgctctcaagtctgaagaaacaactcatctgtatttcatagagtaataacagtagcttgtaatactatttcctatcaacacaactagcagttcgatttctatcatatttacatttggcag

SEQ ID NO: 29651 - DNA, 2053 bp, Zea Mays
cttgaatgcgctgcccggtagtcaaggcgggagtgggagcgcttctgcctttggtttggtgcgccctcatttatgacgcgcgcaatcttcactgtcttcagtcatctggagggaacggggttagcgagcggcctccgctgcgacggcaacggcgtgggagggccatggcggcccccgcgctcgccttccccatgttgctggctgcctcactgctctccgtcgccgctcctgcgctggctcgaagcccatcttgccctgatggttggcaaggcggccctgttcagaacagatgcttcattatcatcagtccaggagctaaacttcgtgaagtctctctgtggatcatcatccacaggatgctgggttggagggcatcactacagcactagtaccggtaacggttggaaatggtctgatgattcctctgtttggaatgaaactgtcttccttggtgagccattgcctgccaactgcagtgatcctgcatgtaaagtagccaccagcaacgatttctgtactttggtcaccaatggtcagccttcaactattactgaaaaaaggtgcagtgagtcccatggtctgatctgcaggatgaaccacgtggacagatgctaccatgatcattgccacaaggagtatttcatatccattattgctgtgagtggtttcatcctggcaaccactctagccgttgtggtttggctgcttgtctacaggcgaagcaagaaaagaagaagatcgcgagaagtgttaagtgcctcagctgctgcattggtagcaccgcaatggaaagtattcaccagtgaagaacttagatcgatcacaaagaacttcagcgagggtaaccggcttcccggcaacgcaaagacaggcggaacctatagtggaatcttaccggatggatccaaagtagcaatcaagaggcttaagaggtcgagcctgcaaaggaaaaaggacttctactctgagatccggagagttgcaaagctatatcaccctaatttggttgctgtaaaaggatgctgctatgatcatggtgaccggtttattgtctatgagtttgtcgcgaatggtcctttggatgtgtggctgcatcatattcccagaggagggcggagccttgattgggcaatgagaatgagagctgccacaactcttgctcagggaattgcgttcttgcacgacaaggtaaagccgcaggtggtgcaccgtgacatccgtgcaagcaacgtcctactcgacgaggatttcgggtcgcatctgatgggggtggggctttcgaagttcgtgccgtgggaggtgatgcacgagagaaccgtcaaggccgcgtcctacggctacctcgcccccgagttcatatacaggaacgagctgacgacgaagagcgacgtgtacagcttcggcgtgctcctcctggaaatcatcagcgggcgccgccccgcgcagtcggtcgagtccgtcgggtggcagaccatcttcgaatgggccactccgctggtgcagtcccaccgctacctggatctgctggacccgctcatccaggagtcgccggacgcgggggtcgtccagaaggtcgtcgaccttgtctactcctgcacccagcacgtcccttcggtgcgcccgaggatgtcgcacgtcgtgcatcagctgcagcagcttgagctcaagtctgcagcgtccgagcagcagctaaggagcgggacgagcaccagcgcgacgtctccaatgctgccgttggaggtccggactcctcgctgaaatgtgctgccagaaattgatagcctttttaagtactctctagctctgtaggtggtaccacattccttgtgggccaccgttatcttgatcagttgtagacttgtcatctgtaacctctaatctgctacatatgtcgtgggttttcaatgtgtgacctaaagaagctttaggcttatgctctcaagtctgaagaaacaactcatctgtatttcatagagtaataacagtagcttgtaatactatttcctatcaacacaactagcagttcgatttctatcatatttacatttggcag

SEQ ID NO: 29652 - DNA, 2069 bp, Zea Mays
ctgcccggtagtcaaggcgggagtgggagcgcttctgcctttggtttgtggagggaacggggttagcgagcggcctccgctgcgacggcaacggcgtgggagggccatggcggcccccgcgctcgccttccccatgttgctggctgcctcactgctctccgtcgccgctcctgcgctggctcgaagcccatcttgccctgatggttggcaaggcggccctgttcagaacagatgcttcatgtacatatcagcctccctttcttgggatagatccgaggctgtctgccataactacagcgggcatcttgctgcagtatcatcagtccaggagctaaacttcgtgaagtctctctgtggatcatcatccacaggatgctgggttggagggcatcactacagcactagtaccggtaacggttggaaatggtctgatgattcctctgtttggaatgaaactgtcttccttggtgagccattgcctgccaactgcagtgatcctgcatgtaaagtagccaccagcaacgatttctgtactttggtcaccaatggtcagccttcaactattactgaaaaaaggtgcagtgagtcccatggtctgatctgcaggatgaaccacgtggacagatgctaccatgatcattgccacaaggagtatttcatatccattattgctgtgagtggtttcatcctggcaaccactctagccgttgtggtttggctgcttgtctacaggcgaagcaagaaaagaagaagatcgcgagaagtgttaagtgcctcagctgctgcattggtagcaccgcaatggaaagtattcaccagtgaagaacttagatcgatcacaaagaacttcagcgagggtaaccggcttcccggcaacgcaaagacaggcggaacctatagtggaatcttaccggatggatccaaagtagcaatcaagaggcttaagaggtcgagcctgcaaaggaaaaaggacttctactctgagatccggagagttgcaaagctatatcaccctaatttggttgctgtaaaaggatgctgctatgatcatggtgaccggtttattgtctatgagtttgtcgcgaatggtcctttggatgtgtggctgcatcatattcccagaggagggcggagccttgattgggcaatgagaatgagagctgccacaactcttgctcagggaattgcgttcttgcacgacaaggtaaagccgcaggtggtgcaccgtgacatccgtgcaagcaacgtcctactcgacgaggatttcgggtcgcatctgatgggggtggggctttcgaagttcgtgccgtgggaggtgatgcacgagagaaccgtcaaggccgcgtcctacggctacctcgcccccgagttcatatacaggaacgagctgacgacgaagagcgacgtgtacagcttcggcgtgctcctcctggaaatcatcagcgggcgccgccccgcgcagtcggtcgagtccgtcgggtggcagaccatcttcgaatgggccactccgctggtgcagtcccaccgctacctggatctgctggacccgctcatccaggagtcgccggacgcgggggtcgtccagaaggtcgtcgaccttgtctactcctgcacccagcacgtcccttcggtgcgcccgaggatgtcgcacgtcgtgcatcagctgcagcagcttgagctcaagtctgcagcgtccgagcagcagctaaggagcgggacgagcaccagcgcgacgtctccaatgctgccgttggaggtccggactcctcgctgaaatgtgctgccagaaattgatagcctttttaagtactctctagctctgtaggtggtaccacattccttgtgggccaccgttatcttgatcagttgtagacttgtcatctgtaacctctaatctgctacatatgtcgtgggttttcaatgtgtgacctaaagaagctttaggcttatgctctcaagtctgaagaaacaactcatctgtatttcatagagtaataacagtagcttgtaatactatttcctatcaacacaactagcagttcgatttctatcatatttacatttggcag

SEQ ID NO: 29653 - DNA, 2096 bp, Zea Mays
ctccctcctccttggaaggcaactagatccaccgcttcttattttagccaccaattctaaaacgagccgcgaacgtattattttgtttgccgccatggcgtcatgtatgtgccacgctgtccctaagccacccaagagacgaattaccaaattgatatgactccttgttctaacctcttgtgctgcatgcctgctgattctcgaacaatatggagcatcttgccctgatggttggcaaggcggccctgttcagaacagatgcttcatgtacatatcagcctccctttcttgggatagatccgaggctgtctgccataactacagcgggcatcttgctgcagtatcatcagtccaggagctaaacttcgtgaagtctctctgtggatcatcatccacaggatgctgggttggagggcatcactacagcactagtaccggtaacggttggaaatggtctgatgattcctctgtttggaatgaaactgtcttccttggtgagccattgcctgccaactgcagtgatcctgcatgtaaagtagccaccagcaacgatttctgtactttggtcaccaatggtcagccttcaactattactgaaaaaaggtgcagtgagtcccatggtctgatctgcaggatgaaccacgtggacagatgctaccatgatcattgccacaaggagtatttcatatccattattgctgtgagtggtttcatcctggcaaccactctagccgttgtggtttggctgcttgtctacaggcgaagcaagaaaagaagaagatcgcgagaagtgttaagtgcctcagctgctgcattggtagcaccgcaatggaaagtattcaccagtgaagaacttagatcgatcacaaagaacttcagcgagggtaaccggcttcccggcaacgcaaagacaggcggaacctatagtggaatcttaccggatggatccaaagtagcaatcaagaggcttaagaggtcgagcctgcaaaggaaaaaggacttctactctgagatccggagagttgcaaagctatatcaccctaatttggttgctgtaaaaggatgctgctatgatcatggtgaccggtttattgtctatgagtttgtcgcgaatggtcctttggatgtgtggctgcatcatattcccagaggagggcggagccttgattgggcaatgagaatgagagctgccacaactcttgctcagggaattgcgttcttgcacgacaaggtaaagccgcaggtggtgcaccgtgacatccgtgcaagcaacgtcctactcgacgaggatttcgggtcgcatctgatgggggtggggctttcgaagttcgtgccgtgggaggtgatgcacgagagaaccgtcaaggccgcgtcctacggctacctcgcccccgagttcatatacaggaacgagctgacgacgaagagcgacgtgtacagcttcggcgtgctcctcctggaaatcatcagcgggcgccgccccgcgcagtcggtcgagtccgtcgggtggcagaccatcttcgaatgggccactccgctggtgcagtcccaccgctacctggatctgctggacccgctcatccaggagtcgccggacgcgggggtcgtccagaaggtcgtcgaccttgtctactcctgcacccagcacgtcccttcggtgcgcccgaggatgtcgcacgtcgtgcatcagctgcagcagcttgagctcaagtctgcagcgtccgagcagcagctaaggagcgggacgagcaccagcgcgacgtctccaatgctgccgttggaggtccggactcctcgctgaaatgtgctgccagaaattgatagcctttttaagtactctctagctctgtaggtggtaccacattccttgtgggccaccgttatcttgatcagttgtagacttgtcatctgtaacctctaatctgctacatatgtcgtgggttttcaatgtgtgacctaaagaagctttaggcttatgctctcaagtctgaagaaacaactcatctgtatttcatagagtaataacagtagcttgtaatactatttcctatcaacacaactagcagttcgatttctatcatatttacatttggcag

SEQ ID NO: 29654 - DNA, 1619 bp, Zea Mays
ccggcagttccagcttaaacgccaccggccacgaggcatcacgaggtgcacaacctaaccacccatccatcccggctcagccagcgcttcgctcctcggatccgccgcgatgttaccttattataagtacgttgtagcagcgacgaatcgtccgtcatcttccccaactccgatccatagtaggccagtccagaacacgaggcggcggctatgggcggacatggccacccttactcgccggcggagctgcagctgccggggttcgtgccgcagcggctgtcgcaggcccagatcgtcgcgcctttcgcgggcaccgccgtgttggccgtgctcggcgcctggctcgtctccgggagatgcggcggcggcggcagactatccaggaccgaccgcttgctcatgggctggtggctcttcaccgcgttgacccacctcgtcttcgagccacccttcctcttcaccccggacttcttcagcaaggagaacccaaactacttcgatgacctctgtgagtattaattagctctcagcacaccagatcgctgcgtgccactgccaattggccagttgcagcttttgagatcagcctatatatggtggcctatcgatcgttgtttggctatgactatatggggaaaatatcctgtgcaatcacttatattggtgcaagcgtgcaatcaagcggtttagtgtatctaatctagatctaatgatgactgttattttatatttaaccccttccacctaaaacatagtacctattttacttttaactccttccatatgaaaccgttggatctagattgtatgctctggatagtttgattgcacgcttgcaccaaaatgagtgattgcacaggatatgtcctcgaccatatgaccaatactgacaatagaggggaaataaatgccgttttcagtcaaggagtacagcaaaggtgactccagatacgccgctagggacaccgccatcgtcgcgcttgaagcgataaccgtcgggctcaaaggccctgcatcgctcctcgcagtctatgcgatcgcatcccggaagccgtacggccacatcctgcagttcgcagtctcgttaggccagctctacgggtgcctgttctacttcgtcaccgcgtacctggacggcttcagcttctgggcgagcccgttctacttctgggcgtatttcgtcggcaacaacagtttgtgggtggtcataccgacgctcgtcgccacgaggagctggaagaagatctcggcagcgtttcaggctgacaaggtcaagaccagatgatgatgatgatcctgcactgttcctgcgaccagcgaccctccgtttcgccgccacggcctggaggaagtttctttggaaggcacaaaaatgcaatgcatgttgtgcaagaacgggcaaaccatcatgaccgtgtagtttgcgagaagcaaaccttgtacctttttgtgaaaactgtgctgtttcacccatcttgttcagtcgtatgcatgccagggtgactgggtgagtgcatatatatgcaattatgcacacatatctgcatcgtgtttcaaaaaaaatgtatacctgatctttaaggtgacatacattttacattgagttagtgttgatgatg

SEQ ID NO: 29655 - DNA, 1022 bp, Zea Mays
accaacgggaagttcggccgatgcatgaaaacacacacggatgaaatcgtttgattggtagccccctgtcaacatctcgatttcgaatttcacccagctccgcacgcgcctcaacccttcctctcgggcggcggcgccggcaaggcggcagccaaccggagcgggagctgcgatgaagaagatcttcggcgccaagaaggacaaggggccgcccccctccatccaggacgccaccgagcgaataaacaagcggggtgagacggtggacgagaagatcaagaagctggacgaggagctagccaggtacaaggagcagatccgcaagacccgccccggcccgtcccaggaagccatcaaggtacgaggagcaacgcaacatgttgtacaaccaaacctacaatctcgaccaagttggctttgctgccgatggcctcaaggatgctcagcagactatgaatgcaatgaaggcagcaaacaaggagctcaagggaatgatgaaaactgtcaaaattgatgaaattgataatatgcaagatgaaatgacagatctgatggacgtgagcaatgagatacaagaaactcttggtagaagctacaacatccctgatgacgttgacgaggaagaactgatgggcgagctagatgctttggagtctgatatggaatttgactcagctgcagtcccctcatatcttcaaccagattctgactttgatgctgacctcaacttacctgctgcaccaagtcgccctgcaatggtcccagcaggcgggctgcaggaggatgagctaggattgccagcggtgcctcgggcatcacttcgcagttagaaataatcttgtgtttcgattttaagttggtgtgaaaactctgtagtttgtgtctgagtctgaacaatctaatgcttttcgtcatggtaatgcttcagtttattgcacttcctgttgctgctgacgtttcaggggaaaaaatcactgtacacaccagtaattctccaagacaagtcggcagagtgaacagaa

SEQ ID NO: 29656 - DNA, 2324 bp, Zea Mays
accaacgggaagttcggccgatgcatgaaaacacacacggatgaaatcgtttgattggtagccccctgtcaacatctcgatttcgaatttcacccagctccgcacgcgcctcaacccttcctctcgggcggcggcgccggcaaggcggcagccaaccggagcgggagctgcgatgaagaagatcttcggcgccaagaaggacaaggggccgcccccctccatccaggacgccaccgagcgaataaacaagcggggtgagacggtggacgagaagatcaagaagctggacgaggagctagccaggtacaaggagcagatccgcaagacccgccccggcccgtcccaggaagccatcaaggcacgcgccatccgactcctcaagcacaagcgcatgtacgaggagcaacgcaacatgttgtacaaccaaacctacaatctcgaccaagttggctttgctgccgatggcctcaaggatgctcagcagactatgaatgcaatgaaggcagcaaacaaggagctcaagggaatgatgaaaactgtcaaaattgatgaaattgataatatgcaagatgaaatgacagatctgatggacgtgagcaatgagatacaagaaactcttggtagaagctacaacatccctgatgacgttgacgaggaagaactgatgggcgagctagatgctttggagtctgatatggaatttgactcagctgcagtcccctcatatcttcaaccagattctgactttgatgctgacctcaacttacctgctgcaccaagtcgccctgcaatggtcccagcaggcgggctgcaggaggatgagctaggattgccagcggtgcctcgggcatcacttcgcagttagaaataatcttgtgtttcgattttaagttggtgtgaaaactctgtagtttgtgtctgagtctgaacaatctaatgcttttcgtcatggtaatgcttcagtttattgcacttcctgttgctgctgacgtttcaggttccttttttttgtcattctggaatttttcatctgtcacctgtcacttgagccgtgtttgtttgcaagtacacgtcactatacagcaattattccaggggaaaaaatcactgtacacaccagtaattctccaagacaagtcggcagagtgaacagaagactgaggggaaaatatcttggaggctgttgtattcttgcaatgcagtatcctttttgctagcaatagcactcccttttgtttacaataattgaggcaagataactatcaggatcaaaggtggaaatatcttttccaaggggttcaaaatatcaggcaacaggggtgagcgggtcccccttctccttggtccaagaacaccggtagaggggtaccacataccagaatcttatccagagcagggaacccctcctggccctgcagtatataacggagggggtcaccacacaaaatagataagcgttccagatcgtactggaccaatctgccaccacactttgatcacacacaggaagttgagatcagaaaaatgcaggctgccgctactgccgccgggttctcggccgtgctgcccgccaagggcaggccggcggcgaggagcagggtggtggcccgtgtccccgccacaaggaggagcgtccgtgtagctgccgtcgtcgcgaccgaggccgcgcagatcgactacagctcaagcgtctcggtgttcccgatggaggcctgcgacctgcttggtggcgacgcgtgcaacgggcccatgttcccggaggccaagcccgcctcggcggcggcggcggcgagcaggagtgtggtcggggtggacagggactacctgtcctacgacgagccaaagacggtgttcccgggcgaggcgtgcgatgaccttggcggcgagttctgcgaggcgccgtaccaggacggcgtctccaaggagctggcgcacgcctgaagaccctgatccatccatttctgtccaccacgctatgtacgtatgtgtagcagatggtttacatctacgtgttagagcccggagagctggagaagctagctagcgtgcttacagaataacagcagccaagcaaagccaagggtgtgtatataataggcatgccttgggttgtgtcagctgcgactgtatgtatagtttaaaccaagatgaaatggtactgatggtgatattccgtgttttacgatacaaaggctagaaaatagattttgcctggatatcagatagctttcaactaccacaaaatattatttctacctgaaacattgaccgcgttgatttatttcaactactgcacaatattatcctacaaaaaaaaggtaagc

SEQ ID NO: 29657 - DNA, 1733 bp, Zea Mays
atggaagtcacaatttcatctttgcaatatgacatctatttctggatttaagtcttccatagtttttggcacatcacttgagctagatgctttggagtctgatatggaatttgactcagctgcagtcccctcatatcttcaaccagattctgactttgatgctgacctcaacttacctgctgcaccaagtcgccctgcaatggtcccagcaggcgggctgcaggaggatgagctaggattgccagcggtgcctcgggcatcacttcgcagttagaaataatcttgtgtttcgattttaagttggtgtgaaaactctgtagtttgtgtctgagtctgaacaatctaatgcttttcgtcatggtaatgcttcagtttattgcacttcctgttgctgctgacgtttcaggttccttttttttgtcattctggaatttttcatctgtcacctgtcacttgagccgtgtttgtttgcaagtacacgtcactatacagcaattattccaggggaaaaaatcactgtacacaccagtaattctccaagacaagtcggcagagtgaacagaagactgaggggaaaatatcttggaggctgttgtattcttgcaatgcagtatcctttttgctagcaatagcactcccttttgtttacaataattgaggcaagataactatcaggatcaaaggtggaaatatcttttccaaggggttcaaaatatcaggcaacaggggtgagcgggtcccccttctccttggtccaagaacaccggtagaggggtaccacataccagaatcttatccagagcagggaacccctcctggccctgcagtatataacggagggggtcaccacacaaaatagataagcgttccagatcgtactggaccaatctgccaccacactttgatcacacacaggaagttgagatcagaaaaatgcaggctgccgctactgccgccgggttctcggccgtgctgcccgccaagggcaggccggcggcgaggagcagggtggtggcccgtgtccccgccacaaggaggagcgtccgtgtagctgccgtcgtcgcgaccgaggccgcgcagatcgactacagctcaagcgtctcggtgttcccgatggaggcctgcgacctgcttggtggcgacgcgtgcaacgggcccatgttcccggaggccaagcccgcctcggcggcggcggcggcgagcaggagtgtggtcggggtggacagggactacctgtcctacgacgagccaaagacggtgttcccgggcgaggcgtgcgatgaccttggcggcgagttctgcgaggcgccgtaccaggacggcgtctccaaggagctggcgcacgcctgaagaccctgatccatccatttctgtccaccacgctatgtacgtatgtgtagcagatggtttacatctacgtgttagagcccggagagctggagaagctagctagcgtgcttacagaataacagcagccaagcaaagccaagggtgtgtatataataggcatgccttgggttgtgtcagctgcgactgtatgtatagtttaaaccaagatgaaatggtactgatggtgatattccgtgttttacgatacaaaggctagaaaatagattttgcctggatatcagatagctttcaactaccacaaaatattatttctacctgaaacattgaccgcgttgatttatttcaactactgcacaatattatcctacaaaaaaaaggtaagc

SEQ ID NO: 29658 - DNA, 657 bp, Zea Mays
tccctggccttgatcaacaaacaaccaggtgttcccgatggaggcctgcgacctgcttggtggcgacgcgtgcaacgggcccatgttcccggaggccaagcccgcctcggcggcggcggcggcgagcaggagtgtggtcggggtggacagggactacctgtcctacgacgagccaaagacggtgttcccgggcgaggcgtgcgatgaccttggcggcgagttctgcgaggcgccgtaccaggacggcgtctccaaggagctggcgcacgcctgaagaccctgatccatccatttctgtccaccacgctatgtacgtatgtgtagcagatggtttacatctacgtgttagagcccggagagctggagaagctagctagcgtgcttacagaataacagcagccaagcaaagccaagggtgtgtatataataggcatgccttgggttgtgtcagctgcgactgtatgtatagtttaaaccaagatgaaatggtactgatggtgatattccgtgttttacgatacaaaggctagaaaatagattttgcctggatatcagatagctttcaactaccacaaaatattatttctacctgaaacattgaccgcgttgatttatttcaactactgcacaatattatcctacaaaaaaaaggtaagc

SEQ ID NO: 29659 - DNA, 2210 bp, Zea Mays
ctcctctccacgtggccacctgcctcttacccaacggctatttcaccatgtccccatccccagccgcagccggcctcccgcgtccccgcctgtcgctagttctctcgccttgaccgcagaaataaaacgaaaaaaaaacagcgcgccaccgccaccaaccaaacagaggaaaaggaggggaggaagaagcggaggagagagaaaccctaatcgagatgggcaagcttctctgcgacccctccgccgccgccgtcgccgaggccctgccgccgtccccagcccccgctccgcctccgccgctcctcgcttggtcctccccggccccggcctcctcccccgaggcctccatctcgcccacaggctgggacgcggtctgggcgctcgaggaccagcagcgccgccgcctccaccggatctgggagcggggcgtcgcgtggaaaccctcctcgccgggcgccggcgaggccgcgctgcctcccgtggtcttccgcctcgaccacggcggggaggtcgacgccgatggcaactgcctcttcaccgccgcgcggacggcagccgctgccaaggccgacgcgcgcgagctgaggcaccgcgcagtgcgccgattcgccgaggtctacgccgccgctggggaggacgacaagaacgccgtcgacgccgccgtgaggcacctctacgcgccggatctcaaggccgggtggggtgtccatgtcgtgcaggagatcaaggtgctcgtgcccaaggcccagcgccacgcgctcgactccgccatccaggagctcgtcgatctcggtatccaaaggtaccgtgctcgcggatctgcccttgctcgctgctctagctcaaatcttttgattttctcgccacttcaagatctaaaagccttgtcatttttttcccgtatgcctttttgatgatttcgccattcttgctcttggtctaatcagacgctcgtgcaatgtcgttttctcgccaccttcgcaataaaatattctccgtttcccagcccaaaatatatttgttcttgacttcttgagattatcaaagattatttggttcagctaatttacatatagcagttcgtgtctctttagcccttcctgaatttcataacacatccacaaacacggattgacgaaatcttgtgggctttggcatcgtggagatgcaggacacatcgcttcacaaggtgtctgcgttgtatccttgaaattaaaaggtcaatgaaatgaaggatggaatcgtccttttaagtattgcgacgcaagtgttgatgtaatgggagcccacgcttgtccaccctgttatttccaatacatcacttaatactcccatgttgaccctgggaaatagcagctgaaactatctacaaggaaagatgcatcactgtagacaatggggatagttggaccaagtacatgtccatttctggttcttcagaggacgagcatgacattatcaccctgcagtacacagaggaggggttactgacaatagatgagaaccgagatggccgtgcagctgcatttggcgatgatattgccattgaatgcctagctactgaattcaagagagaagtttacgtggtgcaagcccatggagcggatgcaatggttgacgaggataactgtgtgttcttcctcccacaccgtcctcgaggagaagtttgcgagccaccgatttttcttttcatgaaaggaacagcatggtgtggtgctggtgctgaccattacgagcctttgatcgccactgtcctccagcatgttactccagacaaggcagctgtcatcctttgagaatgactgcagttttttctacctcccttagcttttagtcagcggtggagttgagacaattttgttattggagctagagtgctgaattgaggagcgacatcaatatgcccaagagattagagagacggccaacctgagtatcttgctctgttgcggggttttgcctgcttatgaagctgtgtatggtgattttgttgttgtatgtttatgagtaggctctgactagcgaggatattctgagtgtagaacgtcgaatctagattttttgagggtctgatgttgtttgccattgtcggccggcatttttgtattgcttattgtgaggattttcgtttcttgacgcctgtttctagggacatcatgattggacatttggaatgcaaacaattcctttgtggtgttgggttaactctt

SEQ ID NO: 29660 - DNA, 884 bp, Zea Mays
ctccagtatagtgataaatcctccttgcgtttcgctcttaattcaagcagagcttgttgtttgatatatatgtttaattgcaattaacatcgatctgggatattctgaaccgtgattcgtgtctacctgatgatcctcatcatcagcagtccagaatccaaaggctaaagaccaggagtcaggcagcggcatctcctgctgggacgaagattcaagaagctagctaagagagaagggcataacgagataataagcagcgcgcgaagatgcaagactgggcgccggtgttcgtctcgctggtgctcttcatcctgctgtcgccgggcctgctgttccagatgccgggcaagtgccggatcatcgagttcggcaacttccagaccagcgccatctccatcctcgtccacgccatcctcttcttcgccctcgccgccatcttcctcgtcgccgtcggggtgcacatgtacctcggctcctaggcggcggcgcggggcgccgtaccttctctctctcgccgcgcgcgccatcgttctcttcttttatgttctctctctatatatatagtctgtatgaatgaatgatatcatataataatgtacgtaccgtcgtccatgcatttgcccttatatctgtctgccttctgatccgtaaacgaattcagttcttcagtttttttttcctcctctaccgtttgttcacaaagctagctcagctgtagcgtgctgcgtgcatgcatgaaccatgatggcgtagtatcagatcgacgacgaaaggagctagagcaggtttcgcttttgtgcctctgattaatctgatgcagctagagcgtcgcagtacgtacatactgtaggagtgtagccgtatacgtacgtacgtacgtagag

SEQ ID NO: 29661 - DNA, 961 bp, Zea Mays
gccaaggtgggtcaacacctcaagaaggaaagcccaggaaacagaatcaaatgcctttgttaaatctaatttcagaaaaaggctggccacttttttcctgtgtagggatttaattgagtgctgaaccaacatataattgtcatgaatggatctgcctctaacaaaagcactctgattagtctctaccatcttgttgagaagaggagcaagcctgttagcaaggatcttcgtggagagttttgcaaagctgtggatgaggctgatgggcctgtaatcaccagcagacatggctcctgtcttcttagggatcaaagtaatatatgctgtgtttagaggccccaaattctgagaattcccaaggtgaagggcagcaagggcggccatcaaatctgccttaagtataggccaacaagttttatagaatttccctgtgtatccatctggcccaggcgctttatctgaaggaagactggcaatggcatcccaaacttcttcttctgtaaagggaagctcaagagcagataaatcaattggagctctgtgacactcttctaatctcaaagttaacctcctctagggggcataccccaacaaattagagtagaaattatgcagcacctcttgtttttgctcatgagatgtgaccactctttcctcatccagtaagctgaagatatgatttctcttcttgcggaagcaggcctgcaaatgaaagaaagaggtgttggcatctccctcttttagatactaaactctagatctgagtcttgcaaccgttctttccagggaagcaaggaccaggcactgatgcttgagctttcttaacagccataattcatctggagataataccctgctgtcttgagccatttccagtctgtgtaaaatctcccttgctaagcccagttggtatttaaagttgcccactgttttgtgcccccaagaccgcagtgctcttgtt

SEQ ID NO: 29662 - DNA, 1456 bp, Zea Mays
atgacccatccactctcgctctggattgacaacgcgtggcctactggtctgggcactggcccaggcaagacctcggtcacctggttcgggccgacgccgagggtgatcataaccgagccggagctggtgcgccaggttctgtccaacaagttcggccacttcgagaaggccggcttcgggcagctgacgcggctgctgcattatggcgtgagcacccacgagggcagcaagtgggccaagcaccgcaggatcatcaaccccgctttccatttcgagaagctcaagcgcatgctgccggcctttgcgtcgtgctgcgccgacctggtgagcacatgggagcgtctggtggtcgcggccgacggcgaaccatgcgaggtggacatctggccggacatgcagaggctgacgggggacgtcatctcccgcgtcgccttcggcagcagctacctggaaggcaggaggatcttcgagctccaggaggagcaggatgctgcctacaagggtcaaccggcggatgaagcggatcgcggcggagatcgaagggatccttagacggatgatcgcgacgagggagagctcgctgagggcaggaaaggcgacgagcgacgaccttctcggcctgctgctagagtccaacatggagcagctcaggggcgaaggcggaggcggaggcggcgggacgagctccggaggcatgtccaccgacgacatcattggagagtgcaagctgtgttctacttcgccggcatggagaccacgtgaccatggtgctgtacgaggtgctgcggctctacacgccgctgccggcgttgcaccggcggacatacaagcccatggagcttgggggcgtcaggggccggacgccgacgagttcaggccggagaggttcgcagagggagtcgccagggcgtcgtccgccggggacgcgcctccatcgttcttcccgttcggctggggacctcggacctgcgtcggtcagaccttcgcgctgctggaggccaagatagggctcgccatgattctggggagcttcacattcgagctctccccgtcctactcgcacgcgccgttccccgtcgtcttgctcaagccagagcacggcgcgcaggtcaagctcaggaagctcccatgagctgcatccgcttgcatattgcagagacgaaacggtcataaatttccctgtatatatacggaaaaaaaaggcaacaacatgtttgctgtttggatggaccaggactattgttagtttatgcctaaaaatactctatatgcgtcctaaaataagtattcgtaggtttaaggtgaatagataattgtctttaagaaattacatgtccccctataaagatgtaactattgtactttggaaaaggagaaggtagaaaagaacaactagagttagtttaacttgtacctggaggtgcacttattttgtcataatttttttaaattctag

SEQ ID NO: 29663 - DNA, 836 bp, Zea Mays
gtgctgctcacgtggaccttgctggcgctctgcatgcacccggagtggcaggaccttgccagggaggaggtgctccgcgtcttcggcggcgcctcctgcagagtgctggactacgacggcctcagccgactgaaaatcgtgaccatggtgctgtacgaggtgctgcggctctacacgccgctgccggcgttgcaccggcggacatacaagcccatggagcttgggggcgtcaggggccggacgccgacgagttcaggccggagaggttcgcagagggagtcgccagggcgtcgtccgccggggacgcgcctccatcgttcttcccgttcggctggggacctcggacctgcgtcggtcagaccttcgcgctgctggaggccaagatagggctcgccatgattctggggagcttcacattcgagctctccccgtcctactcgcacgcgccgttccccgtcgtcttgctcaagccagagcacggcgcgcaggtcaagctcaggaagctcccatgagctgcatccgcttgcatattgcagagacgaaacggtcataaatttccctgtatatatacggaaaaaaaaggcaacaacatgtttgctgtttggatggaccaggactattgttagtttatgcctaaaaatactctatatgcgtcctaaaataagtattcgtaggtttaaggtgaatagataattgtctttaagaaattacatgtccccctataaagatgtaactattgtactttggaaaaggagaaggtagaaaagaacaactagagttagtttaacttgtacctggaggtgcacttattttgtcataatttttttaaattctag

SEQ ID NO: 29664 - DNA, 2012 bp, Zea Mays
tgactgcaaaggatctcaatcccttctaactatactgatcaagttactcgtgcacgcgtccctttatagaactaccaaagatcatatcactactacaaatataaaggtcatatccctttatataaaagtcatatcactactacaaatatcaaataactccattgacactagaaactagcaaatacttaacctttccgttcaaccgttaaaatccaacaattgattagaggcacaaagaccatataagccaatcaatctatattatcgtgacctaactcattctttctacgaacacactttagtcattataattcaataatcttatattactattaatcaccaaaactcaactaggagctagacgcctagacactttcacttttcattcttttataggcgtggtaggcatgccatgcacaagccactctaccgtcaaaccctcgatatcataaatacagtaattgaggacatgataccctgccaaatgggaataaaaaaacaatgacaccaccagaaatacaaccattcagtggacttgatttcttttctttaattccacagcttcatcttgcaatcctgaataatgccggatcttggacatgtaccatacttcaggtcaatactgatccagcacacctagatagcaatgcatgatggagaaatatctagttttttctacaagggaagtgcaggttcttcagctttctttatcatcactagagccacctttcaatgactgtgcttcaaacataaaggtagaacactcagaaaccaccttaaagtggacagtgcagatgtttagaagaaagaactaaacgaatgaaaaactactaaatgtgtgtgtgtgtgtgtgtgtgtgtgtgtgtgtgtattaaaaaaaataattaccttgtacaagtacttcttccttagcttgattgccaagcgtacacatctttttacatttattttgagcacattatcattgaacatctaagaaaaaaacatgaaaataaataactataactaccattacatagatgcaatgattaaaataaaatggaataaattaccacttgaacttgccttgatcgcatcatctattgagtgagtccctcttattatcttctggcggttaattatcaagatagccgccacacagaatataggaagttcataatctccaccctttgctagcacacttgcacttggatgtggcatctgctgaggtcttgcccatattgtagcaccggacaagccacagagatgatttcttgtactagatttcattccagggtggcaagctccacagatttcaccatttctactatggcatttcctggttctgggttttcttcttgtggaactgttgatccgatgcacttctttgacttcagatgataagccattgctcagatctactagcaatggttctaggcagttctcttctaaatgcctgactgcttcttcatcaaaatcagcagcccacatcatctgaacaagaacaccatttgtcaaacataacaagattctgattcaataatacaaaaagggacagaccctgaggctcccacatgagtaggttctggaaaaaggataagccgaggcaagcctttcccgcagatgcggagaggctgcttcgaacccgcgacatggtggctcagtgagacagctctcaccactgcacgaggtctacccttcttgattcaataatataatcatcaaaataaaacaaccattttaaaaagccatttcattgtggctatatctggtaccaaacatcacatggtctcatacaatatctccacgttatacagttcaagtaaattaccgtagctatattgctacaaagctatatatcttcttttgaactatttaggcatcttgaagattttaagtacaaaactacaattaaagattcaccaaatttcacctgcctgtttcaaagaacactcatgttaacttaacgcaacaactagtgcagtagttcactacaaaatgtccaaaataagacgagtatcttgaagagccag

SEQ ID NO: 29665 - DNA, 496 bp, Zea Mays
cttggggcatcggggttccagtaactctaaaagcctccggacagccaaaccgcgcccggcacctcggctaaactgatcttgagcgctgaagacgaaggcgaagcgaatcgaacccaagcaggattgtttggattgccgggcggcgcaccaaagtaagcaaatccgcaaccaactctgaatggtgagagaagaagatttagattaggttgcgagaaagccagtccctagtgcaatccgtccaagcaacctcgaggggcggttaccgacacgagaaggaagagatcgtggcaagtgcgggtggatggatctccactccacgccagtccaggcgcagcagagggcagcgacgaagtagaggacggggatgcctccccacaagagaaggctgtagctcaaagccccggttagctgtataataaccgcgtggtccgcgccgcaggcggcaaggtcgccgacgacgccgcacgactgattatagcggcgtagaatagaatcg

SEQ ID NO: 29666 - DNA, 1416 bp, Zea Mays
gttcatttaatttcttgtttatcttgcagattttggattagtctgtttgttgcagataggcttagtaacttaattccaattgaaattccactgactgaacattgtcaatatatttactgaattcaaactaattctgaagttttgctaaattgaacctaactgattattccatgaacactcacacaattgaatattatgtggactgaaattttgccagataatatcttaaccccaataaggttaggttgaaagttgaattgttctcatagcaccacaaagtaatgatagtttaagctcatttcacaagtgtattgaaagataaacagacatgactgcaaataaacattcttagttcgtacccctatataatttactagagcgttgtggtctcttcacagaacaatgagctgatagagccatttgtgcatttttctgatgtactcaatagggagacagctagcttcagttggtagcaacagtgaaataattcatctgaacagaaagagcatttcctataactacagttctgaaggatagcttcagttgtagggatgttgatttcgaatgctactaagttagtatagtgaacattagatcaaaacagcctgcagctgtgtgagtttaaaatatgttagcaaggttgccagagctcaaaaaggggccgcacaagtttcattctaggatcaggagctacatggatttgcaactgcaaaatcaattccttttattaggtgtcattcaaataggaacactacaaattattgtggtatatgactgggaaatcatttatccaacaaatcagactactgcacatgagccttaggcatggtgattttaatggactgttctattagcatatgattacttttgatcacttgctttcttttagatcaaatctacacgtgccttagccaaagtcgtgccgtcgacttgatgctatatatctccataagatacctacctccctaagtctgtcccaagatgcggtcgatcttggcgttcatctcacaggatcgaacagggtgctgacatggaagtcattgataccaaattgatgtggtgctagcgatatgaaaagcaaaggggagaatgaaggaaagatgggactaagcttgagtgcagagggcagcgaggcaatagtgtggtgctgtggtggtttcagcgccggtgaccactgctgaatcgccggcaaccaccgtcgaaaagaaacccacccacctagggaggtttattccttcttcgataatccaattacattcctaaggttccctttatatactaggtgcactttcctaacaaactcaaatcaatctcctaaatatcatccatctattcctctttctaaaacaggccaacctccacatttgggccttgctggacgcctaggccagcgcctgtactagcgccctatcaagg

SEQ ID NO: 29667 - DNA, 1542 bp, Zea Mays
gagatgctctaacgtgatgtcatagggtgattgtcttctgttctgtctggcagtttttttttttttgagaatccgattagcgatcaaggctagaattgattattgctcgcgggcgacaagtgtggtgacgcgtctcgatccgcgcaccgcttgggcttctcgtaggagtactgctcagcctgtcaccgtcagcgtatgttcttgttccagttcctatttttactccaagtccactagggatcctatccagattcgtggggacaccctcttcgagttccaggcttccaaggtccaaccttctcctctgaggccgtagcatttgtctggttggattgggttgttccgcttgggtagccgggtgggatcgaaatctgtgtggcacccatatggcggcggtcgaggggacgaagaagaagatgacgcgatggccatcttcctggcgctgcggtcgccggagctggaggtgctgggcctcaccactaccttcggcaacgtacacaccgcccttgccacgcgcaacgcgctccacctgctggaggctgttggcaggactgacatccccgtggcagagggatcccatgtaacgatcaagaaagccaccaagctgaggatcgcaagcttcgtccacggttcagacggcctgggaaaccaggacttccctccaccagctaccaagcctgtagatcagtctgctgctgccttcctggttgagcaggcaaatctgtaccctggtcaagttagcgttgtcgccctcggcccacttaccaaccttgctctggcagtcgagcttgaccctgcgttcccggagaagatagggcagattattattcttggcggtgcgtattcagttaatggaaacgtgaaccctgcagctgaggcgaatatctttggggatcccgacgctgcagatatcgtgttcacctgcggcgctgatattttggccgtgggactaaatgtaacccaccaagtggttctaaccgatgctgaccgggaaaagcttgagcagtgtgacagcaaatacgcccgctacttgtgcaagctaatgggcgtttattttgattaccacagggacggttacttcataaaaggagcgtatcttcacgatccaacgacggttattgctgcggtgaacccatcgctgctgacttacacagaaggcgttgtgagggtacagacagtcgggatcaccaagggccttactgttttcgacaacaccaagaaaaggtacggagagatcacagcctggagtggcatgcccaccgtgaaggtcgctgtcaccgtcgatgcccctgccgtggtagagctgatagtgcagaggctgatgaccgatgactagcaacaacgccaccagctgatccggccgcgttgtcattagaacacgagaatgcattgcgttgcattgcatgtggttatgtgcgtgcttggtgtttacgtacagtttatatatatatgcttgatacgtttgctgatgcttctgagagaacatgattaaattaaattaaacttgattaaatgaaattgccacctgatgatgccagataa

SEQ ID NO: 29668 - DNA, 825 bp, Zea Mays
cacgcgttgggcgtatcataatcgcaaaaagctctccacgctctgaagaagcaacggcgacgcctccgacgacgagcacagctgcccagcccagcaaactagcagcgccctcgtcagttccgtctcgttcccaacctctcccggattcgattcgattgacccgtccgctccaaatcgaatctaatcagcagttttggagttgcggaagggagaaagagagaggagaggggcatggatcaggtgctcaacaaggtggggagctactggttcagcaaaagggccagcaaggaaatcgactccatcggcgacgacatcagcacacgagccaaagtggtcatcaataaaggactccacaatggctaccaagaagctagatcctcacaacggtaatgaagatgatggacatgacacccctagaccaccaggaaggaaagccgagaaagataaattgcgagcacgaaagcgagaggacaatgacaatgatgcattgatggaagaactaaaaaaattagagagtcaagattggagatagaaaatgatcgtaatgcacgagaagacaagttattagagccggagagtagtaaacttgatcttgagcgtgaacaacgtgacgacaaggtgatgagaaccgacacaagtacaatggatgatgagtcgaaacaatattttaagttagtgaaagaggaaattttggcgcgatgttttgggagaaagcaagattgaggggtcatgttattagagttgcttttagtcatactgaacagacttgtattttttctgtctcttcaatatagtatttttcctgaaacgactacaagatctgtt

SEQ ID NO: 29669 - DNA, 1211 bp, Zea Mays
cgtatcataatcgcaaaaagctctccacgctctgaagaagcaacggcgacgcctccgacgacgagcacagctgcccagcccagcaaactagcagcgccctcgtcagttccgtctcgttcccaacctctcccggattcgattcgattgacccgtccgctccaaatcgaatctaatcagcagttttggagttgcggaagggagaaagagagaggagaggggcatggatcaggtgctcaacaaggtggggagctactggttcagcaaaagggccagcaaggaaatcgactccatcggcgacgacatcagccatactaccctcccaagataactactataggaatctgatgaaccaagatgatacagataatttaggctcggaggattacgtgcaagttgatcctcttgtagctaatatgaattcccagacaaaaccaaagggcctctcaaaaaatttcactgatgatgaggacattctactgttgtcagcgtatctcaatgttagcaaagatcctattgctggaagggaccaaaaagatggcagattttgggaaagaattgaaaagtattatcatgtcaatttaacatttgaatcgctcttcattgcatcatcgatggggtataatccaaaagaaagtaagtctttccaaagttactatgaagccatacaaaggaagaatgaaagtggaaagacaatgaatgacaagacacgagccaaagtggtcatcaataaaggactccacaatggctaccaagaagctagatcctcacaacggtaatgaagatgatggacatgacacccctagaccaccaggaaggaaagccgagaaagataaattgcgagcacgaaagcgagaggacaatgacaatgatgcattgatggaagaactaaaaaaattagagagtcaagattggagatagaaaatgatcgtaatgcacgagaagacaagttattagagccggagagtagtaaacttgatcttgagcgtgaacaacgtgacgacaaggtgatgagaaccgacacaagtacaatggatgatgagtcgaaacaatattttaagttagtgaaagaggaaattttggcgcgatgttttgggagaaagcaagattgaggggtcatgttattagagttgcttttagtcatactgaacagacttgtattttttctgtctcttcaatatagtatttttcctgaaacgactacaagatctgtt

SEQ ID NO: 29670 - DNA, 965 bp, Zea Mays
cgtatcataatcgcaaaaagctctccacgctctgaagaagcaacggcgacgcctccgacgacgagcacagctgcccagcccagcaaactagcagcgccctcgtcagttccgtctcgttcccaacctctcccggattcgattcgattgacccgtccgctccaaatcgaatctaatcagcagttttggagttgcggaagggagaaagagagaggagaggggcatggatcaggtgctcaacaaggtggggagctactggttcagcaaaagggccagcaaggaaatcgactccatcggcgacgacatcagcaaagtaagtctttccaaagttactatgaagccatacaaaggaagaatgaaagtggaaagacaatgaatgacaagattgctgatgctaaagctatgttccaaaccttaagaaaaaaggcttttactttgtttcatgcttggaatattcttagacacgagccaaagtggtcatcaataaaggactccacaatggctaccaagaagctagatcctcacaacggtaatgaagatgatggacatgacacccctagaccaccaggaaggaaagccgagaaagataaattgcgagcacgaaagcgagaggacaatgacaatgatgcattgatggaagaactaaaaaaattagagagtcaagattggagatagaaaatgatcgtaatgcacgagaagacaagttattagagccggagagtagtaaacttgatcttgagcgtgaacaacgtgacgacaaggtgatgagaaccgacacaagtacaatggatgatgagtcgaaacaatattttaagttagtgaaagaggaaattttggcgcgatgttttgggagaaagcaagattgaggggtcatgttattagagttgcttttagtcatactgaacagacttgtattttttctgtctcttcaatatagtatttttcctgaaacgactacaagatctgtt

SEQ ID NO: 29671 - DNA, 547 bp, Zea Mays
cgagccaccaccatccgagccaacagcatcgccgtcctcctctgcctccccctaccgcttccccatcgccattgatttcgcgtgcagcaggaccaacggcgcgcagaaggatcaaggaccacaggcacacatacacatctgagcgtggtgcgcggccggcggcaacacggcaggccggctgcacgcctgacgcacagcttgcgcggtcggcagttcctcggtgcggcagggaaggccgtgtactacacagccggctccgtcgcaggtttccaaagccaaggtcactaggtcagcccgtggccgtcgacgaagatcgccgcgatgtgagcaccaggaatcgccgccaagggaacagatacacggatgtctcaggtagtatttttcttctctattattttcttaacccttcctcaagtctcaaacaaccatatatcactccttacatgggccagcccacaatgccactcacgcactcacccaaaaacaacccagaatggcgcacacacccttcggcaaccttcgcttcaaacttcagcttctggctcca

SEQ ID NO: 29672 - DNA, 1237 bp, Zea Mays
ctcacgccctgctagcccctgctgcgggttgtcgagctctctgctcacgctcagcttgctctttccttgtttaccgcgcgcacgaattttatctgctcgccacagcgtgtcgagctcccgcactatcatcgcttctatcgcaagctcgttagccacagttatcttgaccgcgtcagctcgccagacctacaactctatatacgccaccctctcgtatcgttgtcgagcccgtcgaacctcgttcttctctgctcgctctcgtcgaataccaaatcccggatattagataaaaataagcgaggcccctgtgtatcgcttatcaagtactcggttgaagacatcaatcgaagatcatcgttgtttggtgcgtcgtcaagaaatcccaagacgaagctagcagcgcgatttttcccaagcgctcgacaaattgcttggatcagaaaatcgctaccgatctcgcagattcgtgtcagctgtggaaacggtaagctgataaattattcagaatagttcgatcgttgaataaattaatgtgttagtgcgaggcttattaaggtgctcgataaattgcgtaagtcccaaaactctcgtcgacttcgcagtttttgcgagtatcgagccagattccgttatagcgagttatgtcgctattcgggacaattaactaaattaatatatcgagtagaatattagtaggcctgtgtgataaagaactgtttgattaattgtggacatgtaaaatatgtgaggagtaaaataaaattaaaatagtactttgtgaacgatgtagtatcatttataaaacgagggataattttagaatttaattaattagctgatgagttgagtaggctaattgtgtttcatgtgtataatatgttgctcgtgatgtttgtgttagattcgtttaatttagagaagcgtaattattgcgtgtagtcgtatattaataactagtgattccgtacgattgtacaacgcctcgctgctaggtgttttattcgctatcgcgtagcattatttaggtttgtaatatttccgtcgatatgcattcatgtgcataatgcatttcattcaggaacgttaattaatcgcgtgatgcggagaaaaagacgacccaagtcgaccccaagcgcgggctaacccgcaggatgatgttgatggacagaaccgaagagggataatctggcgaatgtcaagacagaagatgatcgccaagtggtcgcctaacaaacac

SEQ ID NO: 29673 - DNA, 489 bp, Zea Mays
cttgaccgcgtcagctcgccagacctacaactctatatacgccaccctctcgtatcgttgtcgagcccgtcgaacctcgttcttctctgctcgctctcgtcgaataccaaatcccggatattagataaaaataagcgaggcccctgtgtatcgcttatcaagtactcggttgaagacatcaatcgaagatcatcgttgtttggtgcgtcgtcaagaaatcccaagacgaagctagcagcgcgatttttcccaagcgctcgacaaattgcttggatcagaaaatcgctaccgatctcgcagattcgtgtcagctgtggaaacggaacgttaattaatcgcgtgatgcggagaaaaagacgacccaagtcgaccccaagcgcgggctaacccgcaggatgatgttgatggacagaaccgaagagggataatctggcgaatgtcaagacagaagatgatcgccaagtggtcgcctaacaaacactaacctag

SEQ ID NO: 29674 - DNA, 2619 bp, Zea Mays
atggctgtcctcgtcgcggaattcatcctcagattcacagtaatgctaatggacttggaggtaatcactggaattctaaaaaataagcttcttagacatgccattatcctaataccaaattggatttacgatgaaagcaacaatgacaaaagatttgacaaatattcagggaaggttgcctctgaaaagcaagggagctccaatgatagagccctaagggaagaactcgccatcttttcaaaagaagtaatacgatttggcaacctctgcaaagatcctatatggcataacttggggcgatattttgacaagtatgcctctgaaaagttagcgacagataatacacctcaggatcattcaaaggggagtatggaagctattgtccagcaattgattaatttggcacaaaacacttctatcattcagttttttcctatcaggttcatgcttcaaagcaactttattgtcattcttatcggattaaccaatagtatcctacaagctgacgaagagcttctttctgatcttgggactgatgttaaagacgaatgcaccaagtttgatctcgtggataatgtcaaggtgaactatgcaggtgcttttgtgatgatgataaattgcaacctttgcttatccatcggtgtgatttgcttaatggatgcatttttcataaacaccatggggatatcctacacatccaatgaggccttggggacgcccccatggccaacacagccactaccatcaccagcgatggagagggtgctcaaggatgacgccgtcgaggagaagggcgagcgcgccaggatggcatcgtttgttggggccatggcaatctcggatttggtgaagaccacattgggcccaaaaggaatggacaagatcctgcaatcaactggcagaggacgtaatgttactgttacaaatgatggggctaccattttgaagtcacttcacattgacaatcctgctgcaaaggtccttgttgctggagaacttttgaaggaggctgagaagttaattaacatgaaaattcatccgatgactattattgcaggttacagaatggctctcgagtgtgccagagattctttgctaaaaaagaccatggacaacaaagaaaatacagataaattcagatctgatctcatgaatattgctatgactactcttagttcaaaaatactttcccaagacaaggagtacttcgctgaacttgcggttgatgctgtcttgaggcttaagggtagcaccaacttggaatctattcaaattctgaagaaacctggaggatctcttaaggattcctttttggacgaagggttcattcttgacaagaaaattggcattgggcagcccaagcgcattgagaatgccaaaattttggttgcaaacactgctatggacacagataaagttaagatatatggagcacgggtccgggtggattcaatgtctaaggttgcagatattgaagctgctgagaagcagaaaatgagagagaaagtccaaaagatcatagcacacgggatcaactgttttgtcaacaggcagttaatctataacttccctgaggaactctttgctgacgctggcatacttgcaattgagcatgctgactttgagggcattgaacggttagctcttgttactggtggtgagatcgcatcaacttttgataatccagagtctgttaagcttgggcaatgcaaggtcattgaagagattatgattggggaggacaggctaatccatttctctggggttgcgatggggcaggcttgcaccattgtcctaaggggggctagtgagcatgtgctcgatgaggctgagaggtccttgcatgatgccttgtgcgtgttgtcccagacggtaaatgatacccgtgtcttgtttggaggcggatggcctgagatggtgatggccaaagaagtggatgaacttgcaaggaagacccctgggaagaaatcccatgctatcgatgctttctcacatgctctgcaagccatcccaacaatcatagctgacaatgctggtttggatagcgctgatttgatctctcagctacgagctgagcaccacaaagagaactccactgctggaattgatgtcatcacaggcactgttggggacatgcaaaagctagggattcaagagtcgttcaaggtgaagcaggccattcttctgtctgcaacagaggctgccgagatgatcctcagggtcgatgagatcataacctgtgccccgcgcagaagagaggataggatgtgatattacacgctgtttctcgatgtagcgggatgctcatcaccctagttttgaggggtattatggtttaggggcgctcaagttggtcagatttcgagtgtttttggcccctaagcgaccggtacttattatttggttgaaacaatcagccttaggtttgtgttctatattctcatgctgtaccgtttggtagcgagttacgtcgtacgatatgcttgttccatcatgtttttctattccttttaacgtaagaatgggcttgtctttgtttccggacgtggttgctacatgtgttgttggttttgagcgtcaggctagggtggcaattgaccttcattggtcatgtgatcg

SEQ ID NO: 29675 - DNA, 2711 bp, Zea Mays
atggctgtcctcgtcgcggaattcatcctcagattcacagtaatgctaatggacttggaggtaatcactggaattctaaaaaataagcttcttagacatgccattatcctaataccaaattggatttacgatgaaagcaacaatgacaaaagatttgacaaatattcagggaaggttgcctctgaaaagcaagggagctccaatgatagagccctaagggaagaactcgccatcttttcaaaagaagtaatacgatttggcaacctctgcaaagatcctatatggcataacttggggcgatattttgacaagtatgcctctgaaaagttagcgacagataatacacctcaggatcattcaaaggggagtatggaagctattgtccagcaattgattaatttggcacaaaacacttctatcattcagttttttcctatcaggttcatgcttcaaagcaactttattgtcattcttatcggattaaccaatagtatcctacaagctgacgaagagcttctttctgatcttgggactgatgttaaagacgaatgcaccaagtttgatctcgtggataatgtcaaggtgaactatgcaggtgcttttgtgatgatgataaattgcaacctttgcttatccatcggtgtgatttgcttaatggatgcatttttcataaacaccatggggatatcctacacatccaatgaggccttggggacgcccccatggccaacacagccactaccatcaccagcgatggagagggtgctcaaggatgacgccgtcgaggagaagggcgagcgcgccaggatggcttcactacttttccagcttgcgcgcttaatttcagcgggtgttttaaaatgggcatggttccgtgcttgggtgttccatcccatgtgctggcatcgtttgttggggccatggcaatctcggatttggtgaagaccacattgggcccaaaaggaatggacaagatcctgcaatcaactggcagaggacgtaatgttactgttacaaatgatggggctaccattttgaagtcacttcacattgacaatcctgctgcaaaggtccttgttgctggagaacttttgaaggaggctgagaagttaattaacatgaaaattcatccgatgactattattgcaggttacagaatggctctcgagtgtgccagagattctttgctaaaaaagaccatggacaacaaagaaaatacagataaattcagatctgatctcatgaatattgctatgactactcttagttcaaaaatactttcccaagacaaggagtacttcgctgaacttgcggttgatgctgtcttgaggcttaagggtagcaccaacttggaatctattcaaattctgaagaaacctggaggatctcttaaggattcctttttggacgaagggttcattcttgacaagaaaattggcattgggcagcccaagcgcattgagaatgccaaaattttggttgcaaacactgctatggacacagataaagttaagatatatggagcacgggtccgggtggattcaatgtctaaggttgcagatattgaagctgctgagaagcagaaaatgagagagaaagtccaaaagatcatagcacacgggatcaactgttttgtcaacaggcagttaatctataacttccctgaggaactctttgctgacgctggcatacttgcaattgagcatgctgactttgagggcattgaacggttagctcttgttactggtggtgagatcgcatcaacttttgataatccagagtctgttaagcttgggcaatgcaaggtcattgaagagattatgattggggaggacaggctaatccatttctctggggttgcgatggggcaggcttgcaccattgtcctaaggggggctagtgagcatgtgctcgatgaggctgagaggtccttgcatgatgccttgtgcgtgttgtcccagacggtaaatgatacccgtgtcttgtttggaggcggatggcctgagatggtgatggccaaagaagtggatgaacttgcaaggaagacccctgggaagaaatcccatgctatcgatgctttctcacatgctctgcaagccatcccaacaatcatagctgacaatgctggtttggatagcgctgatttgatctctcagctacgagctgagcaccacaaagagaactccactgctggaattgatgtcatcacaggcactgttggggacatgcaaaagctagggattcaagagtcgttcaaggtgaagcaggccattcttctgtctgcaacagaggctgccgagatgatcctcagggtcgatgagatcataacctgtgccccgcgcagaagagaggataggatgtgatattacacgctgtttctcgatgtagcgggatgctcatcaccctagttttgaggggtattatggtttaggggcgctcaagttggtcagatttcgagtgtttttggcccctaagcgaccggtacttattatttggttgaaacaatcagccttaggtttgtgttctatattctcatgctgtaccgtttggtagcgagttacgtcgtacgatatgcttgttccatcatgtttttctattccttttaacgtaagaatgggcttgtctttgtttccggacgtggttgctacatgtgttgttggttttgagcgtcaggctagggtggcaattgaccttcattggtcatgtgatcg

SEQ ID NO: 29676 - DNA, 2612 bp, Zea Mays
atggctgtcctcgtcgcggaattcatcctcagattcacagtaatgctaatggacttggaggtaatcactggaattctaaaaaataagcttcttagacatgccattatcctaataccaaattggatttacgatgaaagcaacaatgacaaaagatttgacaaatattcagggaaggttgcctctgaaaagcaagggagctccaatgatagagccctaagggaagaactcgccatcttttcaaaagaagtaatacgatttggcaacctctgcaaagatcctatatggcataacttggggcgatattttgacaagtatgcctctgaaaagttagcgacagataatacacctcaggatcattcaaaggggagtatggaagctattgtccagcaattgattaatttggcacaaaacacttctatcattcagttttttcctatcaggttcatgcttcaaagcaactttattgtcattcttatcggattaaccaatagtatcctacaagctgacgaagagcttctttctgatcttgggactgatgttaaagacgaatgcaccaagtttgatctcgtggataatgtcaaggtgaactatgcaggtgcttttgtgatgatgataaattgcaacctttgcttatccatcggtgtgatttgcttaatggatgcatttttcataaacaccatggggatatcctacacatccaatgaggccttggggacgcccccatggccaacacagccactaccatcaccagcgatggagagggtgctcaaggatgacgccgtcgaggagaagggcgagcgcgccaggatggcatcgtttgttggggccatggcaatctcggatttggtgaagaccacattgggcccaaaaggaatggacaagatcctgcaatcaactggcagaggacgtaatgttactgttacaaatgatggggctaccattttgaagtcacttcacattgacaatcctgctgcaaaggtccttgttgctggagaacttttgaaggaggctgagaagttaattaacatgaaaattcatccgatgactattattgcagaatggctctcgagtgtgccagagattctttgctaaaaaagaccatggacaacaaagaaaatacagataaattcagatctgatctcatgaatattgctatgactactcttagttcaaaaatactttcccaagacaaggagtacttcgctgaacttgcggttgatgctgtcttgaggcttaagggtagcaccaacttggaatctattcaaattctgaagaaacctggaggatctcttaaggattcctttttggacgaagggttcattcttgacaagaaaattggcattgggcagcccaagcgcattgagaatgccaaaattttggttgcaaacactgctatggacacagataaagttaagatatatggagcacgggtccgggtggattcaatgtctaaggttgcagatattgaagctgctgagaagcagaaaatgagagagaaagtccaaaagatcatagcacacgggatcaactgttttgtcaacaggcagttaatctataacttccctgaggaactctttgctgacgctggcatacttgcaattgagcatgctgactttgagggcattgaacggttagctcttgttactggtggtgagatcgcatcaacttttgataatccagagtctgttaagcttgggcaatgcaaggtcattgaagagattatgattggggaggacaggctaatccatttctctggggttgcgatggggcaggcttgcaccattgtcctaaggggggctagtgagcatgtgctcgatgaggctgagaggtccttgcatgatgccttgtgcgtgttgtcccagacggtaaatgatacccgtgtcttgtttggaggcggatggcctgagatggtgatggccaaagaagtggatgaacttgcaaggaagacccctgggaagaaatcccatgctatcgatgctttctcacatgctctgcaagccatcccaacaatcatagctgacaatgctggtttggatagcgctgatttgatctctcagctacgagctgagcaccacaaagagaactccactgctggaattgatgtcatcacaggcactgttggggacatgcaaaagctagggattcaagagtcgttcaaggtgaagcaggccattcttctgtctgcaacagaggctgccgagatgatcctcagggtcgatgagatcataacctgtgccccgcgcagaagagaggataggatgtgatattacacgctgtttctcgatgtagcgggatgctcatcaccctagttttgaggggtattatggtttaggggcgctcaagttggtcagatttcgagtgtttttggcccctaagcgaccggtacttattatttggttgaaacaatcagccttaggtttgtgttctatattctcatgctgtaccgtttggtagcgagttacgtcgtacgatatgcttgttccatcatgtttttctattccttttaacgtaagaatgggcttgtctttgtttccggacgtggttgctacatgtgttgttggttttgagcgtcaggctagggtggcaattgaccttcattggtcatgtgatcg

SEQ ID NO: 29677 - DNA, 1333 bp, Zea Mays
tttcaaagtagctcaccagataacactcatgtgactgttcattcttgacaagaaaattggcattgggcagcccaagcgcattgagaatgccaaaattttggttgcaaacactgctatggacacagataaagttaagatatatggagcacgggtccgggtggattcaatgtctaaggttgcagatattgaagctgctgagaagcagaaaatgagagagaaagtccaaaagatcatagcacacgggatcaactgttttgtcaacaggcagttaatctataacttccctgaggaactctttgctgacgctggcatacttgcaattgagcatgctgactttgagggcattgaacggttagctcttgttactggtggtgagatcgcatcaacttttgataatccagagtctgttaagcttgggcaatgcaaggtcattgaagagattatgattggggaggacaggctaatccatttctctggggttgcgatggggcaggcttgcaccattgtcctaaggggggctagtgagcatgtgctcgatgaggctgagaggtccttgcatgatgccttgtgcgtgttgtcccagacggtaaatgatacccgtgtcttgtttggaggcggatggcctgagatggtgatggccaaagaagtggatgaacttgcaaggaagacccctgggaagaaatcccatgctatcgatgctttctcacatgctctgcaagccatcccaacaatcatagctgacaatgctggtttggatagcgctgatttgatctctcagctacgagctgagcaccacaaagagaactccactgctggaattgatgtcatcacaggcactgttggggacatgcaaaagctagggattcaagagtcgttcaaggtgaagcaggccattcttctgtctgcaacagaggctgccgagatgatcctcagggtcgatgagatcataacctgtgccccgcgcagaagagaggataggatgtgatattacacgctgtttctcgatgtagcgggatgctcatcaccctagttttgaggggtattatggtttaggggcgctcaagttggtcagatttcgagtgtttttggcccctaagcgaccggtacttattatttggttgaaacaatcagccttaggtttgtgttctatattctcatgctgtaccgtttggtagcgagttacgtcgtacgatatgcttgttccatcatgtttttctattccttttaacgtaagaatgggcttgtctttgtttccggacgtggttgctacatgtgttgttggttttgagcgtcaggctagggtggcaattgaccttcattggtcatgtgatcg

SEQ ID NO: 29678 - DNA, 1769 bp, Zea Mays
ctaggtccctatccctatccggctcctcgcccaccaatctgtacacactccgacgccgacgcgaaatcggaaggaccaccaagctcaaaaaagcgccgcccggcgccgatgttgctgcggcggatgcgatggatgtcggagggggacggccggtgggagctggatgcggagaccccggtgacgatggagggcacggcgcgccccgtcccgggggaccccctgccgctggggctctcacggggctaccgcatcacccgtcccaagcagctagacttcttccaccggttcatggcgtcccctctggtacccaccttctccgccatgcgcgacggcctctctgttaaccacgcccacattttctacatgacagacaactggtcttctaccatcttggagaaaatcaatgttaagaagcttgtgtctgtcgtgaaagagaaattagcaaatcggcaggaagaggcctcttggaccaaagatttaaagaaccacttgcatgatgttatgtctttaggtgtaggcacggagatcttgatcacaccagacaccactttgctgctggagttatttgatatcaagaaaggcaatcgaggaaaagcaatatttcaccacgagcttcctcatcataatattacattccaagcatcttggcctggattatttgttgataagaagggaacatattgggatgtgccattatcattatcggctgaccttgcttcagttggctccagttctggattgagttatcatctattattgcagcagaatagtggggaaccaaaatgttttgggggtgatgaaacagatgatgttcctactgctctgttacctggcctatgtgctaaagtggctatttccatgaagaaaagcattgatgcttggaggaaaaaagaagataagctaaaaaaagttcagccatatgatgtatttctctcggattcacatgtttctttaactggtattgttggtggagtagccagtggatatttgggagactgttcaaggagagtggctatacgagatgaaacacacaagagtaatgcttttataatgtttgacgagaggaataaacgtgctgcctttgcagacctctttgcttctgttactttcactgctcaatacgggaattttcagaggctttttctggatttgactaaggcaagtgcccgatttgatatcacctctggttcattgttcttatgtggtgcttctcgccttgcacaagatttcttcttctctagaagacctgatgtagagacattctgcgatatttgtcctgatgtgacagtttcctttcaacaacagatagttgggcccttcagttttcgtgttgaatcctctgtagccattgaccccagaagccaggaccattttgttcgagtggatgatccgatcttcgcaattgattgggctctcaaagtcctgggttcagcaaaggccacagcgtggtattcacccaagcatcaggaggccatgatggagctccggttctacgaaacctgaagctgttcatcgtgaacgttgtataaaataatgcctggacttcatgattgctatggtcgctgatttcactaggatcagatggtgatgtagcttgtgctgttctcggcgttaacagaggaagttaatactgtttgagtctttagtgaacttgctaggtgaaccagtctgagtttctgattgccttttgtcagtgtacaaaaaccatgcccccaccatttttatttctttaaatatatgaattttagggtgagcttattaaataatta

SEQ ID NO: 29679 - DNA, 1799 bp, Zea Mays
taggtccctatccctatccggctcctcgcccaccaatctgtacacactccgacgccgacgcgaaatcggaaggaccaccaagctcaaaaaagcgccgcccggcgccgatgttgctgcggcggatgcgatggatgtcggagggggacggccggtgggagctggatgcggagaccccggtgacgatggagggcacggcgcgccccgtcccgggggaccccctgccgctggggctctcacggggctaccgcatcacccgtcccaagcagctagacttcttccaccggttcatggcgtcccctctggtacccaccttctccgccatgcgcgacggcctctctgttaaccacgcccacattttctacatgacagacaactggtcttctaccatcttggagaaaatcaatgttaagaagcttgtgtctgtcgtgaaagagaaattagcaaatcggcaggaagaggcctcttggaccaaagatttaaagaaccacttgcatgatgttatgtctttaggtgtaggcacggagatcttgatcacaccagacaccactttgctgctggagttatttgatatcaagaaaggcaatcgaggaaaagcaatatttcaccacgaggcaaaaaatctggatgctcttaacctatttgcttcctcatcataatattacattccaagcatcttggcctggattatttgttgataagaagggaacatattgggatgtgccattatcattatcggctgaccttgcttcagttggctccagttctggattgagttatcatctattattgcagcagaatagtggggaaccaaaatgttttgggggtgatgaaacagatgatgttcctactgctctgttacctggcctatgtgctaaagtggctatttccatgaagaaaagcattgatgcttggaggaaaaaagaagataagctaaaaaaagttcagccatatgatgtatttctctcggattcacatgtttctttaactggtattgttggtggagtagccagtggatatttgggagactgttcaaggagagtggctatacgagatgaaacacacaagagtaatgcttttataatgtttgacgagaggaataaacgtgctgcctttgcagacctctttgcttctgttactttcactgctcaatacgggaattttcagaggctttttctggatttgactaaggcaagtgcccgatttgatatcacctctggttcattgttcttatgtggtgcttctcgccttgcacaagatttcttcttctctagaagacctgatgtagagacattctgcgatatttgtcctgatgtgacagtttcctttcaacaacagatagttgggcccttcagttttcgtgttgaatcctctgtagccattgaccccagaagccaggaccattttgttcgagtggatgatccgatcttcgcaattgattgggctctcaaagtcctgggttcagcaaaggccacagcgtggtattcacccaagcatcaggaggccatgatggagctccggttctacgaaacctgaagctgttcatcgtgaacgttgtataaaataatgcctggacttcatgattgctatggtcgctgatttcactaggatcagatggtgatgtagcttgtgctgttctcggcgttaacagaggaagttaatactgtttgagtctttagtgaacttgctaggtgaaccagtctgagtttctgattgccttttgtcagtgtacaaaaaccatgcccccaccatttttatttctttaaatatatgaattttagggtgagcttattaaataatta

SEQ ID NO: 29680 - DNA, 1646 bp, Zea Mays
atggagggcacggcgcgccccgtcccgggggaccccctgccgctggggctctcacggggctaccgcatcacccgtcccaagcagctagacttcttccaccggttcatggcgtcccctctggtacccaccttctccgccatgcgcgacggcctctctgttaaccacgcccacattttctacatgacagacaactggtcttctaccatcttggagaaaatcaatgttaagaagcttgtgtctgtcgtgaaagagaaattagcaaatcggcaggaagaggcctcttggaccaaagatttaaagaaccacttgcatgatgttatgtctttaggtgtaggcacggagatcttgatcacaccagacaccactttgctgctggagttatttgatatcaagaaaggcaatcgaggaaaagcaatatttcaccacgaggcaaaaaatctggatgctcttaacctatttggtatacagacacccctttacctattgcagcttcctcatcataatattacattccaagcatcttggcctggattatttgttgataagaagggaacatattgggatgtgccattatcattatcggctgaccttgcttcagttggctccagttctggattgagttatcatctattattgcagcagaatagtggggaaccaaaatgttttgggggtgatgaaacagatgatgttcctactgctctgttacctggcctatgtgctaaagtggctatttccatgaagaaaagcattgatgcttggaggaaaaaagaagataagctaaaaaaagttcagccatatgatgtatttctctcggattcacatgtttctttaactggtattgttggtggagtagccagtggatatttgggagactgttcaaggagagtggctatacgagatgaaacacacaagagtaatgcttttataatgtttgacgagaggaataaacgtgctgcctttgcagacctctttgcttctgttactttcactgctcaatacgggaattttcagaggctttttctggatttgactaaggcaagtgcccgatttgatatcacctctggttcattgttcttatgtggtgcttctcgccttgcacaagatttcttcttctctagaagacctgatgtagagacattctgcgatatttgtcctgatgtgacagtttcctttcaacaacagatagttgggcccttcagttttcgtgttgaatcctctgtagccattgaccccagaagccaggaccattttgttcgagtggatgatccgatcttcgcaattgattgggctctcaaagtcctgggttcagcaaaggccacagcgtggtattcacccaagcatcaggaggccatgatggagctccggttctacgaaacctgaagctgttcatcgtgaacgttgtataaaataatgcctggacttcatgattgctatggtcgctgatttcactaggatcagatggtgatgtagcttgtgctgttctcggcgttaacagaggaagttaatactgtttgagtctttagtgaacttgctaggtgaaccagtctgagtttctgattgccttttgtcagtgtacaaaaaccatgcccccaccatttttatttctttaaatatatgaattttagggtgagcttattaaataatta

SEQ ID NO: 29681 - DNA, 2074 bp, Zea Mays
gggcgtggtggtggtgggtgctttgactgcaggcctcggcacggtaggcacaaatcattttggccgctgcgtcgcgttgggagcagtattctactgtgcctgcgtcccgacaagcgaaaagaagagacgggggagggtgggagaacggataccgaaaggggtaggagagtgagcagccagagaacagggaggtagagaggaggaggaggtagaaggcgaaagaaggggaaccaaatcttggacgggaacacatagatttctttggtggaggaaggaggagggcaacaagaggaggttacaggtagcccaatagatctactgctgttgagggagttgatgcaaagctgagttgctgcgcgttggctttctttagagatggcttcagctggtgttgccccttctgggtacaagaacagcagcagcaccagcattggtgccgaaaagttgcaagatcacatgaacgagctaaagattagagatgataaggaagttgaagcaaccataattaatgggaaagggaccgaaactgggcacataattgtcaccactactggtggcaagaatggtcaaccaaaacagacagtgagctacatggctgagcgcattgtaggtcaaggttcttttgggattgtcttccaggccaagtgtttggaaacgggtgagactgttgccataaagaaggttcttcaagacaagcgttacaagaaccgcgaactgcagaccatgcgcctccttgaccaccctaatgttgttgctttgaagcattgcttcttttcaacaactgagaaggatgagctttatctaaatttggtccttgagtatgttccggagacagttcatcgagttgtgaaacatcacaacaagatgcaccaacgcatgccacttatttatgtgaagctttatatgtaccagatatgtagagcattggcttacattcatggtactatcggtgtctgccacagagatattaagccacaaaatcttctggtgaacccacacacccaccagcttaaaatatgtgactttggtagtgcaaaagttctggtcaagggggaaccaaacatatcatacatctgctcgcgatactatagggctccagagctcatatttggtgccactgagtataccacagcgattgacatttggtctgctggttgtgttcttgctgagcttatgctagggcagcctttgtttccaggtgaaagtggtgtggaccaactcgtcgaaatcatcaaggtccttggtactccaacaagggaagaaattaaatgcatgaacccgaattacacagagtttaagttcccacaaatcaaagctcacccatggcacaaggtattcaacaaaaggatgccgccagaagctgttgatctggtctctcggctactccagtactccccaaatctgagatgcactgctgtggaggcgcttgtccacccattctttgacgagcttcgagatcctaatactcgtcttccaaatggccgcttcctgccaccccttttcaacttcaagcctcacgaattgaaaggagtcccagcagacattgttgcgaaattggttccagaacatgcgaagaagcaatgctcttatgttggatcgtgagatgaccgtgccttgggactggaacctgaggtcgcaatcgtgcatttcccctgggatgttggatgatcttgaggcatgcgagcctgtcgttgaagatgcaaggttacctacttgtacgacgtacgccaatgcgacctgtgtagctcgtttgagacgactgaggaaatgtgacgcgcgcagatgctggttcgtaggacttcttttgctcctttgggagagggaggagtcataaactgaagccccggtttgtagaaaaatggcttctcgtgaaatgtttggtatagttcttcggtttcttaaaaactgctcttcgtgaaatggagtatggtgggctcttttatcgaagttggctgggcggctggggcacgtataacccaattaaatgagacattttttgagaggtctctaaagagttaagtgaaaaaaattaaggaacaagctctttgtgaagagtctttctctacataattct

SEQ ID NO: 29682 - DNA, 2018 bp, Zea Mays
gggcgtggtggtggtgggtgctttgactgcaggcctcggcacggtaggcacaaatcattttggccgctgcgtcgcgttgggagcagtattctactgtgcctgcgtcccgacaagcgaaaagaagagacgggggagggtgggagaacggataccgaaaggggtaggagagtgagcagccagagaacagggaggtagagaggaggaggaggtagaaggcgaaagaaggggaaccaaatcttggacgggaacacatagatttctttggtggaggaaggaggagggcaacaagaggaggttacaggtagcccaatagatctactgctgttgagggagttgatgcaaagctgagttgctgcgcgttggctttctttagagatggcttcagctggtgttgccccttctgggtacaagaacagcagcagcaccagcattggtgccgaaaagttgcaagatcacatgaacgagctaaagattagagatgataaggaagttgaagcaaccataattaatgggaaagggaccgaaactgggcacataattgtcaccactactggtggcaagaatggtcaaccaaaacagacagtgagctacatggctgagcgcattgtaggtcaaggttcttttgggattgtcttccaggccaagtgtttggaaacgggtgagactgttgccataaagaaggttcttcaagacaagcgttacaagaaccgcgaactgcagaccatgcgcctccttgaccaccctaatgttgttgctttgaagcattgcttcttttcaacaactgagaaggatgagctttatctaaatttggtccttgagtatgttccggagacagttcatcgagttgtgaaacatcacaacaagatgcaccaacgcatgccacttatttatgtgaagctttatatgtaccagatatgtagagcattggcttacattcatggtactatcggtgtctgccacagagatattaagccacaaaatcttctggtgaacccacacacccaccagcttaaaatatgtgactttggtagtgcaaaagttctggtcaagggggaaccaaacatatcatacatctgctcgcgatactatagggctccagagctcatatttggtgccactgagtataccacagcgattgacatttggtctgctggttgtgttcttgctgagcttatgctagggcaggtgaaagtggtgtggaccaactcgtcgaaatcatcaaggtccttggtactccaacaagggaagaaattaaatgcatgaacccgaattacacagagtttaagttcccacaaatcaaagctcacccatggcacaaggtattcaacaaaaggatgccgccagaagctgttgatctggtctctcggctactccagtactccccaaatctgagatgcactgctgtggaggcgcttgtccacccattctttgacgagcttcgagatcctaatactcgtcttccaaatggccgcttcctgccaccccttttcaacttcaagcctcacgaattgaaaggagtcccagcagacattgttgcgaaattggttccagaacatgcgaagaagcaatgctcttatgttggatcgtgagatgaccgtgccttgggactggaacctgaggtcgcaatcgtgcatttcccctgggatgttggatgatcttgaggcatgcgagcctgtcgttgaagatgcaagcgtttgagacgactgaggaaatgtgacgcgcgcagatgctggttcgtaggacttcttttgctcctttgggagagggaggagtcataaactgaagccccggtttgtagaaaaatggcttctcgtgaaatgtttggtatagttcttcggtttcttaaaaactgctcttcgtgaaatggagtatggtgggctcttttatcgaagttggctgggcggctggggcacgtataacccaattaaatgagacattttttgagaggtctctaaagagttaagtgaaaaaaattaaggaacaagctctttgtgaagagtctttctctacataattct

SEQ ID NO: 29683 - DNA, 2168 bp, Zea Mays
atggggtcagattcagctagcgtaaaagtacctgaacttgagttggaactttcatgtggaacgttgggtggtatggtcacaactgttgaagctctggagagaatacatggatttcaattaggcgatagtacactggaatggaaaaagaagaaatgggatgacttcaaggagagactatccaagcttctgagtttacaagaagcctggactctaataattgatgatggattggcggcttcatttgtggcccccgctactgattcgttagaagatgacagccaactaaccattgaagagtattagaggagttgggagcagaatgaggaacttggcctgagtgacatggatacgtcctctgtagacgcggcttacaacacgaccatcacataattttttagttttcttgtgccgaatgtatttgttacgctagcttgtatcattatcagtttactttgatgaactttgagtgtgtatactaatatcaggaacttatatttcctctaacgataaacatggagcgggtatttttatcggttacgctgttgaagatgctcttagaataccggtggttaatcaggtgtacaacaatggtgctgttttcaattctctttctaggtctttcaagttcctgagatggtctagacttgcccatgctgaggtggtggcctttccatcccctgttcttgtggagttcaaaggggttcgaattcatgcttgggatttggctactgctcagaatttgttgagggatcactgcactgatgtggagctccatcctgatacggtgaatcgacacgacttctcttccttcaaggtttttggatggtgccgacgtccacacctcattccaaatttgttggagctctttgttccagaacctttgatgatgacgcctggctctacctcacttgagagaagattgcttgcttaccaagtgactacccatgcgtctctgatctctccgctggtgcatagcgctgctgcacctccgccgccggcgtttgatgatgatcaggacaccgggcctcgtcggcgtaggctgaacagttcagttcagatggggcatgctgagtccggggaagcacttgcagcacgaaggcccgtccgtgaaatacttggtgttgccccggtctctgttcgacatgtggaggctggattgtatggcggtggcgtttcttctcctaaaggagcgccttccattgccttggttactggggacacacatgcaaacgctgtggagccggtgattggctgcattgatgctgggttgtgtctgcccctggagaatgttcatgggcctgacactgtgactttgggtgtggcggtttctagcctgtttccttctagttctaggagcccagtgggtcttatgccatcatcagagattccaggtgctcacgatggcccgggtggagaggtcttcttgtccatagtcgatgttgacgttgactcttctgttccggcggtggagactttgagtgcatcttcatccctcccgggtggtcctgccatcgctacccgagtggggaatgtgttgaagccatccatgaaggctgttggggcagggctcaggatgtggccttgtccccccatcaaatatttcagaaggaagcccagaggggctgctgctcaacaatcccctctctcggctgctcagtcagcgaccaccgctgatttcatcgccagaatgtccaggccggccgctcgggtcctgtgtgtgtcgcagaagcggcaacgtcgccccagggcacctcatgagggatctcttcctcggcggagcaggcgcttggctagagcagatgttgaaaaggtaatggccccagcacgagtttcgaaaggaaaatggaggattgctaatgagctcggccttcttggtggggatccatctgaatcgctgtccctggaggttctcgataattatgccaaggttttcggtgagcggttgactaatttgcaagttaaagctcttgcggctctcttcaactggactgtcccagaagacttgcagggtgcggtggtgcaggcctgatcgcctctgtgtgtattgatggtcgttttttcaatggttttccaaatggatccgtcaaaaattgtgtgctggaacgtgcggggtcttaatggctcggcccgtcaggatgttgtacgttgtttggtggactcagtcaaag

SEQ ID NO: 29684 - DNA, 2241 bp, Zea Mays
atggggtcagattcagctagcgtaaaagtacctgaacttgagttggaactttcatgtggaacgttgggtggtatggtcacaactgttgaaggtttaattgtgaaaatatgcgagggtagggctgcttcactttattgacccattctctttttatgatgaaaatgctctggagagaatacatggatttcaattaggcgatagtacactggaatggaaaaagaagaaatgggatgacttcaaggagagactatccaagcttctgagtttacaagaagcctggactctaataattgatgatggattggcggcttcatttgtggcccccgctactgattcgttagaagatgacagccaactaaccattgaagagtattagaggagttgggagcagaatgaggaacttggcctgagtgacatggatacgtcctctgtagacgcggcttacaacacgaccatcacataattttttagttttcttgtgccgaatgtatttgttacgctagcttgtatcattatcagtttactttgatgaactttgagtgtgtatactaatatcaggaacttatatttcctctaacgataaacatggagcgggtatttttatcggttacgctgttgaagatgctcttagaataccggtggttaatcaggtgtacaacaatggtgctgttttcaattctctttctaggtctttcaagttcctgagatggtctagacttgcccatgctgaggtggtggcctttccatcccctgttcttgtggagttcaaaggggttcgaattcatgcttgggatttggctactgctcagaatttgttgagggatcactgcactgatgtggagctccatcctgatacggtgaatcgacacgacttctcttccttcaaggtttttggatggtgccgacgtccacacctcattccaaatttgttggagctctttgttccagaacctttgatgatgacgcctggctctacctcacttgagagaagattgcttgcttaccaagtgactacccatgcgtctctgatctctccgctggtgcatagcgctgctgcacctccgccgccggcgtttgatgatgatcaggacaccgggcctcgtcggcgtaggctgaacagttcagttcagatggggcatgctgagtccggggaagcacttgcagcacgaaggcccgtccgtgaaatacttggtgttgccccggtctctgttcgacatgtggaggctggattgtatggcggtggcgtttcttctcctaaaggagcgccttccattgccttggttactggggacacacatgcaaacgctgtggagccggtgattggctgcattgatgctgggttgtgtctgcccctggagaatgttcatgggcctgacactgtgactttgggtgtggcggtttctagcctgtttccttctagttctaggagcccagtgggtcttatgccatcatcagagattccaggtgctcacgatggcccgggtggagaggtcttcttgtccatagtcgatgttgacgttgactcttctgttccggcggtggagactttgagtgcatcttcatccctcccgggtggtcctgccatcgctacccgagtggggaatgtgttgaagccatccatgaaggctgttggggcagggctcaggatgtggccttgtccccccatcaaatatttcagaaggaagcccagaggggctgctgctcaacaatcccctctctcggctgctcagtcagcgaccaccgctgatttcatcgccagaatgtccaggccggccgctcgggtcctgtgtgtgtcgcagaagcggcaacgtcgccccagggcacctcatgagggatctcttcctcggcggagcaggcgcttggctagagcagatgttgaaaaggtaatggccccagcacgagtttcgaaaggaaaatggaggattgctaatgagctcggccttcttggtggggatccatctgaatcgctgtccctggaggttctcgataattatgccaaggttttcggtgagcggttgactaatttgcaagttaaagctcttgcggctctcttcaactggactgtcccagaagacttgcagggtgcggtggtgcaggcctgatcgcctctgtgtgtattgatggtcgttttttcaatggttttccaaatggatccgtcaaaaattgtgtgctggaacgtgcggggtcttaatggctcggcccgtcaggatgttgtacgttgtttggtggactcagtcaaag

SEQ ID NO: 29685 - DNA, 2109 bp, Zea Mays
aggagcggatacaaacacccatcgaagccacaggacgactacatgtacatgcaacacatagactaaatataggctatagtagctagtgcacctgaaggcaataggtacctaccagcaggccagcaaggatggcagtgccgacgaagccgagcccgccgccgccgccgctgcccacgttggacatgctacacggccagaccctagtggtcgacgtggaggcgtggatcctgcgcccgccggtgtccgccttcccgtacttcatgctcgtcgccgtcgaggccggcggcttcctccggggtcttctcctgctgctcctctacccgctgatgctcctcctcctcggcgacggcgcgcgggctaaggccatggccacggtcgctctcgtcgggctggaggagaaggaggtggccagggtcggccgagcagtgctgcccaagttcttcctggaggccacggcggcggagggcgtggcagcggtgcaggcggcagcgcgggtggtggcggtgaccgcaaccttcccgagggtgatggtggacggattcctgagggagtatgtcggcgtggacgccgtcgtggggcctgaggtgaggtcggtcggtggggtcctcgcggggctgatggacgatgaggacgcagatgaggtggcggcgaagacgcttcgggccgtgtttggcgacgacttggaggctgcgagaaagaagggcgccgtggggctcgtcggaccggcgagcagcggtagggtgcactaccttttatgtccttactactgcaaggaaactttcgctgtaagcgagaccgacacgcggggatggcgaccgctgccgcgggacaagtacccgaggcctctcgtcttccacgacggccgcctcgccttcgcgcccacgccgccggctgcgctcgccatgtacaccttcctcccgttcggcatcgtgctcgtcgtcttccgcatcatcgccttctccttcctcccgtatcgcgtctgcttcccggtaggtgcgctcaccggagtgcactaccgcctcgtggccggccacgagcccaccgccacgcgccaaggcggcggcgggcgactgtacgtctgcaaccaccgcacgctgcttgaccctgtcatcgtggccgcggcgctggggaagccggtgaccgcggtgacgtacagcctgagcccggtgtcggagctgatcgcgccgatccgcacggcgcgcctgacgcgggaccgcgagaaggaccagcgcaacatggcggcggtgctggcgcgcggcgacctggtggtgtgccccgaggggaccacgtgccgggaggagtacctgctccggctcagcccgctcttcgccgagctcggcgtcgacgtgaaccccgtggcgctggacacgcgcgtcggcatgttctacggcacgtccaccaagccggggcgcaagtggatggaccccttctacttcatgatgaacccgcggccggcgtaccgtgtggagttcctgccgcgcgccgccaccgcgccggtggacaacggtggccgcggccacagcatcgacgtggcgaaccgggtgcagcgcgagctcggcaaggcgctggggtttgagctcacagggctgacccggaaggacaagtacttgacgcttgccggcaacgaaggcgtcgtgccgaccgcgcccaaaaaccactgacgtaaataattgtccatgtggtttttccgttccaatgagcagcgcggccggacctctcgaagcacgtacggttgctatataggtccagtcgtctttgcgcaagaaataaaacatacacgtgcatgtaattaaggttaccatttagtttgcaaatcaaacgatctatgcacaagctcaacaaaaacaaatcaaatctatagaataatatgcgcaaataagcctttgctggagtctgctggagtgatagatggtctgaaatttgaaggctggctctgattcggtttttggcaacttcttattagtctcgatccaaagccacgtcagtttttttgacaaatttttatttaaaatggatcatggtgttttattgaaatacaatttcatctgagtatacaactaagcaaataaaaaattatatagtttataaaaacaaatataaattacataa

SEQ ID NO: 29686 - DNA, 2178 bp, Zea Mays
aggagcggatacaaacacccatcgaagccacaggacgactacatgtacatgcaacacatagactaaatataggctatagtagctagtgcacctgaaggcaataggtacctaccagcaggccagcaaggtatagatagccatggccatgaaatcttcatcattgtgcaatccatttgtctccttgttcttcttcctcctgcggaagctcgccggtcatcggtaccaccgtggcaggatggcagtgccgacgaagccgagcccgccgccgccgccgctgcccacgttggacatgctacacggccagaccctagtggtcgacgtggaggcgtggatcctgcgcccgccggtgtccgccttcccgtacttcatgctcgtcgccgtcgaggccggcggcttcctccggggtcttctcctgctgctcctctacccgctgatgctcctcctcctcggcgacggcgcgcgggctaaggccatggccacggtcgctctcgtcgggctggaggagaaggaggtggccagggtcggccgagcagtgctgcccaagttcttcctggaggccacggcggcggagggcgtggcagcggtgcaggcggcagcgcgggtggtggcggtgaccgcaaccttcccgagggtgatggtggacggattcctgagggagtatgtcggcgtggacgccgtcgtggggcctgaggtgaggtcggtcggtggggtcctcgcggggctgatggacgatgaggacgcagatgaggtggcggcgaagacgcttcgggccgtgtttggcgacgacttggaggctgcgagaaagaagggcgccgtggggctcgtcggaccggcgagcagcggaaactttcgctgtaagcgagaccgacacgcggggatggcgaccgctgccgcgggacaagtacccgaggcctctcgtcttccacgacggccgcctcgccttcgcgcccacgccgccggctgcgctcgccatgtacaccttcctcccgttcggcatcgtgctcgtcgtcttccgcatcatcgccttctccttcctcccgtatcgcgtctgcttcccggtaggtgcgctcaccggagtgcactaccgcctcgtggccggccacgagcccaccgccacgcgccaaggcggcggcgggcgactgtacgtctgcaaccaccgcacgctgcttgaccctgtcatcgtggccgcggcgctggggaagccggtgaccgcggtgacgtacagcctgagcccggtgtcggagctgatcgcgccgatccgcacggcgcgcctgacgcgggaccgcgagaaggaccagcgcaacatggcggcggtgctggcgcgcggcgacctggtggtgtgccccgaggggaccacgtgccgggaggagtacctgctccggctcagcccgctcttcgccgagctcggcgtcgacgtgaaccccgtggcgctggacacgcgcgtcggcatgttctacggcacgtccaccaagccggggcgcaagtggatggaccccttctacttcatgatgaacccgcggccggcgtaccgtgtggagttcctgccgcgcgccgccaccgcgccggtggacaacggtggccgcggccacagcatcgacgtggcgaaccgggtgcagcgcgagctcggcaaggcgctggggtttgagctcacagggctgacccggaaggacaagtacttgacgcttgccggcaacgaaggcgtcgtgccgaccgcgcccaaaaaccactgacgtaaataattgtccatgtggtttttccgttccaatgagcagcgcggccggacctctcgaagcacgtacggttgctatataggtccagtcgtctttgcgcaagaaataaaacatacacgtgcatgtaattaaggttaccatttagtttgcaaatcaaacgatctatgcacaagctcaacaaaaacaaatcaaatctatagaataatatgcgcaaataagcctttgctggagtctgctggagtgatagatggtctgaaatttgaaggctggctctgattcggtttttggcaacttcttattagtctcgatccaaagccacgtcagtttttttgacaaatttttatttaaaatggatcatggtgttttattgaaatacaatttcatctgagtatacaactaagcaaataaaaaattatatagtttataaaaacaaatataaattacataa

SEQ ID NO: 29687 - DNA, 1498 bp, Zea Mays
atcagctaagcctgctctgccagcacttgcacgacttatccattccaacgatgaggaagttctcactgatgcttgctgggctttgtcatacttatctgacggcactaatgataagatccaagctgtaattgaagctggtgtttgcccccggcttgtggagctccttctccatccatcaccgtcggtgcttatacctgctctacgaactgttgggaacattgtaactggagatgatcagcaaactcagtgtatcattgatcatcaagctcttccccgcctcctgaatttattgacacagaaccacaagaaaagcattaagaaagaggcatgctggacgatttcaaatattactgctggaaacaaagatcagatacaggctgtcataagtgctggtattatcgctcctttgttgcaactgcttcaaggagcagagtttgatatcaagaaggaggctgcttgggccatctcaaacgctacctctggtggttcccatgagcaaatcaagtacttggtgtctgagggctgcatcgtgccgctgtgcgaccttcttgtttgccctgatccgagaattgtaacagtttgtctggagggtcttgagaatattcttaaagtaggggagcacgacaagaccatgggcgcaacaggtgacattaatgttttcgctcagatgattgacgacgcggaaggcctggaaaaaatcgagaacctacagagccatgataataatgaaatctatgaaaaggctgtgaagcttcttgagacttactggatggaggaggaagatgatgcaatggctactgctggggaagctgctcctgctgtttttgactttagccaaggtggcaaccctcctggtggtggtttgaacctcaactgaatacagtatttgaccaaaagggtgttaattccctcatgacaacctagtctggtcgattccatgtgggataatggtttgtggttggtccagtaaattcgagatttcaagggagatgggttagcattattcccaagctgtcatggatatcagtatcgcagggtctgtaacaggaccataatcgtcgaacatgagtctgggtttttgagcaggctactctctagggtttgcgtcatttatgttttatatctggctactgtatagcctgagtctaattatctgcaatgccgtaggacattcctgagtggtttggttttgaggttcctcaggaatggtctgcgttgcaggttgtccagagttgtaaaccttcaagtggtttgagtatattgctcggccttgctttactacggtcgatccaacctgttggaggccaaatgacttataaaaagctgttggcagctgcattgttggcggttggtgataaaatttgtagggaaaaataaggcgaaggttttgacttttgaagccaaattcaatttcgagttccacgcagtaacggaggctgatacaatgccctttacaactcaaatacaacaaatttccgctcaacagttatgtgttttt

SEQ ID NO: 29688 - DNA, 1289 bp, Zea Mays
ccccaccctgctagttaccctctttgtgatcagaaaggtgtatcattgatcatcaagctcttccccgcctcctgaatttattgacacagaaccacaagaaaagcattaagaaagaggcatgctggacgatttcaaatattactgctggaaacaaagatcagatacaggctgtcataagtgctggtattatcgctcctttgttgcaactgcttcaaggagcagagtttgatatcaagaaggaggctgcttgggccatctcaaacgctacctctggtggttcccatgagcaaatcaagtacttggtgtctgagggctgcatcgtgccgctgtgcgaccttcttgtttgccctgatccgagaattgtaacagtttgtctggagggtcttgagaatattcttaaagtaggggagcacgacaagaccatgggcgcaacaggtgacattaatgttttcgctcagatgattgacgacgcggaaggcctggaaaaaatcgagaacctacagagccatgataataatgaaatctatgaaaaggctgtgaagcttcttgagacttactggatggaggaggaagatgatgcaatggctactgctggggaagctgctcctgctgtttttgactttagccaaggtggcaaccctcctggtggtggtttgaacctcaactgaatacagtatttgaccaaaagggtgttaattccctcatgacaacctagtctggtcgattccatgtgggataatggtttgtggttggtccagtaaattcgagatttcaagggagatgggttagcattattcccaagctgtcatggatatcagtatcgcagggtctgtaacaggaccataatcgtcgaacatgagtctgggtttttgagcaggctactctctagggtttgcgtcatttatgttttatatctggctactgtatagcctgagtctaattatctgcaatgccgtaggacattcctgagtggtttggttttgaggttcctcaggaatggtctgcgttgcaggttgtccagagttgtaaaccttcaagtggtttgagtatattgctcggccttgctttactacggtcgatccaacctgttggaggccaaatgacttataaaaagctgttggcagctgcattgttggcggttggtgataaaatttgtagggaaaaataaggcgaaggttttgacttttgaagccaaattcaatttcgagttccacgcagtaacggaggctgatacaatgccctttacaactcaaatacaacaaatttccgctcaacagttatgtgttttt

SEQ ID NO: 29689 - DNA, 1281 bp, Zea Mays
tttcggaccttgcctttgtgtttaatccagtgtatcattgatcatcaagctcttccccgcctcctgaatttattgacacagaaccacaagaaaagcattaagaaagaggcatgctggacgatttcaaatattactgctggaaacaaagatcagatacaggctgtcataagtgctggtattatcgctcctttgttgcaactgcttcaaggagcagagtttgatatcaagaaggaggctgcttgggccatctcaaacgctacctctggtggttcccatgagcaaatcaagtacttggtgtctgagggctgcatcgtgccgctgtgcgaccttcttgtttgccctgatccgagaattgtaacagtttgtctggagggtcttgagaatattcttaaagtaggggagcacgacaagaccatgggcgcaacaggtgacattaatgttttcgctcagatgattgacgacgcggaaggcctggaaaaaatcgagaacctacagagccatgataataatgaaatctatgaaaaggctgtgaagcttcttgagacttactggatggaggaggaagatgatgcaatggctactgctggggaagctgctcctgctgtttttgactttagccaaggtggcaaccctcctggtggtggtttgaacctcaactgaatacagtatttgaccaaaagggtgttaattccctcatgacaacctagtctggtcgattccatgtgggataatggtttgtggttggtccagtaaattcgagatttcaagggagatgggttagcattattcccaagctgtcatggatatcagtatcgcagggtctgtaacaggaccataatcgtcgaacatgagtctgggtttttgagcaggctactctctagggtttgcgtcatttatgttttatatctggctactgtatagcctgagtctaattatctgcaatgccgtaggacattcctgagtggtttggttttgaggttcctcaggaatggtctgcgttgcaggttgtccagagttgtaaaccttcaagtggtttgagtatattgctcggccttgctttactacggtcgatccaacctgttggaggccaaatgacttataaaaagctgttggcagctgcattgttggcggttggtgataaaatttgtagggaaaaataaggcgaaggttttgacttttgaagccaaattcaatttcgagttccacgcagtaacggaggctgatacaatgccctttacaactcaaatacaacaaatttccgctcaacagttatgtgttttt

SEQ ID NO: 29690 - DNA, 2967 bp, Zea Mays
atgtcgtcgcagcgtatttcaacctgttgttgccgattccctgcttgctgtacgaaaaacagacagacaaactctacccctcttgatggaaagaaaggcctttcaggttcaagtataaacaaaaagatgcctgtgctgtgcggttctgacttctgggctaacgtcacaggcacagacttcaaagtaaagcagttccaggagcagaggcaatcggatcatcaaaggataataaaagggaagaaattcaacatacatatcatcggctacggtgtaaccgtatcaacatacaacctatccatgtcccatgaaccccatttgctagacagcaacaaccaaaaattttaccccaaccggatgatacaacaacagcgagatcagccacgcagtcggaagggggatcagttcccctgggcgcccactgcctccgctgctcctgtgcctgcccagcagtacctgtaggcagcgtaaacggaggacacaaccaggacgccgaggatcatgtaggtgacgatcgtggccacgctgatttggccggggaccttcttcaccttgctttgcgcgagcaaggccttcggcttgatcttcgccatgttgcgccgcggcctctgctagtcacaagaacaagatcaaaagaagacgactagaattattttctttttgttggaccatcgtcaaccaaacagcatacaaggtgattacggaaccaacgatagatttgtaatagcgacaccgcctcaggttgtcagaacacaaacatgttgctaatgtgactgttctttccaggctgataatacctggttcacagtctatgaaatgaaatacacaagcagaatatactttttttttcatgcgccacgaattcatgctcatttgcaaactataggatgtataatttttcagttgaaacttgaaatacctggtggacagggcaaacaaagatattctcatggggttatttggagattgacaccaggagcaactaacctacttggatactccatggcagaacataagtttaatgtaagagttacttgtcttattacatgggataaggcccatattaataaagagtggcacaaacaaaaaaggttcaagagttcatttatccaactttgcaccctgacttgacttcggcactcctctaccaatggaatggctttacaggcagcagcagtaaccagcaaggtaattaaacatatcacccttttcttccatcctccaagaatctcttttactatttcttgaaatacaggcaaggtgtgttcatgttgttgttgcatttatatggtttctgaaatagcagtaccatacgagctacagagctaagcatgttcaaactaccgacaggggaaaagcatataatctgatggcaaaagcaatgagactggttctaaaactccatggcacaacaaaagtttctagccaatcttactcatatgacatagcataatgtactttaataaggatacacaaaataaaaaaggttcacgaatatatttcttcattgcagcctgactagacttctgcacacctctatcaattttctgccttgataggaagcagcactgcctaatcaatcaagacacccctctcattcactctcctccaagaatatctcttactaattaaaattagggccagggaattttcatactttgtttttgtgctagtagagtaggaaagtcatacaggaaaaatctaaatggttaagaaaagatatttaaagcagcaaaaagagtttcaacaagaataaatttgggcactagtattgataacagtatcttctcttttcttgctgtgcatatgaaaatgctaggtaaatcaatcacaagaagaaaaaaaactgagtttttgtttacatcatggacaatgtcctagcctagcataaatgttgacttgccacctaaaatgacctgaacacactttggttcagcatatgtatcacctgcttacatactacggagcgtagcttccttcactaaatgacactgtgattctctagattacgggtacaggccgagggtatgcacactggtcatgcttatactggtctaaacccatttccgactgggtcaaagaagatgaccggactaatgctgcatgaccactgaccaagggcggacttagcataagccacagggattcaaatgcatcctagttttttttcctggaagaggaaagctatcaagtgatatacaatgcccaggagcagggtcaaaggcgacgattgaactaaagactatcctggtgtagtagactcagaaggcgtgggatccagatgagcactcgcagttgtctattaaaaaaaagtttgctaccttcttaggctcctgtttggaacctctaaaactactaaaaatgagttattgggttccaaacaccatcagctaataccgcagctaattgttagctacctcacagctaataattagtttggctcaacccagctaataatttattagctggctaactattagttgtaggggtttgaaacagggccttagttatccacgcagcaaacaaaacaggcggagtggagcatcgacctagcaagaaaaatacttggatcgatttctctttgtccgtaagaaaaagagcagatgcttagagggtgcgaaatcacaccacacggctccttgccgacgaaaagcacgggtggcttatcactgtcgatcccgcaagtacgcacgggagtaaatgctctaccaacgatctcgctaccagcagcaggtccccgacgcagcagagcagaccggaccgaatcatggacaagctgaacggatcggagagggaaaaggcgtaaccggaatcgaggtcccccaacgaagtaaaagatcccgcaggtgagaacgagcggtttatctaagcgaaggcaggggcatccttacccggaaggacgagagcagaccaagcgcggacggagtagcacccttggagacgagaagccgagaacaaacgaggcctcgg

SEQ ID NO: 29691 - DNA, 1619 bp, Zea Mays
cgaggaaatcgagcagcggcaccagggcccaggccaatcccaggaaaccggaagctcgaaagctgccaagccctcgccgtcctgccgcccacggcttaccgctgccgcctgccggccaccccacccaatgaaaatccgcatatactgtagtactccgtttcgcccgcgccgcccatccgttcggctgcctcgcacgccccaaaatcccctgctgcgcctccaaagccagcagccggcaggtcccgctacaaaagcaggcggcatgcgcgtgcgcgacaggtagcagctgcctgagccagtgcgcttcggtgagcagacaggacggcataggatagagatggcggccgcggtggagggggtgcggcaccgaacgctggaggcgaacggagtgcgcctgcacgtggcggaggctgggcccgaggagggcagcgccccagtggtgctgctccttcacggcttcccggacctctggtacggctggcgccaccagatgtccgccctggcggcgcgcggctaccgcgccgtggccccggacctccgcggctacggcgactccgactccccgcctgatgcgtccagctacaccaccttccatgtcgtcggggacctcgtcgcgctcatctccgacctcggccagcggcaggtgttcgtggtggggcacgactggggagccaccgtggcgtggcagctttgtctgcttcggccggacctggtgcgggcgctcgtgaacctaagcgtcgtgtaccacccgcggcggccggagatgagcccgctccaggccatcagagctgcctgcggcgaagaccactacatgtgccgcttccaggatgcatacaggaatttggtgttgctgaagctgaatttgctctatatgacatcaagtgggtgtttaagaagacatttggcatgcgcaagccagctcctcttattctgcccaaggacaagagcttctttgactctcttgattcagatggaacttgtcctccatggctatcagaggaagatatttcttactatgcagaaaaatttgcgaaaacaggctttactggaggacttaactactacaggtgcatagacaggagttgggagctttctgcggcatggactggagctccgataaaagttccgtcgaaattcattgttggggaccttgacattacatacaacgctccgggggtaccggactacattcacaagggtggcttcaaggcaagcgtgccaaatctagaggacgtggttgtaatggagggagtgagccacttcatcaaccaggagaaacccaacgaggtctctgatcacatctgcgagttctttagcaagttctgatacgtattggaaaaatctcaaggagccgttatatgattctgagctactcgtgtttttatgtcaaaaaaatgcggttgcgagtgtcaccatacaaatatacgatctaaataaaattcgtctgtctcacctttttacacagctctaccaagaaacttgttttgcctttgtggtagacaccatatggggtgatccaagaagcaacttccagcggccacggcagcttggagttgcatgataaatttccttttgatgtatgacacacgtgagggtgaggctctcatattattgattta

SEQ ID NO: 29692 - DNA, 962 bp, Zea Mays
atccgttcgattcgttgcacaaaactgcgaagcagacacggtgttcgtggtggggcacgactggggagccaccgtggcgtggcagctttgtctgcttcggccggacctggtgcgggcgctcgtgaacctaagcgtcgtgtaccacccgcggcggccggagatgagcccgctccaggccatcagagctgcctgcggcgaagaccactacatgtgccgcttccagagtgggtgtttaagaagacatttggcatgcgcaagccagctcctcttattctgcccaaggacaagagcttctttgactctcttgattcagatggaacttgtcctccatggctatcagaggaagatatttcttactatgcagaaaaatttgcgaaaacaggctttactggaggacttaactactacaggtgcatagacaggagttgggagctttctgcggcatggactggagctccgataaaagttccgtcgaaattcattgttggggaccttgacattacatacaacgctccgggggtaccggactacattcacaagggtggcttcaaggcaagcgtgccaaatctagaggacgtggttgtaatggagggagtgagccacttcatcaaccaggagaaacccaacgaggtctctgatcacatctgcgagttctttagcaagttctgatacgtattggaaaaatctcaaggagccgttatatgattctgagctactcgtgtttttatgtcaaaaaaatgcggttgcgagtgtcaccatacaaatatacgatctaaataaaattcgtctgtctcacctttttacacagctctaccaagaaacttgttttgcctttgtggtagacaccatatggggtgatccaagaagcaacttccagcggccacggcagcttggagttgcatgataaatttccttttgatgtatgacacacgtgagggtgaggctctcatattattgattta

SEQ ID NO: 29693 - DNA, 592 bp, Zea Mays
gtgagctcgacgtcttttttccgaggagaaagaatagaccagttattgacatgagttgggagctttctgcggcatggactggagctccgataaaagttccgtcgaaattcattgttggggaccttgacattacatacaacgctccgggggtaccggactacattcacaagggtggcttcaaggcaagcgtgccaaatctagaggacgtggttgtaatggagggagtgagccacttcatcaaccaggagaaacccaacgaggtctctgatcacatctgcgagttctttagcaagttctgatacgtattggaaaaatctcaaggagccgttatatgattctgagctactcgtgtttttatgtcaaaaaaatgcggttgcgagtgtcaccatacaaatatacgatctaaataaaattcgtctgtctcacctttttacacagctctaccaagaaacttgttttgcctttgtggtagacaccatatggggtgatccaagaagcaacttccagcggccacggcagcttggagttgcatgataaatttccttttgatgtatgacacacgtgagggtgaggctctcatattattgattta

SEQ ID NO: 29694 - DNA, 1315 bp, Zea Mays
atttaactaaggttcatcaaagcccacatgactagcataacttggagaatctagagcttcaataagccatcgagagccaatacctagatatggatagtgaatagtgatgatcattgtatatgtattctgtatggatgtatagtactcaattaaacactaaacagagaacttatgagctagttgtaatattttttctttctgaccaaaggtttataatgtgcatccacaaaacatcttagttttattttggtcatatatatatatattatactttttgttgatgtattactgttgtatgtatatgggccggtctagcatattaaggtattttgggctatttgggccggccttgcacacataactaattgtgggccgtgccgtgggccgatgactgggcacacgtgctagcacggcacggcccataattagatatgtgcttttgtgggccgtgcctttgtgggccgtgcttttgtgggcctgtgccgtgccgggccaggccggcccacatgtacatgtatacctacgaaaggaggaagcaattggccaagctgagaaggtatgctgatatttttgcccctcacaagtactgataccccagctgaaagatgggtttagttttagttatgactttcattccccagctagttcatattctgttgtagattctgctgcactttgttcttatggatgcatggaaaaatattaattattaaactaattatgtattgtactatatgttagttgtcttgagctgagcacaactctatccaggacaggagatcatttgctgcctatacttgtgttaatctatccaggacagaacttagtttacttcttgcccgaccatggccaatttggctattgttttttcaaattatattcctagttttccttatttctatgaattacgtaatgtcatgccttaatattcatataggtggaacaacagctcctggaatcaatggtgtaccttgtaggagaaggaagccatctcaagaagccgcttgccatgtctcatgaactgcattctcgtgtgtctgaaccccaatctcttgtatctgcttcttgtcagcattctctgtttttagaaaactggttctactgaaccatttggacaatctgcttgtagtgttcttctgattatacattaaattggacagttcgtttgcctttggtgcataaaccaaacatttggcatatgttttaacctgttctgcttgtgttacctgtttgtttggagaattgaagtggacagtttgttcagcactttccaaatagccacagggcgtgcaaaccccaccgggcagcatcacac

SEQ ID NO: 29695 - DNA, 3300 bp, Zea Mays
aacaaatcctacatccacgttgtggtgtactcttttggacaagggttgcactcagcccctttcaagtgatcatgtacatcaaacttgagtgccacaatacttccttataacaagtgtgttccggtttgcaaggaatctccacaaactggagtctcttacagccttacaaaatagtaaagtggagagaaaaaaagtacgcatacaagagcaaatcacagcaacacacgcaagaaggaacatcacgattgcacaaagacacaagaacagctcagtattgtcacttaaatctcactaaatcattagaccaactccagcaacactccccatcccactccgcatccgcattttgcacggtctgaggcactattgcgctctccagcaggctccgcatccgtctccgcaaaatagacgccgtgtccctgcactccccatttccacgctttctctctcctctccgcagctctctgcgtgcgcgcgcggctgctcgcgggccccaggtgtcatagactgcatgcggagtgggatggggagtgttgctggaaacggagacggagaggagagagaatgtgttggccacgcgttttagggatacggagagggagtctgctggagttggtcttagaacgctatactgcaaagtgtcgaagtgttgttgtgctcttagagtacttaggtactggtttgaggcgcctaggggggctctatttatagccccatgacgctaaggagtcgttgcctccttgtaaaaatgtagatttaggtcgtttgcggcgcaccggattaggtccatgtgcccccaatctagatctaattgtgtgccttcttcatctggcgggcaccagatcggtccattgtgccaccagaccgagcctatctgttgactcgcctgcacgcggagatgtcaactgttggaggcgatctggcagaacaacgggtcgtgaacagtaaaggtccagagattcttaataaaaaaataacaagcagtatgactaggacgcactgatcttattcggtgcaccaccagaccagtccgttgcggtccaaacgataccagataaggctcttttagcctatctcctccaaacttttttagatttctttgagggttttcctataacttagacaaacataattagcatgtaattcaattgactaaatgttagtttgagaaacctattttattaagtgatattcattttcctaaggaaaaataactcatttttctttagaaaaataggaatcccttggaaaaatggagttctcaaactagtcccaagtgtagggaacttacctcttctccatagtttcgccagggtttttcaatatggccaataccaaatccaaaatacacttttcttgcataaatgagttagaagccaaaccaaagtgctagaaacataaaatagggtatgtgcaatttattcaaaaatttaaacctcttgtttatattgttttacctaaagttgcacttttaacctccatatttgctcatttggacttagttccttcaatttgcctttacttgaacatgcgattatactcacatcaaagtagttagttcaatgtggtgtgttgaacacttaatcaccaaaacaggtagaaaaagttgtatggcacatttccctccaatctccctttttggtgattaataccaacacacgtaaagcatgcccattgatgtgtttgtggaagatggtgagagatgatgatgagcaaaccaagattagtaagcaaacagactattatgagaggtcagaaagcgggtgcttctcaaagccattagcaatgagatagagataaaaaaaatcctagtaagtctgcacaattctattgtttccttccctaacaactttatttggtaatgcaacaaataactaatatgaaattgtgcattatattgcagttctttggtggaattcatatgtcagcctagcatatgagctccaaagtttagcaaaaaagaattgttagcctccgttgtgctgcatctggatgtgagcgtaattggacagtggtttctcatgtaagtactttggactttgtagctaatattccttgcataacaatatgatgtactgattttgcgttgtatttttgtagatgcataccaaaacgagaaatcgattgagcataaaaggctaaataatttggtatatgttagctataataagatggaaatcatattttaaaatattagagagcttagttccaaaggaaagaaagcttgcttgaagaatttaaatgggaaggtgaatgggttgatgaaaactgtgagccacttcatgaaggtgttgttgatgactggaattggctcatgtggatgaggttgttgatgctactcaagggctattgggtcgcaactttgcctagggctgctgttgctcgtgctacagcctgtcaaacaaacctatgttaggcaaaggaagcgtccaaggaacacaccagggcagtatatggctgaagaaaaatgatagtgatgagagagatcaggcacaacaccacctagaagaatctgattcagcaacaatggaagaggatgattcttatggaccaccacaagatagaaatgaagaagacttccatttaaatgatgacctactatttagatcctgcttgtgtcgctgtattgctaggcctagcagctgcaagctgctgttttctactttacgtttgcattgttggacttgagaacatggtttagatggtgtagtgcagtgctgtactgctactgttgctagcagactgctgcactgttgaatattgcttggttatgtatgctgttcagctgttgtgttttcctaatggctaatgctaatagatgatagtgactttagagtttacacctatttttgtacttattacttcaattctttgttatttcagcagcaaatcagcaagaacatggagttttggagaaggaatggggagttacgaacaacaaacatatagtaagtcaccatcttgatgcttgatgttgctatattgtattgtaattatatatactacattttattatttattattatataatatataagtatatatatccagaaacatatggacgacaaaatggtctaccagctcaactagggtcgattagtcaatctggtcgacaactaatcgcgactggtcggtagctataggactaggttagacttgaaaacattgctcttgccaatctttccacctaaacaatcactagcggaaattatgctttgtagttgagaatatttgtacgcagagatgttcaaacaggtttccgataaacattaagaatggtgtaaactgacaagattaaag

SEQ ID NO: 29696 - DNA, 274 bp, Zea Mays
ttttttgttatataaacatgtgccagtgcttaatttcgaaactgaaatcaatattagtatatacaaaatcagaaagttgtggatgcaaaagagtagtggaagtgtggtactactaccacacaaattgaaccaagtgaagtttaagcaacggccaacaagacatcttatttactaatactccctcagtcccaaaaataatgcaattctaggtttagcacaagtgaaactttcttaagtttaaaatttatagaaaataatatcaaaaatatatttt

SEQ ID NO: 29697 - DNA, 2140 bp, Zea Mays
atcttttaggccgcacgctgctatcctcatcagtcttctccgcttttccccccatctccttctgggcgcaccaggaaaaaaattgatacattcctcggcagctgcgcgagtcctctgttgatacccccggcgacccaaagcccccgtccgagcagcagcagcagcagcctaacaggattggggatttttttttgcttcgtgttctccttctcctgctgtaggcgttgattcgggtgatgagagatgggcttcttggcgtgcttgtgccgatgccctcaggacggggacgacgacgagaaggagggggagcagttcagaatcaaccaccagtggactacccaaaatcttctgaaagcagcccattgaaggctgagagagtggttcatatggacggagcccagctaattggtagacatgatgaagcaacaatcttcacgttgcgtcagcttgctgaggctaccaataattttaggcaggactctcttttggggcgagggggattcggttgcgtctacaaggcaactcttagtaatggacaggttgttgcagtcaaacaacttgatctaaatgggcttcaagggaacagagaattcctcgtggaggttctcatgctcaacctcctgcatcaccctaatcttgtcaatctgcatgggtactgtgttgatggcgatcaacgcttgctcgtttatgagtatatgccattgggatcactagaagatcatctacatgatcttgcacctaatcaacaacctctagattggaaaacacggatgaagatagctgctggtgcagcggctggtttggaatacctccatgataaggcaaatcctccagttatttaccgagacattaaaccatcaaacattctccttggcgaaggctatcatgcaaaattgtccgactttggacttgctaagcttggtcctgtaggcgacaagactcatgtgacaacacgcgtcatggggacacatggttattgtgctcctgaatatgccttaactggacagctgacagtgaagtctgacatctatagttttggcgtcgttttccttgagctaattacaggtcgaagaccacaagacagtgatcggcctcctgaggaacaagacctagttgcatgggctcgtccattgttcaaagaccaaaagaagtttcgcaagatggctgatccttcgttgtgtggccgcttcccaaagaggggtttattccaggcactggctattgcagcaatgtgtttgcaggagaaggcaaaaagccgacctcccatgagggaagttgccgcagctctctcttatttagcatcacaagcatacgacaggaacaacaacgctgctgctcatcgtaatcgtgccgggccttcaacaccgagagttctggacgaccagattggccaggacacctgcacattagctaatcaacagggagctcagatgtccatgcatgtcgggacagaccacgccatgcctgaagtgaaggaagcttcctgtagtggttcacatcgtggaggacggggcagggttaccccgaatggcgctgatagggagcgtgcacttgcggacgccaacgtgtgggccgaggcttggaggcgccaggagaaggcaagcaagatgcgatagcgaccagagcctgactgcatgagttttgacatgtcactgcaaagatgcttactttgcatacattttgaaagagaactgtgggctacacgaagggttgttagaatagaaagaggaataatgcgcagtggaaatgcagagcttcaccagagtgagcgcttcgaagatttcaccggtgaatctacagtactcagacttgtttcagtgcgtacatggatttagcttactttatacacagacacttcacactccatagatgcatgtaatagctcaataataggcacagtagactacacaatctgtctgtagttcagcggttttggaaaattaataacataggatccgccgttaggttgcatgaaatgctatgatccgttggcgggtcttgcattctctattgggtcaacgtctacatatttgtacatcgttcaaccatttacatgatgaaatatacaattaagacttctaagttggtactgttaaaaataattatgatactgaagacaacaattgatagtacaactttg

SEQ ID NO: 29698 - DNA, 1899 bp, Zea Mays
gtcttctccgcttttccccccatctccttctgggcgcaccaggaaaaaaattgatacattcctcggcagctgcgcgagtcctctgttgatacccccggcgacccaaagcccccgtccgagcagcagcagcagcagcctaacaggattggggatttttttttgcttcgtgttctccttctcctgctgtaggcgttgattcgggtgatgagagatgggcttcttggcgtgcttgtgccgatgccctcaggacggggacgacgacgagaaggagggggagcagttcagaatcaaccaccaggttgttgcagtcaaacaacttgatctaaatgggcttcaagggaacagagaattcctcgtggaggttctcatgctcaacctcctgcatcaccctaatcttgtcaatctgcatgggtactgtgttgatggcgatcaacgcttgctcgtttatgagtatatgccattgggatcactagaagatcatctacatgatcttgcacctaatcaacaacctctagattggaaaacacggatgaagatagctgctggtgcagcggctggtttggaatacctccatgataaggcaaatcctccagttatttaccgagacattaaaccatcaaacattctccttggcgaaggctatcatgcaaaattgtccgactttggacttgctaagcttggtcctgtaggcgacaagactcatgtgacaacacgcgtcatggggacacatggttattgtgctcctgaatatgccttaactggacagctgacagtgaagtctgacatctatagttttggcgtcgttttccttgagctaattacaggtcgaagaccacaagacagtgatcggcctcctgaggaacaagacctagttgcatgggctcgtccattgttcaaagaccaaaagaagtttcgcaagatggctgatccttcgttgtgtggccgcttcccaaagaggggtttattccaggcactggctattgcagcaatgtgtttgcaggagaaggcaaaaagccgacctcccatgagggaagttgccgcagctctctcttatttagcatcacaagcatacgacaggaacaacaacgctgctgctcatcgtaatcgtgccgggccttcaacaccgagagttctggacgaccagattggccaggacacctgcacattagctaatcaacagggagctcagatgtccatgcatgtcgggacagaccacgccatgcctgaagtgaaggaagcttcctgtagtggttcacatcgtggaggacggggcagggttaccccgaatggcgctgatagggagcgtgcacttgcggacgccaacgtgtgggccgaggcttggaggcgccaggagaaggcaagcaagatgcgatagcgaccagagcctgactgcatgagttttgacatgtcactgcaaagatgcttactttgcatacattttgaaagagaactgtgggctacacgaagggttgttagaatagaaagaggaataatgcgcagtggaaatgcagagcttcaccagagtgagcgcttcgaagatttcaccggtgaatctacagtactcagacttgtttcagtgcgtacatggatttagcttactttatacacagacacttcacactccatagatgcatgtaatagctcaataataggcacagtagactacacaatctgtctgtagttcagcggttttggaaaattaataacataggatccgccgttaggttgcatgaaatgctatgatccgttggcgggtcttgcattctctattgggtcaacgtctacatatttgtacatcgttcaaccatttacatgatgaaatatacaattaagacttctaagttggtactgttaaaaataattatgatactgaagacaacaattgatagtacaactttg

SEQ ID NO: 29699 - DNA, 2012 bp, Zea Mays
caagtgcatacacgtgtggagtgcacacaagatagacatgatcaggagagtagtagctgcatgcagccattagtctctttccttgtgattggtatgctgcacatattcgtccggactgagcgcgtgcattgactaaaaagcagccgctgtttgattaactgtatagagtcagactgagcctacacccgcaaatgcagcatagtggactacccaaaatcttctgaaagcagcccattgaaggctgagagagtggttcatatggacggagcccagctaattggtagacatgatgaagcaacaatcttcacgttgcgtcagcttgctgaggctaccaataattttaggcaggactctcttttggggcgagggggattcggttgcgtctacaaggcaactcttagtaatggacaggttgttgcagtcaaacaacttgatctaaatgggcttcaagggaacagagaattcctcgtggaggttctcatgctcaacctcctgcatcaccctaatcttgtcaatctgcatgggtactgtgttgatggcgatcaacgcttgctcgtttatgagtatatgccattgggatcactagaagatcatctacatgatcttgcacctaatcaacaacctctagattggaaaacacggatgaagatagctgctggtgcagcggctggtttggaatacctccatgataaggcaaatcctccagttatttaccgagacattaaaccatcaaacattctccttggcgaaggctatcatgcaaaattgtccgactttggacttgctaagcttggtcctgtaggcgacaagactcatgtgacaacacgcgtcatggggacacatggttattgtgctcctgaatatgccttaactggacagctgacagtgaagtctgacatctatagttttggcgtcgttttccttgagctaattacaggtcgaagaccacaagacagtgatcggcctcctgaggaacaagacctagttgcatgggctcgtccattgttcaaagaccaaaagaagtttcgcaagatggctgatccttcgttgtgtggccgcttcccaaagaggggtttattccaggcactggctattgcagcaatgtgtttgcaggagaaggcaaaaagccgacctcccatgagggaagttgccgcagctctctcttatttagcatcacaagcatacgacaggaacaacaacgctgctgctcatcgtaatcgtgccgggccttcaacaccgagagttctggacgaccagattggccaggacacctgcacattagctaatcaacagggagctcagatgtccatgcatgtcgggacagaccacgccatgcctgaagtgaaggaagcttcctgtagtggttcacatcgtggaggacggggcagggttaccccgaatggcgctgatagggagcgtgcacttgcggacgccaacgtgtgggccgaggcttggaggcgccaggagaaggcaagcaagatgcgatagcgaccagagcctgactgcatgagttttgacatgtcactgcaaagatgcttactttgcatacattttgaaagagaactgtgggctacacgaagggttgttagaatagaaagaggaataatgcgcagtggaaatgcagagcttcaccagagtgagcgcttcgaagatttcaccggtgaatctacagtactcagacttgtttcagtgcgtacatggatttagcttactttatacacagacacttcacactccatagatgcatgtaatagctcaataataggcacagtagactacacaatctgtctgtagttcagcggttttggaaaattaataacataggatccgccgttaggttgcatgaaatgctatgatccgttggcgggtcttgcattctctattgggtcaacgtctacatatttgtacatcgttcaaccatttacatgatgaaatatacaattaagacttctaagttggtactgttaaaaataattatgatactgaagacaacaattgatagtacaactttg

SEQ ID NO: 29700 - DNA, 2008 bp, Zea Mays
ctttgcatgtatctttgagtttatacaatgaatagaaaaccgcgtgaggccatggcaggcgtggaccaaaaaatccttgttagcttgtgcagttctgttctcgcgtgtccgtctgcaagaagagcctccgtgagagagattgtgagatagttgagtgatgcaattccaaccacatagcgaggagtggttccaacaaagtggactacccaaaatcttctgaaagcagcccattgaaggctgagagagtggttcatatggacggagcccagctaattggtagacatgatgaagcaacaatcttcacgttgcgtcagcttgctgaggctaccaataattttaggcaggactctcttttggggcgagggggattcggttgcgtctacaaggcaactcttagtaatggacaggttgttgcagtcaaacaacttgatctaaatgggcttcaagggaacagagaattcctcgtggaggttctcatgctcaacctcctgcatcaccctaatcttgtcaatctgcatgggtactgtgttgatggcgatcaacgcttgctcgtttatgagtatatgccattgggatcactagaagatcatctacatgatcttgcacctaatcaacaacctctagattggaaaacacggatgaagatagctgctggtgcagcggctggtttggaatacctccatgataaggcaaatcctccagttatttaccgagacattaaaccatcaaacattctccttggcgaaggctatcatgcaaaattgtccgactttggacttgctaagcttggtcctgtaggcgacaagactcatgtgacaacacgcgtcatggggacacatggttattgtgctcctgaatatgccttaactggacagctgacagtgaagtctgacatctatagttttggcgtcgttttccttgagctaattacaggtcgaagaccacaagacagtgatcggcctcctgaggaacaagacctagttgcatgggctcgtccattgttcaaagaccaaaagaagtttcgcaagatggctgatccttcgttgtgtggccgcttcccaaagaggggtttattccaggcactggctattgcagcaatgtgtttgcaggagaaggcaaaaagccgacctcccatgagggaagttgccgcagctctctcttatttagcatcacaagcatacgacaggaacaacaacgctgctgctcatcgtaatcgtgccgggccttcaacaccgagagttctggacgaccagattggccaggacacctgcacattagctaatcaacagggagctcagatgtccatgcatgtcgggacagaccacgccatgcctgaagtgaaggaagcttcctgtagtggttcacatcgtggaggacggggcagggttaccccgaatggcgctgatagggagcgtgcacttgcggacgccaacgtgtgggccgaggcttggaggcgccaggagaaggcaagcaagatgcgatagcgaccagagcctgactgcatgagttttgacatgtcactgcaaagatgcttactttgcatacattttgaaagagaactgtgggctacacgaagggttgttagaatagaaagaggaataatgcgcagtggaaatgcagagcttcaccagagtgagcgcttcgaagatttcaccggtgaatctacagtactcagacttgtttcagtgcgtacatggatttagcttactttatacacagacacttcacactccatagatgcatgtaatagctcaataataggcacagtagactacacaatctgtctgtagttcagcggttttggaaaattaataacataggatccgccgttaggttgcatgaaatgctatgatccgttggcgggtcttgcattctctattgggtcaacgtctacatatttgtacatcgttcaaccatttacatgatgaaatatacaattaagacttctaagttggtactgttaaaaataattatgatactgaagacaacaattgatagtacaactttg

SEQ ID NO: 29701 - DNA, 765 bp, Zea Mays
aaaaaaagaggaagaaggagacgctgatgctaaccgccgcactactctactggtgcgtctgctgcgcatgcgcggagcaacagatgctacccggcgtacaaacacgcaagcagttccagatcgacgaggcatggcactactggcgggtcacagcgactctgaaccgatcactcaccacgactccgaaccggaccaacggcacgcccggccatggcccgtggccgtgctctcagaagaagccgcggcggcgcggcgggggcagcaagagggcgacgagcatcaaggcggcgacggcgacgagggccaacgccacgaggatgctctcgtcgacggtgagcaggcacaccttccccatggacggactcgcagcctggggaatggcggtgcagaggggccttcagctgcaagcgggcaagctcaagagcgatgcctggatgcgcgtccttgtccttgttatagttgttgaagtatctccgtctctctgggtcaactgctcttcgaaagcacttcttttttttttcctttgaagcgttgcgatgacatgcaccaaacaagcgtcagtcagtatattgactagttggtacaacggctgcaagtaatgtaatgtacactgggagtgggacgtgaattgtgagctacgagtctacgaccacgcagcaagtcctcggtcttgttagcataagcttcaaggttctggttcaatacttcacagaatcatgagttcggtgatggctgcagatatgtcaaataatagattgaccctga

SEQ ID NO: 29702 - DNA, 1220 bp, Zea Mays
ctcgcacagagacactactagcttgctttctcctatctccactgccgcctagccctacagtcaaccgccgccaagcccggaaccggctgccgccacctgctagcactcgccacacgcgcggcgctggcgtgccctcgccgccgacagtgtcccgcccccgccgtcggccgacccctcgcggcctcgccctcgacgatcggccctcgccggctcgacgcgtgacgccggcgccgccacccaccgtccgacggcctagccggagtcggacgcccccgggctcgcgcctcgccttccaacagtccaagcgccgcattcgcgcgtggccaaccccaaagtctgaagttcgatccacatccaccgatccgcagaggcgcagactacaggtctctcctacagctatgagcctggaccggcttttgaggaggtcaaagaagaagccatgcttgatatatcaccaacagactcgacagagttttggttaattcagtggcctaaagaccagatagatgttttggattttcatggcaaagagctttctctcaagctgcatagtgatggaaacttgggcaacttggaaaattcctcagggaaatcttatgagattgcgagctttgcagctcagaaaccagatgcaaccgtcttcctgccttcagggtcagaaacaaaggctgtggggaagatttcacggcgagtatccttagttcgttatcctaaacctgaggaatttacaaaaccaagttttgggagtcttactcctagcataaagaaatctgcaggttctaagaagaccatgtctcggttcaccggtgtatcaaagaatcccagtagccaaggttcggcgctttcactgggccaaaggagcgcagagccaacacccaaacacaaggggaagagaaaggatgaaagcagcctggggcactcaaatgtgtcgggcaaggccacagaaggatctgaggctcgaggcgcggggagcaacacggcttcagagatgccacagtcgccaccggaaaaatcaaagaagaggaggaagaaggataagatcgttgagtagtagtgtcaccttggcagaattttttgctggagtgcccggtgttgtttgacctgggagcaacctgttgcgtggtgctgaaataccgctatgtatcgttctgtttttggtatgtgaaaggttatctttgttgcgctgttcctgttggtgtgctaagctgagctgatatagg

SEQ ID NO: 29703 - DNA, 1367 bp, Zea Mays
ctcgcacagagacactactagcttgctttctcctatctccactgccgcctagccctacagtcaaccgccgccaagcccggaaccggctgccgccacctgctagcactcgccacacgcgcggcgctggcgtgccctcgccgccgacagtgtcccgcccccgccgtcggccgacccctcgcggcctcgccctcgacgatcggccctcgccggctcgacgcgtgacgccggcgccgccacccaccgtccgacggcctagccggagtcggacgcccccgggctcgcgcctcgccttccaacagtccaagcgccgcattcgcgcgtggccaaccccaaagtctgaagttcgatccacatccaccgatccgcagaggcgcagactacaggtctctcctacaggttctcgttcttcagtgcgtgatatcaatccactgaggcgctgggtgcagttaatttcccaaactatatttgggggtgttcagcaaaaaccgcgtcaactgcacccgtgcgggtgagggatcactagaggctggactcgtgctagagatggtgaaggcaaaagcaagggtccgctatgagcctggaccggcttttgaggaggtcaaagaagaagccatgcttgatatatcaccaacagactcgacagagttttggttaattcagtggcctaaagaccagatagatgttttggattttcatggcaaagagctttctctcaagctgcatagtgatggaaacttgggcaacttggaaaattcctcagggaaatcttatgagattgcgagctttgcagctcagaaaccagatgcaaccgtcttcctgccttcagggtcagaaacaaaggctgtggggaagatttcacggcgagtatccttagttcgttatcctaaacctgaggaatttacaaaaccaagttttgggagtcttactcctagcataaagaaatctgcaggttctaagaagaccatgtctcggttcaccggtgtatcaaagaatcccagtagccaaggttcggcgctttcactgggccaaaggagcgcagagccaacacccaaacacaaggggaagagaaaggatgaaagcagcctggggcactcaaatgtgtcgggcaaggccacagaaggatctgaggctcgaggcgcggggagcaacacggcttcagagatgccacagtcgccaccggaaaaatcaaagaagaggaggaagaaggataagatcgttgagtagtagtgtcaccttggcagaattttttgctggagtgcccggtgttgtttgacctgggagcaacctgttgcgtggtgctgaaataccgctatgtatcgttctgtttttggtatgtgaaaggttatctttgttgcgctaaaaaacaa

SEQ ID NO: 29704 - DNA, 1032 bp, Zea Mays
attcaagtatattttttccagaattgcaggcccttgaattctctcaccgaccttcccttcaggaatggcatctatactactagctataaagagagagagcccatcaatcatcagcacgtctgtgtccctctcgtagcctcgctctccctttctcagcggcgcttctcctctcttcctcaagctgtggccgcaagctctctcatcagccatggccgccgggcgtcggcgccggcggacctccctcgcccgcggcctaacattaggctcggggactatggtgcagccaaggatgacttgccgatcgatgtgacgcctcttgatctcgtcgtcgtcagatcgtcgccgatcatcggcaagttgttcttggctacaccgtggctcctgctcctgatgtaaggctccgtctacggcgacacttggccgtcagatgatcgacgacaagcaaggccaatcaagttcggagaggccagccagacgtccaaaggaaatctgccgccgatcacggacggatctgctacggattttacaccagggccgaccgcgccggaccggaggagcaggaggagctggacctggaccgctgcggcggcgcgcgcggtggccgccgaagaccgtcccttatgctgatcgacggcagttaggcggcgtcgttctttcttttgcctggcccgtgcggtgcggcctcggatgcgctcacgtgcgcacgtacgggtacggctcgggtgtcgacataccggctggcttgagcggttcttgttcatcctcgtctcgtcgcccttcggcgtacggctggcacgggacacgtcacgtgcgaccgattcgccgcaggctgcctatttctgatattaaagccggagcttctctcatgcatccgcgtcaacattttgcatttcagccaatattaaagtcaggagcaaatctgctctcacagtgtgtccacgtcaacgttgcatttcagccaatattaatagtgtgctccagattccagttctaatatagaactgtagtttataaaataaatttaaatatttt

SEQ ID NO: 29705 - DNA, 1685 bp, Zea Mays
aggctcggggactatggtgcagccaaggatgacttgccgatcgatgtgacgcctcttgatctcgtcgtcgtcagatcgtcgccgatcatcggcaagttgttcttggctacaccgtggctcctgctcctgatgtaaggctccgtctacggcgacacttggccgtcagatgatcgacgacaagcaaggccaatcaaggtatttatatatacacacacatatagttctacaacatcgtctgttctaataatcatcatatatgccaacgctttcactcgcgcgctgctctgaaatgcgctaataataaaggtgctggtactattccgatcaaatatttttgagttattccccgatgcatctcgtcagctcagagtggaatctaaatatctcgaaaagtaaagatatcttagaaattaaaaagattgatagagattttattatttggccaatttacgagtgtgctcggaacaccttgcactgcagttgatgcatgcttgcagcaacaatttctcagctgcgcgactgtagtagcagtaacaactgaaactgtaccagtattctttccgccctaaattatactacatttattctcgaatatttttagctcgctagtttattttttaactaaaacacgataaataaataaaatgagaaagtaccatgttttggcgtttttattacttagtcttttttatatacttcttctatgatggaaaaggagaattgtattaaaactcagcatattatatcaccaggttatatatggaaaaaaatctgaaataaaaataacgtaaaatctagtagattattccatcgtcttctttcctagtggttttttcttggtaaataaagttgttgctctagatgaaccgagtctagtggaacaacaaaggtaagagagtgcagtttttatgctaaatctaacaatcaacccaaaacatcgaacatatatacctcaaggtctagcatttctaatctaaagcacatggatctaaatcgatgaaagaatgccaacagctgtattatcggatacaaaattcatttctttaaattcttaattttatctatacaaccatcaatggtgacatcgagcacctagaataattattagcatctaaaaaacatcttttcacttttatacacacgctaatgtctctaaatacgtctttaaaagttaaaccaccttatactataaaatcgagggggatagaaatgagcacaacaaccagatatatatatacgcgtcctttaatagagatgtattcagattgaattcgcatgaatacgaatttatatatcactatttaccgtatttaaatttagattcgaatacgcatacaagtattttttttattaatactaatgcaaaatgggtatcttgaatttgtattcaaattcggatatctactcgattttgatgataacacgtatctattttctcatcgatagttttatagcctaataaaatcattatttatatataaaatactttactccctccgccttgcggacaaaatatttttaatctggaagggaccgtcgcatccgataaggtacggactacggagcccggcagacggcgcaccgccttgcttgcgcctgcagcctgttcgatcagcaccgctgtacagaagccccctttgtttgtactccctccgtctcaggatataaggcgtaaccacttttta

SEQ ID NO: 29706 - DNA, 1230 bp, Zea Mays
agacaaagctgccattcattggccgtcacatgcttcggtcgggcccgtactactattccttttactgcgttttgttttggcttggcgcggccagctctagggatgacaattttatccctgtggtagtcaagtgattagtaaattcacctctcacacgtgtttagtaacatgcgtgcatgtctgctctttatccgatcagctgccacacttctttacggtgtactctctttttactatttgtatattacatgcctgctttcaagtacggttacgaacaactagcagccgaccaaagagggtcggatgaaaacggatattcaaatggtttggacaaatttaatattttaaaatatatatgtataaaatttaatgttaatttttcttatgttatcaaacacattattataaataaaaataaaattgtgtataaatttttatatacattatttgctcatgtaacaaaaaaggtgaaaaaatatctgtattcgaatcttatatctaacattttgattagatatataataaatttgatgtctacattttatgaatttttataaactcaatgctaaaataagaatacgaatttacatagcttgttctatatcaaaattaaaaaatcaaaaaactggtatgagtattggttttcacctctagttcggagaggccagccagacgtccaaaggaaatctgccgccgatcacggacggatctgctacggattttacaccagggccgaccgcgccggaccggaggagcaggaggagctggacctggaccgctgcggcggcgcgcgcggtggccgccgaagaccgtcccttatgctgatcgacggcagttaggcggcgtcgttctttcttttgcctggcccgtgcggtgcggcctcggatgcgctcacgtgcgcacgtacgggtacggctcgggtgtcgacataccggctggcttgagcggttcttgttcatcctcgtctcgtcgcccttcggcgtacggctggcacgggacacgtcacgtgcgaccgattcgccgcaggctgcctatttctgatattaaagccggagcttctctcatgcatccgcgtcaacattttgcatttcagccaatattaaagtcaggagcaaatctgctctcacagtgtgtccacgtcaacgttgcatttcagccaatattaatagtgtgctccagattccagttctaatatagaactgtagtttataaaataaatttaaatatttt

SEQ ID NO: 29707 - DNA, 879 bp, Zea Mays
agaaaatagagctacctgttcatagtttcatgttgaaaatcgagtattgaagataccaacaactgaaaccaacagaaaatggtttctgaggcctctgtcaaccgaaaccggagtaccataattgttccagctggcagctctggtgaagagggctgggaagcattcaggagtgtactgctggagataaataacgaggctaccagattgtatgtcctaccaaatcatccaaatcagcaacacatggagccgccagagcgtcttcctggtctgtccgatgatgtgggtgccggatttatagcaggacatggtagccagtctgcttctgggccagaggtagatgtcgaacgcttggttgatctgcctcctcaagaagaaattagtggcatgggtatgtctaaggttatcagggcagatcagaaaaggttcttcttcgacctgggcagcaacaacaggggccattatttgaggatttctgaggtggctggagctgatcgttcgtctattatcttgccgctctcgggtttgaagcaattccatgaaatggttggtcactttgtagatataatgaaggacaggcttgaaggaatgacaggagctaacgtgcgcactgtcgagcccagccagagatgattacccttgactgtgggcctggcaagactgctgttatgcctccttggcgaggattgatttgtttgggactttttttctttctttcagtcggaggaataatatgcagtgtattgttcgtggggtggtataattgtggttgctgcagtgttagccctgattttatgcttcgccgttcttatttaggtaaaagatctgctatgtttctggcattgtgtccgcctctgcattgagctcttcctacatatgtta

SEQ ID NO: 29708 - DNA, 5889 bp, Zea Mays
gatcaataaaatgcactgttcattcatacaattttatttgttatacttgcaacaaatgaatcgctcaaccttctctttggttaagaattatacaaatgccacactttaaagaagtacacaaacacacataattttaatgaagacagcaggaagagggaaaacacaaatcctgatacttcctatacaaagctataatgtacaaaaaaaaaataccacaaaacatttgcttcggccactcctgcaaatgtggagtgagggggtgtacaagaaacgtgtacctctatttacactatccactcttgttgattccactcgaactgctccaagctactatgcacagcacctgatatattgacatcaacttcacaaacaaaaaaactagccttttgcacgggtgctcagactcatgcaatctgcatatccaaatggaacatcagagaacacgaaacagtgatcaggcatgaacacaaagatccactgctccccgggggtaacggtattagcactcagtcagaaaagtgggacatgttccgactgacatttgtgattaggtattggacaacaccagtggcatcatatcgttggtgagagcacacaaaatttcacataggacctctccagtatggtagctttgtgcggtaccaacttcatgattaaatgctctcactaagaggtcctgtcatcattttcattgctcccgctgctcatgttacatgtgcactgcttttctatcactccacctccaggttatcattcccttctctgcagcacattgcaaatgacacagataggatacagctgatgatgttctggtttaaaaatgaaaacaagtaacagcagcaaatattgatgggcaaatgtacacagaaaaccaacagccatagcagaaatgttgaccctcacaaattattgaaatatcgaactatgaaataaaaaagttaacatgcataatattttgtcgaggtgtgttgtcgttcaacgtcctgcagtacccaccagtgcaagtattagatagaaatttgatatatgaaaattataagagaagtccaatttatcccccctccccaacacacacacccatcttataacttgtaagaccacaaacccctcgccccctctgtgtcaaccacacccaagcccatttgaagctgatttctatcctacatggcactagttttgccgtgttagcatccacgtcatccattctgcatcatgggcacacacgttagcaacattcttctctcgtgttctcttcctccccattccaacccttccatatccttctaaactgctgtttggccatgcctagaccacaacaccaggcttcctgctgcccgcagctgtgccgaaaccagtgtccatactctgttgtttttccatcctctagttctcgtctttgctttctgtgttcccttcccttctttgtccacttcagtttatgctagcaccagcaaggtcattgagaaggaattaggaaagcaaccaaatagagtgaagccagagtatgagccctagcagtacaccccattgctgcatactgcttcctagcgccgcccctgagctcaacgaagtccatgcgtcaccttccacaaatgatggtggtgtcatcgcagatgaaggccagaatgccagatcctatccgacagcactgtcaattagccaatgaggcgatgaagcagccatcataggctgtgagagtacgaacgccgcgaaggcatgttcatgcaaggtgagcagtatcaggttcatggacatgtctcaatcgtccatggccacacaaaactgcacagggacgtgcactgcactctgctctgtgacactgcaccactgcaagttgccaatgaaagagcagttgatctgcaaggtgaaaatgatgtgcccgtcgctgccgctgcctgcattaacaaggacactaaagctatcctcttgttgcctggagttgcaactgcgctctcttgcaccgagcctatggctcaatgagccagcagctgtacagctaggtggccacatacaacagttcgctcggggtgcagatcaaagtaatagaggcagacatgggagataaggtagaagatgcagaatttagtccaacttgagtgatatggcacaaaaccagatgatgtggcataaatcagtgccacattggattaaaaccagatgcaggcaggaggggggccatgttcttagtcactattcctttctagggaattccagaaaccgttttcgattttttcgatcggattcacctgtaacggtaatttttggaaacggaatcggttatcgaaattttgcatcaaaaccagtatcgaaatcggtgtggctttttactgactgtttccttcggttaccgaaattagttggaattttccgaatttaggtcccgaaatttttcagaattccgaaaactgttttcggttttttcgatcggattcatcggtaagggtaattttcggaaacataatcgattatcagaattttgtgaacttgttatattgtgaattgtgaacttgttatattgtgaattgtgaacttgtgatctttgcaaacttgtcaacttgtgaaatgtgagtatgtgaacttatgatctttgttatgcatgtgaattgtgaacttgagatctttgagaacttgttaacttgtgaattgtgaacttgtgatctttatgaacttgtggattgtgaacttgtgatatttatgaacttgtggattgtgaacttgttttattttcaatttgtgataattgtgatcttattatactatgaactcattatattgagatattttcatattgatatatttatcgattgtatttcaaatttcaaccttacaggtgtattttccgtacaaactttcgtttcaaatgttttcgaaataccaatttcgttttcgtttctggagttaccattttcgattgtgtttccgatataaaatatgaaaacagaaatggttttagcgtttaacgaccgttttcatccctattcctttcattgtcttttttatacataatttgctacatttgacataatctcaatgtggcccattgtaattaacaacatcactgcatcaggcaggataaaccttatccaaaataatgcccactcatttgacatgaaagttctggtaaaaagaaagtaaaaaatacaacaccagtaacaagagcaaagaaaaaatataaaatatatctcagtaatgcataccgttgtagggtctgaaagcatagcatatgccttcccaattattttgaataaataatcagcatccctgcgtatttcatttgttatatctctccatacagcatcactgatattttcacttctgacaagaaagttactggcctgtggcataactactgttagacaagagagcaatgagagtcacaatagagagaaaaaataatacgatactttgtctggatgatgtcttagtgctgctttgcggtaggccttctttatatccacagcagaggaagaagactcaattcctctgaaagaaatgtattggtcaaataattgtatgaacgtgtgattccaccaaaagcacatgaatttcctttgctctagcatgccctaaactatttccaccactcatcagctgaatgaaaaaagtaaaataaccaaccttggaggtaagattaggcataaaaaaacagctcccttccataggggtgcacaaatgggtatcagttttggcaggcaattatccaactctgggtggcaatgtggggattggagttgacaatattgcaaagaggatttttataaactaacttcctctgatcacaaatataagtccattaggacatcgaacaatctccaactctccattatgagactggctagttatgtctattaaaagagatgctatcttacatggaaagagttagatattattgagtgtgggaaaccctaaccctaaccgagttgggtgagcatatatacatatatacatatatacatatatacacacatatatatatatatatatatatatatatataagctgagtaattgggccaagcccattacactgagggcatacaggtaattacacagggactaacctcgaaaacctaacagtactttaacaccccccgtagtcacaactctatcttgtatagctgttgagactggatcgaaaatcggcgaagacactcgacggcagccccttggtgaagatgtcagcgactgcagcgtggtgggacaccgagaacccgaacatcaccgtcggtgacccgctcgcggacaaagtgcaggttgatctccatgtgcttcgtgcgctggtgttgcacgggattggtggagaggtagaccgcgctgacgttgtcgcagtagacgaagctggcgcgctggagggggctgtggagctcgtggagaaactggcgtagccaggaggcttctgccacgccgtggccacaacgggtactcggactctgccctagagcgggagacgatgggctgctacttggcggcccaggagacgatgttggcgccgaagaacacgacatagctgaaagtggaccagcgcgtgtcgggacagtcgacccagttagcgtcggtgtagaccacaagctccgacgtcggggatggacggaggaggaggccgtagtcgagggagccgcgaggtagcgcaagatccgcttgagagcggtgaggtggggctcccgcgaagtgtgcatgtgcaggcacacctactggacgacgtaggcgatgtcaggcctggagaaggtgaggtactggagcacgccagttaggctgcggtaagacgtcgcgtcgacgatcgggggcccgtcgtcctcagagagcttcgcctgagtgtcgacaggcgtagagcagggtttgcagtcggacatgccagcccgctccaggatgtcaatggtgtactggcgttgatgaaggaagagaccttggggccggcattcggcggtgatgccgaggaagtggtggaggggactcaggtccttcatcgcgaactcccgctggaaggcgatgatcgggcgttgtaggagatcagcggtggatgccgtgagcacaatgtcgtcgacgtagagcaggaagtagacggtgtcgtcgccgcgtcggtagatgaagagtgacgtgtcccacttggcctcgacgaagccgatggaggccaaataggaggtgaagcgattgtaccaggctcgcgacgcctgcttgaggccgtagagggaccggttcagccggcagaccaggtccaggcgagcggcgtcgacgaagctggtgggatgactgtagtagacagtctccgttagagtgccatggaggaaggcattcttgacgtcgagctgatggatcgccaaatcccgggagagggcaagggagaggacggtgtgaacggtggtgaacttgacgatggggctaaaggtctcgtcgtagttgactccggggcgctgggtgaagccccgaaggacccaacgagccttgtagcggtcgagggagccgtccaaggtcagcttgtggcgaaagagtcacttgccggtgaccacgttggtgcctggagtacacggcaccaggtcccaggtgtggttgaccagcagggccacgtactcctccacagcacgacaccagtgtgggtcagtgagggcggtgcgaatggagaggacaggggaggcatccggaggagtggggtcatcagcggccagaatcagccggtcgacggggcgaagaaaatcggcgacgcgccgagtcaccatcgggtggacgtgcccggggtcgcggtggatggcgaccgggtgatacacaggcaactcagagcgggccgccaggacgttgggtgccacgggcgcggccggctcgcgtcggtggtagacgacgacggggtcggcgaagcgagccgcgctcgtcgacaaggccacgcgtagcgcgggaggag

SEQ ID NO: 29709 - DNA, 911 bp, Zea Mays
ctctctctccctgtgtcccgacgtgcgcggcttgatgtggtatagtagattcgcgtcacggaagcgacgggggatctcacatgaccactggtgtgtcagtggcaactcgcatcaagcggatcgcggggctgcatcaccaccaaggaacttggcactgtgatgcgctcattggggcagaaccctactgaggctgagcttcaggacatgatcaatgaggttgatgctgatggcaatggaaccatcgactttcctgagtttctcaacctgatggcacgcaagatgaaggacaccgactctgaggaggagctcaaggaggccttccgtgtgttcgacaaggaccagaacggcttcatctccgctgctgagcttcgccatgtcatgaccaacctaggcgagaagctgacggacgaggaggtggacgagatgatccgtgaagccgacgtggacggtgatggccagatcaactacgacgagttcgtgaaggtgatgatggccaagtgagatatgcccgccgtttttaagctagttcctctcctgatggtagtaactagtctagttttggagactgactgcttttggttgtgtcttacgcctatccttgcgtcaatggacatatccgtttgttttcaaccaagggattttaccatgtctgtaatttcgctcaaatttggttcttgttgtattacatttgtgttatcttggtacaatgatcatgtctttctctttcaaatttaggtgttcagtttcctggtagaaatacgtggtagtggtatgcaggtattgctatatctggttttgattggtttgtcgttgtttcttgtgctgtgataagttcttgtagagaagtactgtacgtggtatgcagatcaattgattgttggccgtacggcaggacataggtggaagtataa

SEQ ID NO: 29710 - DNA, 1914 bp, Zea Mays
gaaagagaagggcctctcgagggaagggcaagagcggcggctggtaaataaagatcgcgtcgacgcctcttcccctcccccagacctccccgtctaggcttcgattccgccctcctcgaacccgccttccttcccgtcgttttctccccagctccatcgtcctcgggctccggagaaggaagagccgctctggcaccaggtcttcgaacctcccctgccctgccccgcctcgtctccccctgtccccgtctcggtctgttgcaggtatgggtgttctcggtggagcacctcctgcaagctgcccagcgacccggcactgcgcagaatgggcccgaatctacttgaggtactgcttgtgcagccagaaggaaggtgctgccctggcacttgggctaatcagtgtcataagctggggcttcgccgaggtgccacagataatgacaaattacagacagaagtcaacagaaggactctctgtcgcttttcttatgacctggattgttggggatttgtttaaccttgttggctgcttcctcgaacctgctactctgccaactcagatgtacatggcactgctatataccatcacaactctaattcttaccgtacagacgatatactatagccacatctaccatcgtcttgaagcaaaaaaatccagggcagctagcaaggctcaaaagcatcaacgtgcggatgcatcattacgtgaaaggcttttgggtgccaaggacggtgtgttatccagaaacaacgggtcagatgctacagtccttattccaagctcacctattcctgttaatgtgaaattggtcgaccaataccatggaagcagccccaacaccgactactactacatgtcagcaagatctttgtccaggagtccagtgccaactgctggtacatggttgggcagtaatcgtcaatcgttaatgactcctccacaaacgaatgatcaaaggggatctttaattggtgaaatcgctccagcacattctgcaccatctactgttacaaaaaatgccctctcagtggcaccatggatgggtcttctattgggtacgtgtctcttgcacattttgattggaaacacacatagggagatgccaagtggaactgtcataccagttggaagaaggcttttagtgtttgtggagggtcatggaaattcatcgctcagccatggcaatggaagtgaaattggacgctatcttggttgggctatggcaataatttatatggatgcaaagaggccacgctgaggggttgaatccattaatgtttacctttgctttactgggaaattcaacatatgtaggaagcatacttgtaaatagcttggactggtcgaaagttggaccaaatctcccgtggctcgtagacgctggaggatgtgttttgctggattcttttatcattcttcagttcctttatttccattatcggaagcaaagggagctttcagatgagcacgacaaagcagataaagcctgacagaaatggtttcttcttcagtacaaagaactgaagctgaaatgagtacctcatacaactggctctgggtagcagcatcattcttacgtgaagagcaccactcatactcaggagtcgggacagatttggagcgtcatttcactggttgctgcttggggagggtagttctcacggcgtcatctcttgtggagaggcttgtgcacttaatttgtcttgtagtatcaaaacgtcttgtataatattatcactgttctcgaatattggttcattatctctgttctcgaatatttgttctcaaatatttgttacctgttagtttatttttgaaacgacggagggaatatttatttatatgagagattagatgtaactggtctgcttttgctttacattcaattttttttccttcccctttttttg

SEQ ID NO: 29711 - DNA, 2007 bp, Zea Mays
gaaagagaagggcctctcgagggaagggcaagagcggcggctggtaaataaagatcgcgtcgacgcctcttcccctcccccagacctccccgtctaggcttcgattccgccctcctcgaacccgccttccttcccgtcgttttctccccagctccatcgtcctcgggctccggagaaggaagagccgctctggcaccaggtcttcgaacctcccctgccctgccccgcctcgtctccccctgtccccgtctcggtctgttgcaggtatgggtgttctcggtggagcacctcctgcaagctgcccagcgacccggcactgcgcagaatgggcccgaatctacttgaggtactgcttgtgcagccagaaggaaggtgctgccctggcacttgggctaatcagtgtcataagctggggcttcgccgaggtgccacagataatgacaaattacagacagaagtcaacagaaggactctctgtcgcttttcttatgacctggattgttggggatttgtttaaccttgttggctgcttcctcgaacctgctactctgccaactcagatgtacatggcactgctatataccatcacaactctaattcttaccgtacagacgatatactatagccacatctaccatcgtcttgaagcaaaaaaatccagggcagctagcaaggctcaaaagcatcaacgtgcggatgcatcattacgtgaaaggcttttgggtgccaaggacggtgtgttatccagaaacaacgggtcagatgctacagtccttattccaagctcacctattcctgttaatgtgaaattggtcgaccaataccatggaagcagccccaacaccgactactactacatgtcagcaagatctttgtccaggagtccagtgccaactgctggtacatggttgggcagtaatcgtcaatcgttaatgactcctccacaaacgaatgatcaaaggggatctttaattggtgaaatcgctccagcacattctgcaccatctactgttacaaaaaatgccctctcagtggcaccatggatgggtcttctattgggtacgtgtctcttgcacattttgattggaaacacacatagggagatgccaagtggaactgtcataccagttggaagaaggcttttagtgtttgtggagggtcatggaaattcatcgctcagccatggcaatggaagtgaaattggacgctatcttggttgggctatggcaataatttatatggatgcaaagaggccacgctgaggggttgaatccattaatgtttacctttgctttactgggaaattcaacatatgtaggaagcatacttgtaaatagcttggactggtcgaaagttggaccaaatctcccgtggctcgtagacgctggaggatgtgttttgctggattcttttatcattcttcagttcctttatttccattatcggaagcaaagggagctttcagatgagcacgacaaagcagataaagcctgacagaaatggtttcttcttcagtacaaaggtctggttctcctattatgaacatttgttatgctgcactgtagttgtggtctgatgggaacccttgtacagaattcgcaattttgagtataataactgaagctgaaatgagtacctcatacaactggctctgggtagcagcatcattcttacgtgaagagcaccactcatactcaggagtcgggacagatttggagcgtcatttcactggttgctgcttggggagggtagttctcacggcgtcatctcttgtggagaggcttgtgcacttaatttgtcttgtagtatcaaaacgtcttgtataatattatcactgttctcgaatattggttcattatctctgttctcgaatatttgttctcaaatatttgttacctgttagtttatttttgaaacgacggagggaatatttatttatatgagagattagatgtaactggtctgcttttgctttacattcaattttttttccttcccctttttttg

SEQ ID NO: 29712 - DNA, 1720 bp, Zea Mays
acaggaaggacgatgacgctaggccgtcccgtctgttgcaggtatgggtgttctcggtggagcacctcctgcaagctgcccagcgacccggcactgcgcagaatgggcccgaatctacttgaggtactgcttgtgcagccagaaggaaggtgctgccctggcacttgggctaatcagtgtcataagctggggcttcgccgaggtgccacagataatgacaaattacagacagaagtcaacagaaggactctctgtcgcttttcttatgacctggattgttggggatttgtttaaccttgttggctgcttcctcgaacctgctactctgccaactcagatgtacatggcactgctatataccatcacaactctaattcttaccgtacagacgatatactatagccacatctaccatcgtcttgaagcaaaaaaatccagggcagctagcaaggctcaaaagcatcaacgtgcggatgcatcattacgtgaaaggcttttgggtgccaaggacggtgtgttatccagaaacaacgggtcagatgctacagtccttattccaagctcacctattcctgttaatgtgaaattggtcgaccaataccatggaagcagccccaacaccgactactactacatgtcagcaagatctttgtccaggagtccagtgccaactgctggtacatggttgggcagtaatcgtcaatcgttaatgactcctccacaaacgaatgatcaaaggggatctttaattggtgaaatcgctccagcacattctgcaccatctactgttacaaaaaatgccctctcagtggcaccatggatgggtcttctattgggtacgtgtctcttgcacattttgattggaaacacacatagggagatgccaagtggaactgtcataccagttggaagaaggcttttagtgtttgtggagggtcatggaaattcatcgctcagccatggcaatggaagtgaaattggacgctatcttggttgggctatggcaataatttatatgggtgggcgccttccccagattttgttaaacatgcaaagaggccacgctgaggggttgaatccattaatgtttacctttgctttactgggaaattcaacatatgtaggaagcatacttgtaaatagcttggactggtcgaaagttggaccaaatctcccgtggctcgtagacgctggaggatgtgttttgctggattcttttatcattcttcagttcctttatttccattatcggaagcaaagggagctttcagatgagcacgacaaagcagataaagcctgacagaaatggtttcttcttcagtacaaagaactgaagctgaaatgagtacctcatacaactggctctgggtagcagcatcattcttacgtgaagagcaccactcatactcaggagtcgggacagatttggagcgtcatttcactggttgctgcttggggagggtagttctcacggcgtcatctcttgtggagaggcttgtgcacttaatttgtcttgtagtatcaaaacgtcttgtataatattatcactgttctcgaatattggttcattatctctgttctcgaatatttgttctcaaatatttgttacctgttagtttatttttgaaacgacggagggaatatttatttatatgagagattagatgtaactggtctgcttttgctttacattcaattttttttccttcccctttttttg

SEQ ID NO: 29713 - DNA, 2024 bp, Zea Mays
aaaaatttgctattttgccactctcaattttggttgtctgttattatcctcgaatctggggctgggaccagtggcgttgatacatatttttgaaaaaaaagagaggcaacctcaccacttttcatgttccaacaaatctactagtatcagttaatccgtgtcgatccttcgttgccagagtcgattcggaggcgttgatacataggctgcagtcgattcggaggcgttgatacataggctgcagtttggaggatttgaattcaaaatgtgtcagttgttggtgcatcctttcagacactagtcctcctacccctgatggggaactgaggaccacgtctgttgcaggtatgggtgttctcggtggagcacctcctgcaagctgcccagcgacccggcactgcgcagaatgggcccgaatctacttgaggtactgcttgtgcagccagaaggaaggtgctgccctggcacttgggctaatcagtgtcataagctggggcttcgccgaggtgccacagataatgacaaattacagacagaagtcaacagaaggactctctgtcgcttttcttatgacctggattgttggggatttgtttaaccttgttggctgcttcctcgaacctgctactctgccaactcagatgtacatggcactgctatataccatcacaactctaattcttaccgtacagacgatatactatagccacatctaccatcgtcttgaagcaaaaaaatccagggcagctagcaaggctcaaaagcatcaacgtgcggatgcatcattacgtgaaaggcttttgggtgccaaggacggtgtgttatccagaaacaacgggtcagatgctacagtccttattccaagctcacctattcctgttaatgtgaaattggtcgaccaataccatggaagcagccccaacaccgactactactacatgtcagcaagatctttgtccaggagtccagtgccaactgctggtacatggttgggcagtaatcgtcaatcgttaatgactcctccacaaacgaatgatcaaaggggatctttaattggtgaaatcgctccagcacattctgcaccatctactgttacaaaaaatgccctctcagtggcaccatggatgggtcttctattgggtacgtgtctcttgcacattttgattggaaacacacatagggagatgccaagtggaactgtcataccagttggaagaaggcttttagtgtttgtggagggtcatggaaattcatcgctcagccatggcaatggaagtgaaattggacgctatcttggttgggctatggcaataatttatatgggtgggcgccttccccagattttgttaaacatgcaaagaggccacgctgaggggttgaatccattaatgtttacctttgctttactgggaaattcaacatatgtaggaagcatacttgtaaatagcttggactggtcgaaagttggaccaaatctcccgtggctcgtagacgctggaggatgtgttttgctggattcttttatcattcttcagttcctttatttccattatcggaagcaaagggagctttcagatgagcacgacaaagcagataaagcctgacagaaatggtttcttcttcagtacaaagaactgaagctgaaatgagtacctcatacaactggctctgggtagcagcatcattcttacgtgaagagcaccactcatactcaggagtcgggacagatttggagcgtcatttcactggttgctgcttggggagggtagttctcacggcgtcatctcttgtggagaggcttgtgcacttaatttgtcttgtagtatcaaaacgtcttgtataatattatcactgttctcgaatattggttcattatctctgttctcgaatatttgttctcaaatatttgttacctgttagtttatttttgaaacgacggagggaatatttatttatatgagagattagatgtaactggtctgcttttgctttacattcaattttttttccttcccctttttttg

SEQ ID NO: 29714 - DNA, 1880 bp, Zea Mays
tcctcctacccctgatggggaactgaggaccacgtctgttgcaggtatgggtgttctcggtggagcacctcctgcaagctgcccagcgacccggcactgcgcagaatgggcccgaatctacttgaggtactgcttgtgcagccagaaggaaggtgctgccctggcacttgggctaatcagtgtcataagctggggcttcgccgaggtgccacagataatgacaaattacagacagaagtcaacagaaggactctctgtcgcttttcttatgacctggattgttggggatttgtttaaccttgttggctgcttcctcgaacctgctactctgccaactcagatgtacatggcactgctatataccatcacaactctaattcttaccgtacagacgatatactatagccacatctaccatcgtcttgaagcaaaaaaatccagggcagctagcaaggctcaaaagcatcaacgtgcggatgcatcattacgtgaaaggcttttgggtgccaaggacggtgtgttatccagaaacaacgggtcagatgctacagtccttattccaagctcacctattcctgttaatgtgaaattggtcgaccaataccatggaagcagccccaacaccgactactactacatgtcagcaagatctttgtccaggagtccagtgccaactgctggtacatggttgggcagtaatcgtcaatcgttaatgactcctccacaaacgaatgatcaaaggggatctttaattggtgaaatcgctccagcacattctgcaccatctactgttacaaaaaatgccctctcagtggcaccatggatgggtcttctattgggtacgtgtctcttgcacattttgattggaaacacacatagggagatgccaagtggaactgtcataccagttggaagaaggcttttagtgtttgtggagggtcatggaaattcatcgctcagccatggcaatggaagtgaaattggacgctatcttggttgggctatggcaataatttatatggatgcaaagaggccacgctgaggggttgaatccattaatgtttacctttgctttactgggaaattcaacatatgtaggaagcatacttgtaaatagcttggactggtcgaaagttggaccaaatctcccgtggctcgtagacgctggaggatgtgttttgctggattcttttatcattcttcagttcctttatttccattatcggaagcaaagggagctttcagatgagcacgacaaagcagataaagcctgacagaaatggtttcttcttcagtacaaaggtctggttctcctattatgaacatttgttatgctgcactgtagttgtggtctgatgggaacccttgtacagaattcgcaattttgagtataatgtaagtcttgaatgatgtgtcaaactgaagtagggagatagaatgtaggaggcatattcactctattctattgttgtatacgtgcgtatgcagaactgaagctgaaatgagtacctcatacaactggctctgggtagcagcatcattcttacgtgaagagcaccactcatactcaggagtcgggacagatttggagcgtcatttcactggttgctgcttggggagggtagttctcacggcgtcatctcttgtggagaggcttgtgcacttaatttgtcttgtagtatcaaaacgtcttgtataatattatcactgttctcgaatattggttcattatctctgttctcgaatatttgttctcaaatatttgttacctgttagtttatttttgaaacgacggagggaatatttatttatatgagagattagatgtaactggtctgcttttgctttacattcaattttttttccttcccctttttttg

SEQ ID NO: 29715 - DNA, 2326 bp, Zea Mays
agcattttgtttttttcagaataatgatgattcatgccttgcctatgtattaggagccatttctaatctattatcaaagataggcatctcaaacacagttggaataatcagttctccatattcacttgggaccaatattggactaggcacaccattatccattcagcaacagttacttgttcttttaaagcgatcactcaagagagctgatgcattgaaacttccaagtttactatcctttgatcacctttcgcttgcaaaatttgatctgaagcatgtccaaaggccactagtctctttcggccctaatgcatctacaaagcttagaacatgtcctgcagatgtctgtaagaatctaaggttaggttcccgtgtgttgactgactttggagcagatgttctatctacttcaaatgataatggtagttttagcacttcttggcttaggaatctatccgccacttctgattcatggcgtagcagttcaaagaacaccaaaaaaatacatattaatgacttcgacaatttccattatcatgcacaaccaagtccagtacctgcatcaatattgcaattagctggctcagcatatttgctgagagctaccgcttgggagcactatgggagtgctccaatggtacgaatgaatgttctagtttatgcaacctgctttgcggatgctgcaagttcatcagagttatcactagcatatgttaagctaattcaacaactggcggtgttcaaaggatattcagctgcattctgtgctctaaagcttgctgaaaagaagttcccatcctcaacaagtttacacatccagcttctaggaatgcagattctacatgagcgcgcacttcatcgagggcatctaaaagtcgcgcaacaaatctgtgatgagtttggggtgttatcatcttctgtttctggagtagacattgagctaaagacagaatttagtgtacggcgtgctcgcactctccttgccgcaaaacagtttagccaggttgtgcacttccttgcttatatttacacaagtatgcatatcatcttatttgttttccattcattaagaaaaaaatgaaaataatgcatttttccttttacatatgcaacttgcaagcacattgcatggaagatatctccccttcctaattctgagtactctcttcatcatgccagtacatgaactgacagaataaaacctgtttgtgacacttgacttttccacacaggccgcagctgtggccaattctcttttctctacgtgctacaagtacaacatgcaggttgagaatgcaagtgttcttttattacttgctgaaatacataaaaaatctgacaatgcggtacttgggcttccttatgcgttggccagccaatcattctgcaaatcattcaacttggatctgcttgaagcctcagctacacttactctcgctgagttgtggctggatcttggatcaagccatgcaaagaaggcactgagtcttgtctaccagagccttcccatgattcttggtcatggtgggcttgagctgcgtgctcgagctcacgttgttttagcaaagtgccatttatccgatctgaaattctcagttctcgaagatcctgaagctgttttggatcctctgaaccaagccactgaagacctgcaagcattggagtaccacgagatggcagcagaggcgtactatctgaaggcaatggcatacaaccatctcggcaagcttgatgagagggaggaagccgcggctcgtttcaaggatcacgtcactgcccttgagaccccgcataacgaagaggactcgcttaagtactgagacccaagaccatttgttattggcaagcatgccccactgccagagactaaagagggcgtggtggccttctggacccgcatggtggcactggcaggctacaatgctacactgaggcgaatggcgtttgctgccatgcggaggcactgccactgactgtgggcggaccggcggacggcggtgactgaaggagacgggcagccggtgaggtcaatgtgctagttgggtcagcgtggtatggtctcatccatggaccatggtgttcattagagcgagacgaagacatcagattgagacttgatgttcttactctgttcttatcgacttctctgctctgttactggggagttccgaattgctaactcagacagacagtgctgacaatgtgtttgtgtttgaatgtaaacagaacaagaacagaaaaatagaagattgatctgtattttcccttgactgatgctggatatttatagatggtgaatacacactaagaacgaacacgtttgttg

SEQ ID NO: 29716 - DNA, 2306 bp, Zea Mays
agcattttgtttttttcagaataatgatgattcatgccttgcctatgtattaggagccatttctaatctattatcaaagataggcatctcaaacacagttggaataatcagttctccatattcacttgggaccaatattggactaggcacaccattatccattcagcaacagttacttgttcttttaaagcgatcactcaagagagctgatgcattgaaacttccaagtttactatcctttgatcacctttcgcttgcaaaatttgatctgaagcatgtccaaaggccactagtctctttcggccctaatgcatctacaaagcttagaacatgtcctgcagatgtctgtaagaatctaaggttaggttcccgtgtgttgactgactttggagcagatgttctatctacttcaaatgataatggtagttttagcacttcttggcttaggaatctatccgccacttctgattcatggcgtagcagttcaaagaacaccaaaaaaatacatattaatgacttcgacaatttccattatcatgcacaaccaagtccagtacctgcatcaatattgcaattagctggctcagcatatttgctgagagctaccgcttgggagcactatgggagtgctccaatggtacgaatgaatgttctagtttatgcaacctgctttgcggatgctgcaagttcatcagagttatcactagcatatgttaagctaattcaacaactggcggtgttcaaaggatattcagctgcattctgtgctctaaagcttgctgaaaagaagttcccatcctcaacaagtttacacatccagcttctaggaatgcagattctacatgagcgcgcacttcatcgagggcatctaaaagtcgcgcaacaaatctgtgatgagtttggggtgttatcatcttctgtttctggagtagacattgagctaaagacagaatttagtgtacggcgtgctcgcactctccttgccgcaaaacagtttagccaggccgcagctgtggccaattctcttttctctacgtgctacaagtacaacatgcaggttgagaatgcaagtgttcttttattacttgctgaaatacataaaaaatctgacaatgcggtacttgggcttccttatgcgttggccagccaatcattctgcaaatcattcaacttggatctgcttgaagcctcagctacacttactctcgctgagttgtggctggatcttggatcaagccatgcaaagaaggcactgagtcttgtctaccagagccttcccatgattcttggtcatggtgggcttgagctgcgtgctcgagctcacgttgttttagcaaagtgccatttatccgatctgaaattctcaggtattttgcaacacttcgtgttacattatgtggaaaacctattgctgatcctttaatgtgtgatgcatcgactgtaaacctctcaacatattggtctgctcgacacatccacctagacgctagaagctagacctgttacgcttgtcgaaacaatggacacggttctttcttttgttacttccccccacttcactgtcttactgttgcagttctcgaagatcctgaagctgttttggatcctctgaaccaagccactgaagacctgcaagcattggagtaccacgagatggcagcagaggcgtactatctgaaggcaatggcatacaaccatctcggcaagcttgatgagagggaggaagccgcggctcgtttcaaggatcacgtcactgcccttgagaccccgcataacgaagaggactcgcttaagtactgagacccaagaccatttgttattggcaagcatgccccactgccagagactaaagagggcgtggtggccttctggacccgcatggtggcactggcaggctacaatgctacactgaggcgaatggcgtttgctgccatgcggaggcactgccactgactgtgggcggaccggcggacggcggtgactgaaggagacgggcagccggtgaggtcaatgtgctagttgggtcagcgtggtatggtctcatccatggaccatggtgttcattagagcgagacgaagacatcagattgagacttgatgttcttactctgttcttatcgacttctctgctctgttactggggagttccgaattgctaactcagacagacagtgctgacaatgtgtttgtgtttgaatgtaaacagaacaagaacagaaaaatagaagattgatctgtattttcccttgactgatgctggatatttatagatggtgaatacacactaagaacgaacacgtttgttg

SEQ ID NO: 29717 - DNA, 1895 bp, Zea Mays
agcattttgtttttttcagaataatgatgattcatgccttgcctatgtattaggagccatttctaatctattatcaaagataggcatctcaaacacagttggaataatcagttctccatattcacttgggaccaatattggactaggcacaccattatccattcagcaacagttacttgttcttttaaagcgatcactcaagagagctgatgcattgaaacttccaagtttactatcctttgatcacctttcgcttgcaaaatttgatctgaagcatgtccaaaggccactagtctctttcggccctaatgcatctacaaagcttagaacatgtcctgcagatgtctgtaagaatctaaggttaggttcccgtgtgttgactgactttggagcagatgttctatctacttcaaatgataatggtagttttagcacttcttggcttaggaatctatccgccacttctgattcatggcgtagcagttcaaagaacaccaaaaaaatacatattaatgacttcgacaatttccattatcatgcacaaccaagtccagtacctgcatcaatattgcaattagctggctcagcatatttgctgagagctaccgcttgggagcactatgggagttcatcagagttatcactagcatatgttaagctaattcaacaactggcggtgttcaaaggatattcagctgcattctgtgctctaaagcttgctgaaaagaagttcccatcctcaacaagtttacacatccagcttctaggaatgcagattctacatgagcgcgcacttcatcggccgcagctgtggccaattctcttttctctacgtgctacaagtacaacatgcaggttgagaatgcaagtgttcttttattacttgctgaaatacataaaaaatctgacaatgcggtacttgggcttccttatgcgttggccagccaatcattctgcaaatcattcaacttggatctgcttgaagcctcagctacacttactctcgctgagttgtggctggatcttggatcaagccatgcaaagaaggcactgagtcttgtctaccagagccttcccatgattcttggtcatggtgggcttgagctgcgtgctcgagctcacgttgttttagcaaagtgccatttatccgatctgaaattctcagttctcgaagatcctgaagctgttttggatcctctgaaccaagccactgaagacctgcaagcattggagtaccacgagatggcagcagaggcgtactatctgaaggcaatggcatacaaccatctcggcaagcttgatgagagggaggaagccgcggctcgtttcaaggatcacgtcactgcccttgagaccccgcataacgaagaggactcgcttaagtactgagacccaagaccatttgttattggcaagcatgccccactgccagagactaaagagggcgtggtggccttctggacccgcatggtggcactggcaggctacaatgctacactgaggcgaatggcgtttgctgccatgcggaggcactgccactgactgtgggcggaccggcggacggcggtgactgaaggagacgggcagccggtgaggtcaatgtgctagttgggtcagcgtggtatggtctcatccatggaccatggtgttcattagagcgagacgaagacatcagattgagacttgatgttcttactctgttcttatcgacttctctgctctgttactggggagttccgaattgctaactcagacagacagtgctgacaatgtgtttgtgtttgaatgtaaacagaacaagaacagaaaaatagaagattgatctgtattttcccttgactgatgctggatatttatagatggtgaatacacactaagaacgaacacgtttgttg

SEQ ID NO: 29718 - DNA, 2080 bp, Zea Mays
agcattttgtttttttcagaataatgatgattcatgccttgcctatgtattaggagccatttctaatctattatcaaagataggcatctcaaacacagttggaataatcagttctccatattcacttgggaccaatattggactaggcacaccattatccattcagcaacagttacttgttcttttaaagcgatcactcaagagagctgatgcattgaaacttccaagtttactatcctttgatcacctttcgcttgcaaaatttgatctgaagcatgtccaaaggccactagtctctttcggccctaatgcatctacaaagcttagaacatgtcctgcagatgtctgtaagaatctaaggttaggttcccgtgtgttgactgactttggagcagatgttctatctacttcaaatgataatggtagttttagcacttcttggcttaggaatctatccgccacttctgattcatggcgtagcagttcaaagaacaccaaaaaaatacatattaatgacttcgacaatttccattatcatgcacaaccaagtccagtacctgcatcaatattgcaattagctggctcagcatatttgctgagagctaccgcttgggagcactatgggagtgctccaatggtacgaatgaatgttctagtttatgcaacctgctttgcggatgctgcaagttcatcagagttatcactagcatatgttaagctaattcaacaactggcggtgttcaaaggatattcagctgcattctgtgctctaaagcttgctgaaaagaagttcccatcctcaacaagtttacacatccagcttctaggaatgcagattctacatgagcgcgcacttcatcgagggcatctaaaagtcgcgcaacaaatctgtgatgagtttggggtgttatcatcttctgtttctggagtagacattgagctaaagacagaatttagtgtacggcgtgctcgcactctccttgccgcaaaacactgtggccaattctcttttctctacgtgctacaagtacaacatgcaggttgagaatgcaagtgttcttttattacttgctgaaatacataaaaaatctgacaatgcggtacttgggcttccttatgcgttggccagccaatcattctgcaaatcattcaacttggatctgcttgaagcctcagctacacttactctcgctgagttgtggctggatcttggatcaagccatgcaaagaaggcactgagtcttgtctaccagagccttcccatgattcttggtcatggtgggcttgagctgcgtgctcgagctcacgttgttttagcaaagtgccatttatccgatctgaaattctcagttctcgaagatcctgaagctgttttggatcctctgaaccaagccactgaagacctgcaagcattggagtaccacgagatggcagcagaggcgtactatctgaaggcaatggcatacaaccatctcggcaagcttgatgagagggaggaagccgcggctcgtttcaaggatcacgtcactgcccttgagaccccgcataacgaagaggactcgcttaagtactgagacccaagaccatttgttattggcaagcatgccccactgccagagactaaagagggcgtggtggccttctggacccgcatggtggcactggcaggctacaatgctacactgaggcgaatggcgtttgctgccatgcggaggcactgccactgactgtgggcggaccggcggacggcggtgactgaaggagacgggcagccggtgaggtcaatgtgctagttgggtcagcgtggtatggtctcatccatggaccatggtgttcattagagcgagacgaagacatcagattgagacttgatgttcttactctgttcttatcgacttctctgctctgttactggggagttccgaattgctaactcagacagacagtgctgacaatgtgtttgtgtttgaatgtaaacagaacaagaacagaaaaatagaagattgatctgtattttcccttgactgatgctggatatttatagatggtgaatacacactaagaacgaacacgtttgttg

SEQ ID NO: 29719 - DNA, 2102 bp, Zea Mays
agcattttgtttttttcagaataatgatgattcatgccttgcctatgtattaggagccatttctaatctattatcaaagataggcatctcaaacacagttggaataatcagttctccatattcacttgggaccaatattggactaggcacaccattatccattcagcaacagttacttgttcttttaaagcgatcactcaagagagctgatgcattgaaacttccaagtttactatcctttgatcacctttcgcttgcaaaatttgatctgaagcatgtccaaaggccactagtctctttcggccctaatgcatctacaaagcttagaacatgtcctgcagatgtctgtaagaatctaaggttaggttcccgtgtgttgactgactttggagcagatgttctatctacttcaaatgataatggtagttttagcacttcttggcttaggaatctatccgccacttctgattcatggcgtagcagttcaaagaacaccaaaaaaatacatattaatgacttcgacaatttccattatcatgcacaaccaagtccagtacctgcatcaatattgcaattagctggctcagcatatttgctgagagctaccgcttgggagcactatgggagtgctccaatggtacgaatgaatgttctagtttatgcaacctgctttgcggatgctgcaagttcatcagagttatcactagcatatgttaagctaattcaacaactggcggtgttcaaaggatattcagctgcattctgtgctctaaagcttgctgaaaagaagttcccatcctcaacaagtttacacatccagcttctaggaatgcagattctacatgagcgcgcacttcatcgagggcatctaaaagtcgcgcaacaaatctgtgatgagtttggggtgttatcatcttctgtttctggagtagacattgagctaaagacagaatttagtgtacggcgtgctcgcactctccttgccgcaaaacagtttagccaggccgcagctgtggccaattctcttttctctacgtgctacaagtacaacatgcaggttgagaatgcaagtgttcttttattacttgctgaaatacataaaaaatctgacaatgcggtacttgggcttccttatgcgttggccagccaatcattctgcaaatcattcaacttggatctgcttgaagcctcagctacacttactctcgctgagttgtggctggatcttggatcaagccatgcaaagaaggcactgagtcttgtctaccagagccttcccatgattcttggtcatggtgggcttgagctgcgtgctcgagctcacgttgttttagcaaagtgccatttatccgatctgaaattctcagttctcgaagatcctgaagctgttttggatcctctgaaccaagccactgaagacctgcaagcattggagtaccacgagatggcagcagaggcgtactatctgaaggcaatggcatacaaccatctcggcaagcttgatgagagggaggaagccgcggctcgtttcaaggatcacgtcactgcccttgagaccccgcataacgaagaggactcgcttaagtactgagacccaagaccatttgttattggtaaggcaagcatgccccactgccagagactaaagagggcgtggtggccttctggacccgcatggtggcactggcaggctacaatgctacactgaggcgaatggcgtttgctgccatgcggaggcactgccactgactgtgggcggaccggcggacggcggtgactgaaggagacgggcagccggtgaggtcaatgtgctagttgggtcagcgtggtatggtctcatccatggaccatggtgttcattagagcgagacgaagacatcagattgagacttgatgttcttactctgttcttatcgacttctctgctctgttactggggagttccgaattgctaactcagacagacagtgctgacaatgtgtttgtgtttgaatgtaaacagaacaagaacagaaaaatagaagattgatctgtattttcccttgactgatgctggatatttatagatggtgaatacacactaagaacgaacacgtttgttg

SEQ ID NO: 29720 - DNA, 2037 bp, Zea Mays
agcattttgtttttttcagaataatgatgattcatgccttgcctatgtattaggagccatttctaatctattatcaaagataggcatctcaaacacagttggaataatcagttctccatattcacttgggaccaatattggactaggcacaccattatccattcagcaacagttacttgttcttttaaagcgatcactcaagagagctgatgcattgaaacttccaagtttactatcctttgatcacctttcgcttgcaaaatttgatctgaagcatgtccaaaggccactagtctctttcggccctaatgcatctacaaagcttagaacatgtcctgcagatgtctgtaagaatctaaggttaggttcccgtgtgttgactgactttggagcagatgttctatctacttcaaatgataatggtagttttagcacttcttggcttaggaatctatccgccacttctgattcatggcgtagcagttcaaagaacaccaaaaaaatacatattaatgacttcgacaatttccattatcatgcacaaccaagtccagtacctgcatcaatattgcaattagctggctcagcatatttgctgagagctaccgcttgggagcactatgggagttcatcagagttatcactagcatatgttaagctaattcaacaactggcggtgttcaaaggatattcagctgcattctgtgctctaaagcttgctgaaaagaagttcccatcctcaacaagtttacacatccagcttctaggaatgcagattctacatgagcgcgcacttcatcgagggcatctaaaagtcgcgcaacaaatctgtgatgagtttggggtgttatcatcttctgtttctggagtagacattgagctaaagacagaatttagtgtacggcgtgctcgcactctccttgccgcaaaacagtttagccaggccgcagctgtggccaattctcttttctctacgtgctacaagtacaacatgcaggttgagaatgcaagtgttcttttattacttgctgaaatacataaaaaatctgacaatgcggtacttgggcttccttatgcgttggccagccaatcattctgcaaatcattcaacttggatctgcttgaagcctcagctacacttactctcgctgagttgtggctggatcttggatcaagccatgcaaagaaggcactgagtcttgtctaccagagccttcccatgattcttggtcatggtgggcttgagctgcgtgctcgagctcacgttgttttagcaaagtgccatttatccgatctgaaattctcagttctcgaagatcctgaagctgttttggatcctctgaaccaagccactgaagacctgcaagcattggagtaccacgagatggcagcagaggcgtactatctgaaggcaatggcatacaaccatctcggcaagcttgatgagagggaggaagccgcggctcgtttcaaggatcacgtcactgcccttgagaccccgcataacgaagaggactcgcttaagtactgagacccaagaccatttgttattggcaagcatgccccactgccagagactaaagagggcgtggtggccttctggacccgcatggtggcactggcaggctacaatgctacactgaggcgaatggcgtttgctgccatgcggaggcactgccactgactgtgggcggaccggcggacggcggtgactgaaggagacgggcagccggtgaggtcaatgtgctagttgggtcagcgtggtatggtctcatccatggaccatggtgttcattagagcgagacgaagacatcagattgagacttgatgttcttactctgttcttatcgacttctctgctctgttactggggagttccgaattgctaactcagacagacagtgctgacaatgtgtttgtgtttgaatgtaaacagaacaagaacagaaaaatagaagattgatctgtattttcccttgactgatgctggatatttatagatggtgaatacacactaagaacgaacacgtttgttg

SEQ ID NO: 29721 - DNA, 3891 bp, Zea Mays
acattattcaggtccaggtcacatgatgcacagacagcccgtccgacgccgcgttagctacttgcctacttcagctatatgaaacggcaaaagtcttcccctcgttccccaatctcctctccatcgaaaccctagcacgacgcaattcccgtcttcccacgccgtatcgccgttgctatgggcaagaagcggaagctcgagcccaaatcggcggcagggttcacgccggttaaggcctccccgaccaccaggtctgccaccgctaaggccgctggtctatccgaggtcctcgcccccgtcgaggctacgatggagaagctgccgcagggggcaggcggcgaggatgtagaggaaatcgaggaggtggaggtcgaggaggaagtggaagtggaagaggaagaagaaggcgagagcgaccaggcttcgatccaggcgctgctggattcgttccccaaggaccagctcgtcgagctgttacgcgacgctgccatcgctcacggcgacgtgctaaccaccatccggcgcgtggccgacgccgacccggctcagcggaagatcttcgtacacggcctcggctgggacaccacaaccgacaccctcaccgaggccttcggcccatacggcgagatagaggatctcaaggtcgtcaccgaccgcaacacgggcaagtgcaaggggtacgggttcatcctcttccgtcaccgctccggcgcccgagctgcactacgcgagccccagaagaagattggtaaccgcagcaccgcctgccagctcgcctctgttggccctgtccctggtggtgcgcccaacagcgctgcaccagccccggttcaattgcagttgccaccagtgtcagagtatacacaacgaaagatatttgtcagcaatgttggtgcagatatcgatccgcagaaattgcttcagttctttgcgaggtttggtgagatcgaggaaggcccgcttggtcttgacaaggtcactgggaaacccaagggatttgctctttttgtctacaagaccattgaaagtgccaagaaggctcttgaggagccacataagcattttgagggagtgatgctgcactgccagaaggcgattgatggaccaaagccgaacaaattaggaggagctggaggttttttcggtgctggagcttcaagtgggggcaaggggtttgctggttatggagctactagtcattctctgcccggaactgttggtattgtccagccaatgtcacctctggcacctggattggcttcattgcctggggccaactggtgcattgggtggtagcagcgtgcaggggatgcaaggtggttatatgggtggctacggtggttctggtgggtatgggggtgcttcttcaggaggccctggaagacattacatgggtcattaggatgattataactattttactgtggccagaatgccagatgattctacatgttcctgcttggcacttataaacttgctgttttaagctgtttctggctactcaattatggctgtggtcaaagttttcataggaactttggttccctccacctatcatttcaaaacgaaattaccgtttagattttcaaaagggcatcttatggctgcaagactattgtagaagacttcatgtggatctaaagcattgtggtatttaatgatattactgtttttgtacggttttcaaaaggccaaattaaggcttgcaaaactattgtaaaagacttcctgtgggtttaaagcactgagctatttaatcacaacggttttgtttcatatgtatggtttttaaagaggcgattgtgtggcttgcaaggctgctgcaaaagattgtggatttttactatgtttctgttttcacttttttttacaataaacctgctgctatgtttagacataatttgtactctgcactgacaagtgtcattttagttgccatacttatttgcaggcaatgcaggtctatttgttcaggaaatcaatagtgcttttcagtatatttctaaagaaagttggatatttcttctatttatatataaagtaatacttcctagtttgcaaataatgtgctttatgttgataaaatgttgaagttgagaacgtttgctactccctcagccccaacaatgtgctgttttaggttcgagatgagtccagtgttcttaaggccgcgcataggtgagcaagcaaacaggtcaaccgccttagctcctaggtgagcaaggcggcaagatttctccgagcgtctggacacgcctaggcaacgccttaaaaaccctggacgagtcaaactttctttaaatataagtttagtgtgaaaatatatttcataacgagtctaatgatatttatttggtatcataaatgtttgtaatttttcatatagatttgttcgaaattctttttgcgatagggggagtagttcaagtaaaatatttgtttatggtatataatggtattgaaggagaggctactaagtatctgtctatttttcgttgctacttgctagggccttttgttgctggaatgatcttggtagcttatctttctcgtatctgaccgtactattgattacatatgtggcagatgcacactgctgtatactatctgactctctacattatcggcaaagaaaacctctgttttgttatgaatctcattgctttttagatgtgaatgttcattgctcatttgacatactcctttgcatgggcacactagattatgatagtgccacttcttgaatcaaaagcttttgaattttttggtagaatttactcagataaactatctactgtgttgcccgagaactaatagtaatgtttctaaagctttgcgttttctttttatgaccaccaaaactattttgttcttattcctttattgataacttacagcaatttatgcttaggtatagattgtgacattgtcatgttgccatttcattgttgcgtgtattcttgaatggtatacataattgttactttctgtaatataatatctttggaatatgattcgacattgttatctgtccgggaaatcaatagtgcttttcagtgtattgtgaccacagtttaacccttgtttaaaagcagttaaagaaagagttctggtgctggttgatagaattcatggccctgaagtggcagattaccatggtgcatggacgacccaatatcactttatttccttgttttaatgtcacggcaggccggttgaggtctcaagtttgcctttgagacaggtaagtacgaaatgcatacattagcaggtccaagtgatgcaaatagcagcagaaagctctcgagcttgttcgcttatgccgaaaaagggtatctacttattttgtctgtataaattagtataaattacagctgcaagcctgcaacagtctgaacagctggcttatagccgcacgtcatctgtaagagcaagtttaataatagagcctattattggctctaacttcttaccgtgtcatatagagccagcaataaacacactcatgtagtaaaactggctttaagattgactcttagatgaatttcttgtctcttatctcttttatccttttgtcttgaaacctgtgtagcacctaactcttgcatgagagctcactacctctattttttgatgtctctcttccacgtaagcaaaaatgacatgtaattagacttgagtccattattgtacttgctctaatttgtgaattcgtgagatgggagagttgcagtgatgtgctgtctcttcgtctcacggtgttgcccgcaaggagagagtggcaaggtagtgctgagacgtgggagcctgcgccctgcttcggaggctgtgcttcagcttcaaacgggtacacggaccgtaatcaaatgatgtatatgttgaattaggaaa

SEQ ID NO: 29722 - DNA, 3912 bp, Zea Mays
acattattcaggtccaggtcacatgatgcacagacagcccgtccgacgccgcgttagctacttgcctacttcagctatatgaaacggcaaaagtcttcccctcgttccccaatctcctctccatcgaaaccctagcacgacgcaattcccgtcttcccacgccgtatcgccgttgctatgggcaagaagcggaagctcgagcccaaatcggcggcagggttcacgccggttaaggcctccccgaccaccaggtctgccaccgctaaggccgctggtctatccgaggtcctcgcccccgtcgaggctacgatggagaagctgccgcagggggcaggcggcgaggatgtagaggaaatcgaggaggtggaggtcgaggaggaagtggaagtggaagaggaagaagaaggcgagagcgaccaggcttcgatccaggcgctgctggattcgttccccaaggaccagctcgtcgagctgttacgcgacgctgccatcgctcacggcgacgtgctaaccaccatccggcgcgtggccgacgccgacccggctcagcggaagatcttcgtacacggcctcggctgggacaccacaaccgacaccctcaccgaggccttcggcccatacggcgagatagaggatctcaaggtcgtcaccgaccgcaacacgggcaagtgcaaggggtacgggttcatcctcttccgtcaccgctccggcgcccgagctgcactacgcgagccccagaagaagattggtaaccgcagcaccgcctgccagctcgcctctgttggccctgtccctggtggtgcgcccaacagcgctgcaccagccccggttcaattgcagttgccaccagtgtcagagtatacacaacgaaagatatttgtcagcaatgttggtgcagatatcgatccgcagaaattgcttcagttctttgcgaggtttggtgagatcgaggaaggcccgcttggtcttgacaaggtcactgggaaacccaagggatttgctctttttgtctacaagaccattgaaagtgccaagaaggctcttgaggagccacataagcattttgagggagtgatgctgcactgccagaaggcgattgatggaccaaagccgaacaaattaggaggagctggaggttttttcggtgctggagcttcaagtgggggcaaggggtttgctggttatggagctactagtcattctctgcccggaactgttggtattgtccagccaatgtcacctctggcacctggattggcttcattgcctggtggtatttctgctgccccaggggccaactggtgcattgggtggtagcagcgtgcaggggatgcaaggtggttatatgggtggctacggtggttctggtgggtatgggggtgcttcttcaggaggccctggaagacattacatgggtcattaggatgattataactattttactgtggccagaatgccagatgattctacatgttcctgcttggcacttataaacttgctgttttaagctgtttctggctactcaattatggctgtggtcaaagttttcataggaactttggttccctccacctatcatttcaaaacgaaattaccgtttagattttcaaaagggcatcttatggctgcaagactattgtagaagacttcatgtggatctaaagcattgtggtatttaatgatattactgtttttgtacggttttcaaaaggccaaattaaggcttgcaaaactattgtaaaagacttcctgtgggtttaaagcactgagctatttaatcacaacggttttgtttcatatgtatggtttttaaagaggcgattgtgtggcttgcaaggctgctgcaaaagattgtggatttttactatgtttctgttttcacttttttttacaataaacctgctgctatgtttagacataatttgtactctgcactgacaagtgtcattttagttgccatacttatttgcaggcaatgcaggtctatttgttcaggaaatcaatagtgcttttcagtatatttctaaagaaagttggatatttcttctatttatatataaagtaatacttcctagtttgcaaataatgtgctttatgttgataaaatgttgaagttgagaacgtttgctactccctcagccccaacaatgtgctgttttaggttcgagatgagtccagtgttcttaaggccgcgcataggtgagcaagcaaacaggtcaaccgccttagctcctaggtgagcaaggcggcaagatttctccgagcgtctggacacgcctaggcaacgccttaaaaaccctggacgagtcaaactttctttaaatataagtttagtgtgaaaatatatttcataacgagtctaatgatatttatttggtatcataaatgtttgtaatttttcatatagatttgttcgaaattctttttgcgatagggggagtagttcaagtaaaatatttgtttatggtatataatggtattgaaggagaggctactaagtatctgtctatttttcgttgctacttgctagggccttttgttgctggaatgatcttggtagcttatctttctcgtatctgaccgtactattgattacatatgtggcagatgcacactgctgtatactatctgactctctacattatcggcaaagaaaacctctgttttgttatgaatctcattgctttttagatgtgaatgttcattgctcatttgacatactcctttgcatgggcacactagattatgatagtgccacttcttgaatcaaaagcttttgaattttttggtagaatttactcagataaactatctactgtgttgcccgagaactaatagtaatgtttctaaagctttgcgttttctttttatgaccaccaaaactattttgttcttattcctttattgataacttacagcaatttatgcttaggtatagattgtgacattgtcatgttgccatttcattgttgcgtgtattcttgaatggtatacataattgttactttctgtaatataatatctttggaatatgattcgacattgttatctgtccgggaaatcaatagtgcttttcagtgtattgtgaccacagtttaacccttgtttaaaagcagttaaagaaagagttctggtgctggttgatagaattcatggccctgaagtggcagattaccatggtgcatggacgacccaatatcactttatttccttgttttaatgtcacggcaggccggttgaggtctcaagtttgcctttgagacaggtaagtacgaaatgcatacattagcaggtccaagtgatgcaaatagcagcagaaagctctcgagcttgttcgcttatgccgaaaaagggtatctacttattttgtctgtataaattagtataaattacagctgcaagcctgcaacagtctgaacagctggcttatagccgcacgtcatctgtaagagcaagtttaataatagagcctattattggctctaacttcttaccgtgtcatatagagccagcaataaacacactcatgtagtaaaactggctttaagattgactcttagatgaatttcttgtctcttatctcttttatccttttgtcttgaaacctgtgtagcacctaactcttgcatgagagctcactacctctattttttgatgtctctcttccacgtaagcaaaaatgacatgtaattagacttgagtccattattgtacttgctctaatttgtgaattcgtgagatgggagagttgcagtgatgtgctgtctcttcgtctcacggtgttgcccgcaaggagagagtggcaaggtagtgctgagacgtgggagcctgcgccctgcttcggaggctgtgcttcagcttcaaacgggtacacggaccgtaatcaaatgatgtatatgttgaattaggaaa

SEQ ID NO: 29723 - DNA, 3926 bp, Zea Mays
acattattcaggtccaggtcacatgatgcacagacagcccgtccgacgccgcgttagctacttgcctacttcagctatatgaaacggcaaaagtcttcccctcgttccccaatctcctctccatcgaaaccctagcacgacgcaattcccgtcttcccacgccgtatcgccgttgctatgggcaagaagcggaagctcgagcccaaatcggcggcagggttcacgccggttaaggcctccccgaccaccaggtctgccaccgctaaggccgctggtctatccgaggtcctcgcccccgtcgaggctacgatggagaagctgccgcagggggcaggcggcgaggatgtagaggaaatcgaggaggtggaggtcgaggaggaagtggaagtggaagaggaagaagaaggcgagagcgaccaggcttcgatccaggcgctgctggattcgttccccaaggaccagctcgtcgagctgttacgcgacgctgccatcgctcacggcgacgtgctaaccaccatccggcgcgtggccgacgccgacccggctcagcggaagatcttcgtacacggcctcggctgggacaccacaaccgacaccctcaccgaggccttcggcccatacggcgagatagaggatctcaaggtcgtcaccgaccgcaacacgggcaagtgcaaggggtacgggttcatcctcttccgtcaccgctccggcgcccgagctgcactacgcgagccccagaagaagattggtaaccgcagcaccgcctgccagctcgcctctgttggccctgtccctggtggtgcgcccaacagcgctgcaccagccccggttcaattgcagttgccaccagtgtcagagtatacacaacgaaagatatttgtcagcaatgttggtgcagatatcgatccgcagaaattgcttcagttctttgcgaggtttggtgagatcgaggaaggcccgcttggtcttgacaaggtcactgggaaacccaagggatttgctctttttgtctacaagaccattgaaagtgccaagaaggctcttgaggagccacataagcattttgagggagtgatgctgcactgccagaaggcgattgatggaccaaagccgaacaaattaggaggagctggaggttttttcggtgctggagcttcaagtgggggcaaggggtttgctggttatggagctactagtcattctctgcccggaactgttggtattgtccagccaatgtcacctctggcacctggattggcttcattgcctggtggtatttctgctgccccaggggccaactggtgcattgggtggtagcagcgtgcaggggatgcaaggtggttatatgggtggctacggtggttctggtgggtatgggggtgcttcttcaggaggccctggaagacattacatgggtcattaggtaagatttggcaggatgattataactattttactgtggccagaatgccagatgattctacatgttcctgcttggcacttataaacttgctgttttaagctgtttctggctactcaattatggctgtggtcaaagttttcataggaactttggttccctccacctatcatttcaaaacgaaattaccgtttagattttcaaaagggcatcttatggctgcaagactattgtagaagacttcatgtggatctaaagcattgtggtatttaatgatattactgtttttgtacggttttcaaaaggccaaattaaggcttgcaaaactattgtaaaagacttcctgtgggtttaaagcactgagctatttaatcacaacggttttgtttcatatgtatggtttttaaagaggcgattgtgtggcttgcaaggctgctgcaaaagattgtggatttttactatgtttctgttttcacttttttttacaataaacctgctgctatgtttagacataatttgtactctgcactgacaagtgtcattttagttgccatacttatttgcaggcaatgcaggtctatttgttcaggaaatcaatagtgcttttcagtatatttctaaagaaagttggatatttcttctatttatatataaagtaatacttcctagtttgcaaataatgtgctttatgttgataaaatgttgaagttgagaacgtttgctactccctcagccccaacaatgtgctgttttaggttcgagatgagtccagtgttcttaaggccgcgcataggtgagcaagcaaacaggtcaaccgccttagctcctaggtgagcaaggcggcaagatttctccgagcgtctggacacgcctaggcaacgccttaaaaaccctggacgagtcaaactttctttaaatataagtttagtgtgaaaatatatttcataacgagtctaatgatatttatttggtatcataaatgtttgtaatttttcatatagatttgttcgaaattctttttgcgatagggggagtagttcaagtaaaatatttgtttatggtatataatggtattgaaggagaggctactaagtatctgtctatttttcgttgctacttgctagggccttttgttgctggaatgatcttggtagcttatctttctcgtatctgaccgtactattgattacatatgtggcagatgcacactgctgtatactatctgactctctacattatcggcaaagaaaacctctgttttgttatgaatctcattgctttttagatgtgaatgttcattgctcatttgacatactcctttgcatgggcacactagattatgatagtgccacttcttgaatcaaaagcttttgaattttttggtagaatttactcagataaactatctactgtgttgcccgagaactaatagtaatgtttctaaagctttgcgttttctttttatgaccaccaaaactattttgttcttattcctttattgataacttacagcaatttatgcttaggtatagattgtgacattgtcatgttgccatttcattgttgcgtgtattcttgaatggtatacataattgttactttctgtaatataatatctttggaatatgattcgacattgttatctgtccgggaaatcaatagtgcttttcagtgtattgtgaccacagtttaacccttgtttaaaagcagttaaagaaagagttctggtgctggttgatagaattcatggccctgaagtggcagattaccatggtgcatggacgacccaatatcactttatttccttgttttaatgtcacggcaggccggttgaggtctcaagtttgcctttgagacaggtaagtacgaaatgcatacattagcaggtccaagtgatgcaaatagcagcagaaagctctcgagcttgttcgcttatgccgaaaaagggtatctacttattttgtctgtataaattagtataaattacagctgcaagcctgcaacagtctgaacagctggcttatagccgcacgtcatctgtaagagcaagtttaataatagagcctattattggctctaacttcttaccgtgtcatatagagccagcaataaacacactcatgtagtaaaactggctttaagattgactcttagatgaatttcttgtctcttatctcttttatccttttgtcttgaaacctgtgtagcacctaactcttgcatgagagctcactacctctattttttgatgtctctcttccacgtaagcaaaaatgacatgtaattagacttgagtccattattgtacttgctctaatttgtgaattcgtgagatgggagagttgcagtgatgtgctgtctcttcgtctcacggtgttgcccgcaaggagagagtggcaaggtagtgctgagacgtgggagcctgcgccctgcttcggaggctgtgcttcagcttcaaacgggtacacggaccgtaatcaaatgatgtatatgttgaattaggaaa

SEQ ID NO: 29724 - DNA, 868 bp, Zea Mays
gaacagctgtcggaagctgtctttccatgatctaggagccgtcgccgtcgagagctgaggcgaagcaacatagaagacgaggggggagtgcgactcctcgtgacttgtgagggagagaagccatggcggagatggagccgagcatcgggaaccatatggccgaagaccaaccgactccggccgcctccactgtcgaggaggccgctatggatgcagataccagcggcgagcggcgtagcgctgccgcgttggtgggcctgctccgcgggttcctcgccgtgcaacagcgccgggccgaggcctactccacgctacgaaggggtttttctgagtatatggcttatggaggtgaattggcctatcaacaactgtgtggcaatattacagcggagttcaatgattgctcaaaacaagtccttgaaataatttccctgctctcaatgccagaatttagtcgcagcgatcttgccgatttactgaagggtgttcaagcacatgagaaagagaagttgcatttggtaagttagcttgggctcttgggcgtgttgtattgccatatgggccatgaaatagtgcttccttaaaataactagattttgtttaagagcggaaacttattccgttctttcatatttatgaactgtaatgatctattgatatatgttttgacatgtcatttaacctaagaatactgtgattggaggaattattagcacatcggagatcgtagtttcatttttcattgttcatatcaggccatgtttttattaaattctgaaggacaccaagctttacctctttcacaatacattattacacacttgaatttgtataaaatgatttcaacttactctaatttcccctgcta

SEQ ID NO: 29725 - DNA, 1096 bp, Zea Mays
gaacagctgtcggaagctgtctttccatgatctaggagccgtcgccgtcgagagctgaggcgaagcaacatagaagacgaggggggagtgcgactcctcgtgacttgtgagggagagaagccatggcggagatggagccgagcatcgggaaccatatggccgaagaccaaccgactccggccgcctccactgtcgaggaggccgctatggatgcagataccagcggcgagcggcgtagcgctgccgcgttggtgggcctgctccgcgggttcctcgccgtgcaacagcgccgggccgaggcctactccacgctacgaaggggtttttctgagtatatggcttatggaggtgaattggcctatcaacaactgtgtggcaatattacagcggagttcaatgattgctcaaaacaaaatttagtcgcagcgatcttgccgatttactgaagggtgttcaagcacatgagaaagagaagttgcatttgacagctaagattcaggtgctgaagaaagccggcaggccttcagagcgcctggtgaaccacgcagactgcaggtcgcgcagcatggcccagcacgtgtgcgtgcacgtcaaggagatcacggaggccgccggcaccgaggacgccgaggcggatgcggagtatgacgcggccctcaaggaggccatacagggcgtgcaggttgccgtgagcagcataaacgaacacatggaggaggtgcgctacgagattgacggactcgaggcagagacgatcggtagcaagtggagcgaagtcgaggaagcgttccctggtaccctgtctataaaatagatagatgagatgagatgagatgagatgttgagcgtggaagactgaagaagaatcacgaacagagagattcgatgtgaatttttgggtactgttcagttcagggtacccgtgttattatacgtcctccaatccaaaatttagttctttctggtcttttttccctccacgtttgaatgataatgaatacagagctacatataaattatattaatagtttaattaatgaatgtatatttagtctaaaataaaatatattttgggatggagagagtattatttttt

SEQ ID NO: 29726 - DNA, 1895 bp, Zea Mays
gacaaaaattcccgatgcagagaccagagaccggacgggagaaaaagttcgcctgcgtgtccacgacacacgcccgctccagaacggtatcacatgcgggtttgattatgcgttaagcacgactataatccctaccgagctatcctatccctatcccctcttttgctttccttcccccgcctgctcaattcttctcgtgctgtcacccctttcttcaatcgcctcccgattcccgcggggctcgcagatcccggaaggacaccccgccgcccccgatgagccgccaccgggtcgagacctgcgactcgtggcggcccccgcggaagaaccacgccggtgcgccgccgctcctccgcgcggggcctcggctcctcgccttcgcctcgctctccgtccgcgacggcggggactccgccgcggccgtcgccaaggcggttgaggaggcggttgtcgtacgatccgatgaggtgaaggaggcggtggccggggaggagaggaagaagacgaagtcgacggagcgcaggctgccccccgcggcgcagctggtgagccatccgctcgcgctgctggcgctagtacccaacagcgccgcgatctttgccgcgggggccgccgcgggcactgtagccaagaccgtcaccgcgcccctcgaccgcgtcaagatcctcatgcagacgcatagcgtgcgggtggcgggagagagtgccaagaagggtgttggatttctcgaggctatggcagacattggaaagaaggatgggcttaagggttactggaaaggaaaccttccacaggtcattcgcataattccttacagtgcagtgcaactcttctcgtatgaagtttacaagaaaattttccggagaaaggatggagagctttctgtatttgggagacttgccgctggtgcttgcgcgggcatgacatctacacttgtaacttacccactggatgttctccggctcaggctagcagttcaatctggacacagcactttatctcaggatgaagaaatctgtaccagagaagtacaagaatagaccagaaacatctctggcaaccgctcttctttcagcaacatttgcaactttgatgtgttatccgctggacactgttaggagacagatgcagatgaaaggcacaccatacaatactgtttttgatgctattccaggcattgtggagcgtgacggtctaactggtctttatagaggttttgtgccaaatgcgttaaaaaatctaccaaatagcagcattaaactgaccgtgtttgacacggtgaagacactgatagctactgggcagaaggagatggacaaattaattcaagaaaatgaggagaaaagaagctaggaaaagagccttggtcaatcttgaaggctttggtagaaagcatgcctcgttgcacactccatatcgctatgtttcctcgtttgctggtgacatattttaggatctaggcagcgcatctttctgttccttttcaaatagatctagtttccagtgctttccgtagcatccacattcatagagatagaggttcgcattgagttgatctctttatctagtgtcggtagcattcccctacagatcttacctattctaatagaggatagtgtatcaatgtgaccgccccagattccttaaatgtaattatacataatagccagaacaatcaaatgtcatggagcacaggagcatgttctccttgtcaatgaattagcatctttgatttaaagaacatattgggtgtctcgtacatcacaaaccgaaggccagatttgctttggaatggttccatccactttagacttcggctagcatgaacttttggttgtgaagccagtttgtattggaggatgcaacaaacgaaaattgttgcttaggggaagaat

SEQ ID NO: 29727 - DNA, 1788 bp, Zea Mays
cacatgcgggtttgattatgcgttaagcacgactataatccctaccgagctatcctatccctatcccctcttttgctttccttcccccgcctgctcaattcttctcgtgctgtcacccctttcttcaatcgcctcccgattcccgcggggctcgcagatcccggaaggacaccccgccgcccccgatgagccgccaccgggtcgagacctgcgactcgtggcggcccccgcggaagaaccacgccggtgcgccgccgctcctccgcgcggggcctcggctcctcgccttcgcctcgctctccgtccgcgacggcggggactccgccgcggccgtcgccaaggcggttgaggaggcggttgtcgtacgatccgatgaggtgaaggaggcggtggccggggaggagaggaagaagacgaagtcgacggagcgcaggctgccccccgcggcgcagctggtgagccatccgctcgcgctgctggcgctagtacccaacagcgccgcgatctttgccgcgggggccgccgcgggcactgtagccaagaccgtcaccgcgcccctcgaccgcgtcaagatcctcatgcagacgcatagcgtgcgggtggcgggagagagtgccaagaagggtgttggatttctcgaggctatggcagacattggaaagaaggatgggcttaagggttactggaaaggaaaccttccacaggtcattcgcataattccttacagtgcagtgcaactcttctcgtatgaagtttacaagaaaattttccggagaaaggatggagagctttctgtatttgggagacttgccgctggtgcttgcgcgggtaacttacccactggatgttctccggctcaggctagcagttcaatctggacacagcactttatctcaggatgaagaaatctgtaccagagaagtacaagaatagaccagaaacatctctggcaaccgctcttctttcagcaacatttgcaactttgatgtgttatccgctggacactgttaggagacagatgcagatgaaaggcacaccatacaatactgtttttgatgctattccaggcattgtggagcgtgacggtctaactggtctttatagaggttttgtgccaaatgcgttaaaaaatctaccaaatagcagcattaaactgaccgtgtttgacacggtgaagacactgatagctactgggcagaaggagatggacaaattaattcaagaaaatgaggagaaaagaagctaggaaaagagccttggtcaatcttgaaggctttggtagaaagcatgcctcgttgcacactccatatcgctatgtttcctcgtttgctggtgacatattttaggatctaggcagcgcatctttctgttccttttcaaatagatctagtttccagtgctttccgtagcatccacattcatagagatagaggttcgcattgagttgatctctttatctagtgtcggtagcattcccctacagatcttacctattctaatagaggatagtgtatcaatgtgaccgccccagattccttaaatgtaattatacataatagccagaacaatcaaatgtcatggagcacaggagcatgttctccttgtcaatgaattagcatctttgatttaaagaacatattgggtgtctcgtacatcacaaaccgaaggccagatttgctttggaatggttccatccactttagacttcggctagcatgaacttttggttgtgaagccagtttgtattggaggatgcaacaaacgaaaattgttgcttaggggaagaat

SEQ ID NO: 29728 - DNA, 1855 bp, Zea Mays
gttaagcacgactataatccctaccgagctatcctatccctatcccctcttttgctttccttcccccgcctgctcaattcttctcgtgctgtcacccctttcttcaatcgcctcccgattcccgcggggctcgcagatcccggaaggacaccccgccgcccccgatgagccgccaccgggtcgagacctgcgactcgtggcggcccccgcggaagaaccacgccggtgcgccgccgctcctccgcgcggggcctcggctcctcgccttcgcctcgctctccgtccgcgacggcggggactccgccgcggccgtcgccaaggcggttgaggaggcggttgtcgtacgatccgatgaggtgaaggaggcggtggccggggaggagaggaagaagacgaagtcgacggagcgcaggctgccccccgcggcgcagctggtgagccatccgctcgcgctgctggcgctagtacccaacagcgccgcgatctttgccgcgggggccgccgcgggcactgtagccaagaccgtcaccgcgcccctcgaccgcgtcaagatcctcatgcagacgcatagcgtgcgggtggcgggagagagtgccaagaagggtgttggatttctcgaggctatggcagacattggaaagaaggatgggcttaagggttactggaaaggaaaccttccacaggtcattcgcataattccttacagtgcagtgcaactcttctcgtatgaagtttacaagaaaattttccggagaaaggatggagagctttctgtatttgggagacttgccgctggtgcttgcgcgggtaacttacccactggatgttctccggctcaggctagcagttcaatctggacacagcactttatctcagaagggctggcctccttctatggaggcttgggtccatctcttgtagcaattgcaccttacattgctgtgaacttctgtgtttttgacctgatgaagaaatctgtaccagagaagtacaagaatagaccagaaacatctctggcaaccgctcttctttcagcaacatttgcaactttgatgtgttatccgctggacactgttaggagacagatgcagatgaaaggcacaccatacaatactgtttttgatgctattccaggcattgtggagcgtgacggtctaactggtctttatagaggttttgtgccaaatgcgttaaaaaatctaccaaatagcagcattaaactgaccgtgtttgacacggtgaagacactgatagctactgggcagaaggagatggacaaattaattcaagaaaatgaggagaaaagaagctaggaaaagagccttggtcaatcttgaaggctttggtagaaagcatgcctcgttgcacactccatatcgctatgtttcctcgtttgctggtgacatattttaggatctaggcagcgcatctttctgttccttttcaaatagatctagtttccagtgctttccgtagcatccacattcatagagatagaggttcgcattgagttgatctctttatctagtgtcggtagcattcccctacagatcttacctattctaatagaggatagtgtatcaatgtgaccgccccagattccttaaatgtaattatacataatagccagaacaatcaaatgtcatggagcacaggagcatgttctccttgtcaatgaattagcatctttgatttaaagaacatattgggtgtctcgtacatcacaaaccgaaggccagatttgctttggaatggttccatccactttagacttcggctagcatgaacttttggttgtgaagccagtttgtattggaggatgcaacaaacgaaaattgttgcttaggggaagaat

SEQ ID NO: 29729 - DNA, 1762 bp, Zea Mays
taagcacgactataatccctaccgagctatcctatccctatcccctcttttgctttccttcccccgcctgctcaattcttctcgtgctgtcacccctttcttcaatcgcctcccgattcccgcggggctcgcagatcccggaaggacaccccgccgcccccgatgagccgccaccgggtcgagacctgcgactcgtggcggcccccgcggaagaaccacgccggtgcgccgccgctcctccgcgcggggcctcggctcctcgccttcgcctcgctctccgtccgcgacggcggggactccgccgcggccgtcgccaaggcggttgaggaggcggttgtcgtacgatccgatgaggtgaaggaggcggtggccggggaggagaggaagaagacgaagtcgacggagcgcaggctgccccccgcggcgcagctggtgagccatccgctcgcgctgctggcgctagtacccaacagcgccgcgatctttgccgcgggggccgccgcgggcactgtagccaagaccgtcaccgcgcccctcgaccgcgtcaagatcctcatgcagacgcatagcgtgcgggtggcgggagagagtgccaagaagggtgttggatttctcgaggctatggcagacattggaaagaaggatgggcttaagggttactggaaaggaaaccttccacaggtcattcgcataattccttacagtgcagtgcaactcttctcgtatgaagtttacaagaaaattttccggagaaaggatggagagctttctgtatttgggagacttgccgctggtgcttgcgcgggcatgacatctacacttgtaacttacccactggatgttctccggctcaggctagcagttcaatctggacacagcactttatctcagagaagtacaagaatagaccagaaacatctctggcaaccgctcttctttcagcaacatttgcaactttgatgtgttatccgctggacactgttaggagacagatgcagatgaaaggcacaccatacaatactgtttttgatgctattccaggcattgtggagcgtgacggtctaactggtctttatagaggttttgtgccaaatgcgttaaaaaatctaccaaatagcagcattaaactgaccgtgtttgacacggtgaagacactgatagctactgggcagaaggagatggacaaattaattcaagaaaatgaggagaaaagaagctaggaaaagagccttggtcaatcttgaaggctttggtagaaagcatgcctcgttgcacactccatatcgctatgtttcctcgtttgctggtgacatattttaggatctaggcagcgcatctttctgttccttttcaaatagatctagtttccagtgctttccgtagcatccacattcatagagatagaggttcgcattgagttgatctctttatctagtgtcggtagcattcccctacagatcttacctattctaatagaggatagtgtatcaatgtgaccgccccagattccttaaatgtaattatacataatagccagaacaatcaaatgtcatggagcacaggagcatgttctccttgtcaatgaattagcatctttgatttaaagaacatattgggtgtctcgtacatcacaaaccgaaggccagatttgctttggaatggttccatccactttagacttcggctagcatgaacttttggttgtgaagccagtttgtattggaggatgcaacaaacgaaaattgttgcttaggggaagaat

SEQ ID NO: 29730 - DNA, 1346 bp, Zea Mays
gttctcggagatcggggtccggccactgcgaattcccggttgttgtcgggttggggtttgggcgccgtgtttggcggttatctagtggagttgcctccttcaagctactctaatgtcctttctattcaagtctagcaatggcggcaccactgaaaaaatcccatccccagaagaacagcgagaaaaaataaatgaattacgcaaggagcttggtgaacactcatcagcagccattaaagacttcctttcagatgcctcgttagcgagatttcttcgagcaaggaactggaatgtgcagaaagctagtaaaatgatgaaagcagctgtgaagtggcggcttgcattcaaacctgaaaacatctgttgggatgatattgcagaggaagcagagactggaaagatatatagagcggattataaggacaaacatggcagaactgttcttgtattgaggcctggcttagagaacactacctcagcaataggacagatcaaatatctagtctactctctggagaaagcaattatgaacctgacggaagatcaagagaagatggtatggctgacagatttccagtgctggacattgggaagcacaccactgaaggtgacccgtgagactgtcaatgtcttgcaagactgctatcctgagaggttggggcttgcaatcctttacaaccctcctaggatatttgaatcattctggaagatagtgaagccgttcctagaccatgagacccgcaagaaggtgaagtttgtgtactccaacgacaaggagagccagaagataatggcagaagtctttgacatggaggagctcgactcggcattcgggggaaagaacccagcgacatttgagtacaacagctacgcagagcagatgcaggacgacgacaagaagatgggatcttcgcacggctcagccaatagcttgcttggatcagctgggaaggaggctaatggcgcagactcggacgcctcaagcgaggcctccttctacagtggaactgactctccgacacatgagaacggtgaacacagcatcgcgaagaagaatggttgagctgagttgaactgctttgattgctcaaactgagggagctgactaatgtagttggtcaacataacagttatatctagcttgaacgattgtcaggaccgatggcgatgacagattccaggctggttagatcaccttgtcgggtctaggcggaatgtatatttgctgctcatgatattatagtatgtaagaccataaacggtgagtttgtgatgcgctatatatcttggaataaagttcaacttcttcgttttcttactcgacgtcgcaggagcccaacgttttt

SEQ ID NO: 29731 - DNA, 1343 bp, Zea Mays
gtcaacttgacctcgacctggcggtgtgaagcgcgtccagatccgatcctacctcgtgagagggccaacagcttttatctagtggagttgcctccttcaagctactctaatgtcctttctattcaagtctagcaatggcggcaccactgaaaaaatcccatccccagaagaacagcgagaaaaaataaatgaattacgcaaggagcttggtgaacactcatcagcagccattaaagacttcctttcagatgcctcgttagcgagatttcttcgagcaaggaactggaatgtgcagaaagctagtaaaatgatgaaagcagctgtgaagtggcggcttgcattcaaacctgaaaacatctgttgggatgatattgcagaggaagcagagactggaaagatatatagagcggattataaggacaaacatggcagaactgttcttgtattgaggcctggcttagagaacactacctcagcaataggacagatcaaatatctagtctactctctggagaaagcaattatgaacctgacggaagatcaagagaagatggtatggctgacagatttccagtgctggacattgggaagcacaccactgaaggtgacccgtgagactgtcaatgtcttgcaagactgctatcctgagaggttggggcttgcaatcctttacaaccctcctaggatatttgaatcattctggaagatagtgaagccgttcctagaccatgagacccgcaagaaggtgaagtttgtgtactccaacgacaaggagagccagaagataatggcagaagtctttgacatggaggagctcgactcggcattcgggggaaagaacccagcgacatttgagtacaacagctacgcagagcagatgcaggacgacgacaagaagatgggatcttcgcacggctcagccaatagcttgcttggatcagctgggaaggaggctaatggcgcagactcggacgcctcaagcgaggcctccttctacagtggaactgactctccgacacatgagaacggtgaacacagcatcgcgaagaagaatggttgagctgagttgaactgctttgattgctcaaactgagggagctgactaatgtagttggtcaacataacagttatatctagcttgaacgattgtcaggaccgatggcgatgacagattccaggctggttagatcaccttgtcgggtctaggcggaatgtatatttgctgctcatgatattatagtatgtaagaccataaacggtgagtttgtgatgcgctatatatcttggaataaagttcaacttcttcgttttcttactcgacgtcgcaggagcccaacgttttt

SEQ ID NO: 29732 - DNA, 3911 bp, Zea Mays
tccaactccctgcccgccaggccagcggccatgcccctccccggcggcaacggcgagccctctccccctccaccgccgttcccctcactcatcaaactcggctgcgcggtcaccgctcgccacgtcgaccgcctcctgacagtgctcctccgccgccgcaggcaccgcctcctcgccgcgctcgcctcccaggcgcttgccaacggcatcgcccctactccgcgcacgcacctccttgccgcctccgccctgctcgactccgcgcggccgcgtgacgccgcacagcgcctcgcgcttgcctccagcacctccactcgccacctctgggatgcactgctccgccgggcctgtgccagaggcggcgacccgcgccacgctctggagctactctccgctgccattgaagaccacggcatggtgctgtcgccgtccacgtattgcgggatggtggtgttgctgtgcgcccacggggaggtggattgcgcgctcagggtgttcgacataatgaccaatagggggtgtcaggtagacgatcgcatttgcagctcgatcgtttctgggttctccagaaccggaaaggccggagcagggctgcatttctacgacaaggtgaagcgtcagttcagtggatttgatccaggccttgtgacattgacatcagtcgtccatgctcttgggttggaggggagaactggtgagatggcagagcttatgcgggagatggagtgtaaaggcatgaatgctgatgctgtgttttacggcagcatggttcatggatacatgagtcgtgggttcttgatggaaggtcttcgggagcatcgatccatgctagggaaggggatcacagctgatgtaattaactatactactgttattgatggactctgcagagaaggtagtgtggagaaagtaacaggtttcttggatgagatggtgcgagtggatgctaagccgaatttgattacttatacatcactggttggtggcttttgtaagagagacaggtgggaagatgctttctctatcgtgaggaaactggaacaaacaggcatggtggtggacgagtatgtatattcgattttgattgacagtttgtgcaaaatggacgatttagacagggctttctctttactcacagagatggagaataagggaataaaagctagcatcataacatacaacgcgataataaacggtttgtgtaaagctggtcactgtgaaaaggctgttgaaatttctgaaggtgttgctgctgataatttcacatatagcacactgttacatggttacattaacagaggtgacataactggtgttatggcaatgaaggataggctcgaaggtagtggtatttctatggatgttgtcacatgcaatgttcttatcaaagcattgtttatgattaacaaagtgaatgatgcctggagcttgtttcataaaatgcctgagattggcttaaggcctaatactatcacctaccatacaatcatagacaaattgtgtaaagctgagcaagttgacaaggcactggaattgtttgatgaatacaaaaaagatgcaggattctccagtgcagttgttcatgagtgcctgattagagcactgtgtaatggaggaaaagttaacatggccgaccaaatattttatgatcttgttcagaaaaaaataaggcctaatttctttaactgcaggaagttgattcatgcacacttcaaaggacacggtgaacatagtgtgctggatttcatttgtaaggttggtgaactagatattgacttattttcatctgtttgcaattatgcttctgcattcttaagcaagagaaattgttgtcaagcagcaatggatgcttacaagttactcagaatacaagccattgctgtaagtagtaaaacatgctgcaagctgctcaagagtttacaccgaaatggaaatgaagaggtcatacaaccattgctatgtgatttcattaaaatccatggcctgcttgatctgacaatgataaatatgctgtcctgttatctcagcgaaaaagatattagcaaaactatttggttttctaattacatggacaaaggtagtgttcctgtcagtgttctgagaggagctgtctttgctctaaagaagcaaggtgaagttctggacgcatgtaactttttgaaggtagctgaacaaagtgggttttcagtagatctaactatgtattccatagtggtggatggcctttgtaagggtgggtatcttgaaaaagcgctagacctttgtgaaggcatgaaaaaagagggatttcaacctaacattgtcattcataactcagttctcagtggtttgtgtcatcaaggatgccttactgaagctttcaggctctttgactacttagaaaacagcaagatgcttccaacaataatcacctatactattcttataggtgctttgtgtagagaaggtttattagatgatgcagatcagttattccaaaaaatgtccaccaaaggtatcaaacccactacccgtgtttacaacttgctgataagtggtcattgtaactttggattaactggaaaggcccttgagcttatgtctcatatggaggaactctttatacttccagattgttttacacttggtgcaattatcaatggactttgtctgaaaggtgagactgaagctgcattaagattctttaatgaataccgccataggaatatagatcctgattttgttggtttcatgagccttatcaaaggactctatgcaaaaggaaggatggaagaatccaggggcatcttgagggagatgtttcagtgcaaagaagtcacggagttaataaacagtgttggagataagattcaggcagagtcccttgttgatctcctatcttctgcatgtgatcaggggaggattgatgagattgtaacaatcctaaatgaagtgggactcatgcttttatcctcttcaaattctatcagctataatgcgcttgcgcatataaaaaaggtacagaaaactgaggatgcttatggttccatgtcaaattcaggacaagcaagtccagtcgcttatgatatttcaagcaatagtctttgtaggagttctgatggaaaagttcaatccatgatagatggagatgatagtttatcaaaatcgagtggtgacactgatattgactaccgaaatttgcttgggaagtctttcaatgatgattttgagtcatattatgctggtattgcttcactttgctcgaaaggggagcttcttaaggccaacaaggcagttgaagcaatgattcagaattgtggttaaatttggttactgctcaactttttagggaaacctttcctgctgcagtatcaagattgcaaacatattaactcacaccatatcaaaacatatcccactttccacaggagtcgagagagcgtctgctggttgacccatggcactgacccatatagttctgaatatttgatggttcaatatggtttaaggttctgaaaggcctggaggttgaggatgcatcttgttagattcaaccactttataaccctcagctgatatcctttgtcttctagacatctaccaggcctctggtgtaaatgttgaactgtaggacatgagtaaaagagagccaatagaccagcgggttttgcaaatgcgttttctttaaatacatgaaagcagaagctgtcctatgatttccctcatatcagtgttcaagaatctgaaacaataccgacatatatgaggctgacacaaccagtatcaagctttatagtttgtcagagcatgtaatataaagaacataacagaggaagcagaattgaaccttgacaaagcagtcatggaaatgcagtctgaccaaagatgccgccatcctggtctccttggccacagcctgtgccacaatggac

SEQ ID NO: 29733 - DNA, 3731 bp, Zea Mays
cccgccaggccagcggccatgcccctccccggcggcaacggcgagccctctccccctccaccgccgttcccctcactcatcaaactcggctgcgcggtcaccgctcgccacgtcgaccgcctcctgacagtgctcctccgccgccgcaggcaccgcctcctcgccgcgctcgcctcccaggcgcttgccaacggcatcgcccctactccgcgcacgcacctccttgccgcctccgccctgctcgactccgcgcggccgcgtgacgccgcacagcgcctcgcgcttgcctccagcacctccactcgccacctctgggatgcactgctccgccgggcctgtgccagaggcggcgacccgcgccacgctctggagctactctccgctgccattgaagaccacggcatggtgctgtcgccgtccacgtattgcgggatggtggtgttgctgtgcgcccacggggaggtggattgcgcgctcagggtgttcgacataatgaccaatagggggtgtcaggtagacgatcgcatttgcagctcgatcgtttctgggttctccagaaccggaaaggccggagcagggctgcatttctacgacaaggtgaagcgtcagttcagtggatttgatccaggccttgtgacattgacatcagtcgtccatgctcttgggttggaggggagaactggtgagatggcagagcttatgcgggagatggagtgtaaaggcatgaatgctgatgctgtgttttacggcagcatggttcatggatacatgagtcgtgggttcttgatggaaggtcttcgggagcatcgatccatgctagggaaggggatcacagctgatgtaattaactatactactgttattgatggactctgcagagaaggtagtgtggagaaagtaacaggtttcttggatgagatggtgcgagtggatgctaagccgaatttgattacttatacatcactggttggtggcttttgtaagagagacaggtgggaagatgctttctctatcgtgaggaaactggaacaaacaggcatggtggtggacgagtatgtatattcgattttgattgacagtttgtgcaaaatggacgatttagacagggctttctctttactcacagagatggagaataagggaataaaagctagcatcataacatacaacgcgataataaacggtttgtgtaaagctggtcactgtgaaaaggctgttgaaatttctgaaggtgttgctgctgataatttcacatatagcacactgttacatggttacattaacagaggtgacataactggtgttatggcaatgaaggataggctcgaaggtagtggtatttctatggatgttgtcacatgcaatgttcttatcaaagcattgtttatgattaacaaagtgaatgatgcctggagcttgtttcataaaatgcctgagattggcttaaggcctaatactatcacctaccatacaatcatagacaaattgtgtaaagctgagcaagttgacaaggcactggaattgtttgatgaatacaaaaaagatgcaggattctccagtgcagttgttcatgagtgcctgattagagcactgtgtaatggaggaaaagttaacatggccgaccaaatattttatgatcttgttcagaaaaaaataaggcctaatttctttaactgcaggaagttgattcatgcacacttcaaaggacacggtgaacatagtgtgctggatttcatttgtaaggttggtgaactagatattgacttattttcatctgtttgcaattatgcttctgcattcttaagcaagagaaattgttgtcaagcagcaatggatgcttacaagttactcagaatacaagccattgctgtaagtagtaaaacatgctgcaagctgctcaagagtttacaccgaaatggaaatgaagaggtcatacaaccattgctatgtgatttcattaaaatccatggcctgcttgatctgacaatgataaatatgctgtcctgttatctcagcgaaaaagatattagcaaaactatttggttttctaattacatggacaaaggtagtgttcctgtcagtgttctgagaggagctgtctttgctctaaagaagcaaggtgaagttctggacgcatgtaactttttgaaggtagctgaacaaagtgggttttcagtagatctaactatgtattccatagtggtggatggcctttgtaagggtgggtatcttgaaaaagcgctagacctttgtgaaggcatgaaaaaagagggatttcaacctaacattgtcattcataactcagttctcagtggtttgtgtcatcaaggatgccttactgaagctttcaggctctttgactacttagaaaacagcaagatgcttccaacaataatcacctatactattcttataggtgctttgtgtagagaaggtttattagatgatgcagatcagttattccaaaaaatgtccaccaaaggtatcaaacccactacccgtgtttacaacttgctgataagtggtcattgtaactttggattaactggaaaggcccttgagcttatgtctcatatggaggaactctttatacttccagattgttttacacttggtgcaattatcaatggactttgtctgaaaggtgagactgaagctgcattaagattctttaatgaataccgccataggaatatagatcctgattttgttggtttcatgagccttatcaaaggactctatgcaaaaggaaggatggaagaatccaggggcatcttgagggagatgtttcagtgcaaagaagtcacggagttaataaacagtgttggagataagattcaggcagagtcccttgttgatctcctatcttctgcatgtgatcaggggaggattgatgagattgtaacaatcctaaatgaagtgggactcatgcttttatcctcttcaaattctatcagctataatgcgcttgcgcatataaaaaagatggagatgatagtttatcaaaatcgagtggtgacactgatattgactaccgaaatttgcttgggaagtctttcaatgatgattttgagtcatattatgctggtattgcttcactttgctcgaaaggggagcttcttaaggccaacaaggcagttgaagcaatgattcagaattgtggttaaatttggttactgctcaactttttagggaaacctttcctgctgcagtatcaagattgcaaacatattaactcgagtcgagagagcgtctgctggttgacccatggcactgacccatatagttctgaatatttgatggttcaatatggtttaaggttctgaaaggcctggaggttgaggatgcatcttgttagattcaaccactttataaccctcagctgatatcctttgtcttctaggcctctggtgtaaatgttgaactgtaggacatgagtaaaagagagccaatagaccagcgggttttgcaaatgcgttttctttaaatacatgaaagcagaagctgtcctatgatttccctcatatcagtgttcaagaatctgaaacaataccgacatatatgaggctgacacaaccagtatcaagctttatagtttgtcagagcatgtaatataaagaacataacagaggaagcagaattgaaccttgacaaagcagtcatggaaatgcagtctgaccaaagatgccgccatcctggtctccttggccacagcctgtgccacaatggac

SEQ ID NO: 29734 - DNA, 3888 bp, Zea Mays
cccgccaggccagcggccatgcccctccccggcggcaacggcgagccctctccccctccaccgccgttcccctcactcatcaaactcggctgcgcggtcaccgctcgccacgtcgaccgcctcctgacagtgctcctccgccgccgcaggcaccgcctcctcgccgcgctcgcctcccaggcgcttgccaacggcatcgcccctactccgcgcacgcacctccttgccgcctccgccctgctcgactccgcgcggccgcgtgacgccgcacagcgcctcgcgcttgcctccagcacctccactcgccacctctgggatgcactgctccgccgggcctgtgccagaggcggcgacccgcgccacgctctggagctactctccgctgccattgaagaccacggcatggtgctgtcgccgtccacgtattgcgggatggtggtgttgctgtgcgcccacggggaggtggattgcgcgctcagggtgttcgacataatgaccaatagggggtgtcaggtagacgatcgcatttgcagctcgatcgtttctgggttctccagaaccggaaaggccggagcagggctgcatttctacgacaaggtgaagcgtcagttcagtggatttgatccaggccttgtgacattgacatcagtcgtccatgctcttgggttggaggggagaactggtgagatggcagagcttatgcgggagatggagtgtaaaggcatgaatgctgatgctgtgttttacggcagcatggttcatggatacatgagtcgtgggttcttgatggaaggtcttcgggagcatcgatccatgctagggaaggggatcacagctgatgtaattaactatactactgttattgatggactctgcagagaaggtagtgtggagaaagtaacaggtttcttggatgagatggtgcgagtggatgctaagccgaatttgattacttatacatcactggttggtggcttttgtaagagagacaggtgggaagatgctttctctatcgtgaggaaactggaacaaacaggcatggtggtggacgagtatgtatattcgattttgattgacagtttgtgcaaaatggacgatttagacagggctttctctttactcacagagatggagaataagggaataaaagctagcatcataacatacaacgcgataataaacggtttgtgtaaagctggtcactgtgaaaaggctgttgaaatttctgaaggtgttgctgctgataatttcacatatagcacactgttacatggttacattaacagaggtgacataactggtgttatggcaatgaaggataggctcgaaggtagtggtatttctatggatgttgtcacatgcaatgttcttatcaaagcattgtttatgattaacaaagtgaatgatgcctggagcttgtttcataaaatgcctgagattggcttaaggcctaatactatcacctaccatacaatcatagacaaattgtgtaaagctgagcaagttgacaaggcactggaattgtttgatgaatacaaaaaagatgcaggattctccagtgcagttgttcatgagtgcctgattagagcactgtgtaatggaggaaaagttaacatggccgaccaaatattttatgatcttgttcagaaaaaaataaggcctaatttctttaactgcaggaagttgattcatgcacacttcaaaggacacggtgaacatagtgtgctggatttcatttgtaaggttggtgaactagatattgacttattttcatctgtttgcaattatgcttctgcattcttaagcaagagaaattgttgtcaagcagcaatggatgcttacaagttactcagaatacaagccattgctgtaagtagtaaaacatgctgcaagctgctcaagagtttacaccgaaatggaaatgaagaggtcatacaaccattgctatgtgatttcattaaaatccatggcctgcttgatctgacaatgataaatatgctgtcctgttatctcagcgaaaaagatattagcaaaactatttggttttctaattacatggacaaaggtagtgttcctgtcagtgttctgagaggagctgtctttgctctaaagaagcaaggtgaagttctggacgcatgtaactttttgaaggtagctgaacaaagtgggttttcagtagatctaactatgtattccatagtggtggatggcctttgtaagggtgggtatcttgaaaaagcgctagacctttgtgaaggcatgaaaaaagagggatttcaacctaacattgtcattcataactcagttctcagtggtttgtgtcatcaaggatgccttactgaagctttcaggctctttgactacttagaaaacagcaagatgcttccaacaataatcacctatactattcttataggtgctttgtgtagagaaggtttattagatgatgcagatcagttattccaaaaaatgtccaccaaaggtatcaaacccactacccgtgtttacaacttgctgataagtggtcattgtaactttggattaactggaaaggcccttgagcttatgtctcatatggaggaactctttatacttccagattgttttacacttggtgcaattatcaatggactttgtctgaaaggtgagactgaagctgcattaagattctttaatgaataccgccataggaatatagatcctgattttgttggtttcatgagccttatcaaaggactctatgcaaaaggaaggatggaagaatccaggggcatcttgagggagatgtttcagtgcaaagaagtcacggagttaataaacagtgttggagataagattcaggcagagtcccttgttgatctcctatcttctgcatgtgatcaggggaggattgatgagattgtaacaatcctaaatgaagtgggactcatgcttttatcctcttcaaattctatcagctataatgcgcttgcgcatataaaaaaggtacagaaaactgaggatgcttatggttccatgtcaaattcaggacaagcaagtccagtcgcttatgatatttcaagcaatagtctttgtaggagttctgatggaaaagttcaatccatgatagatggagatgatagtttatcaaaatcgagtggtgacactgatattgactaccgaaatttgcttgggaagtctttcaatgatgattttgagtcatattatgctggtattgcttcactttgctcgaaaggggagcttcttaaggccaacaaggcagttgaagcaatgattcagaattgtggttaaatttggttactgctcaactttttagggaaacctttcctgctgcagtatcaagattgcaaacatattaactcacaccatatcaaaacatatcccactttccacaggagtcgagagagcgtctgctggttgacccatggcactgacccatatagttctgaatatttgatggttcaatatggtttaaggttctgaaaggcctggaggttgaggatgcatcttgttagattcaaccactttataaccctcagctgatatcctttgtcttctaggcctctggtgtaaatgttgaactgtaggacatgagtaaaagagagccaatagaccagcgggttttgcaaatgcgttttctttaaatacatgaaagcagaagctgtcctatgatttccctcatatcagtgttcaagaatctgaaacaataccgacatatatgaggctgacacaaccagtatcaagctttatagtttgtcagagcatgtaatataaagaacataacagaggaagcagaattgaaccttgacaaagcagtcatggaaatgcagtctgaccaaagatgccgccatcctggtctccttggccacagcctgtgccacaatggac

SEQ ID NO: 29735 - DNA, 3774 bp, Zea Mays
cccgccaggccagcggccatgcccctccccggcggcaacggcgagccctctccccctccaccgccgttcccctcactcatcaaactcggctgcgcggtcaccgctcgccacgtcgaccgcctcctgacagtgctcctccgccgccgcaggcaccgcctcctcgccgcgctcgcctcccaggcgcttgccaacggcatcgcccctactccgcgcacgcacctccttgccgcctccgccctgctcgactccgcgcggccgcgtgacgccgcacagcgcctcgcgcttgcctccagcacctccactcgccacctctgggatgcactgctccgccgggcctgtgccagaggcggcgacccgcgccacgctctggagctactctccgctgccattgaagaccacggcatggtgctgtcgccgtccacgtattgcgggatggtggtgttgctgtgcgcccacggggaggtggattgcgcgctcagggtgttcgacataatgaccaatagggggtgtcaggtagacgatcgcatttgcagctcgatcgtttctgggttctccagaaccggaaaggccggagcagggctgcatttctacgacaaggtgaagcgtcagttcagtggatttgatccaggccttgtgacattgacatcagtcgtccatgctcttgggttggaggggagaactggtgagatggcagagcttatgcgggagatggagtgtaaaggcatgaatgctgatgctgtgttttacggcagcatggttcatggatacatgagtcgtgggttcttgatggaaggtcttcgggagcatcgatccatgctagggaaggggatcacagctgatgtaattaactatactactgttattgatggactctgcagagaaggtagtgtggagaaagtaacaggtttcttggatgagatggtgcgagtggatgctaagccgaatttgattacttatacatcactggttggtggcttttgtaagagagacaggtgggaagatgctttctctatcgtgaggaaactggaacaaacaggcatggtggtggacgagtatgtatattcgattttgattgacagtttgtgcaaaatggacgatttagacagggctttctctttactcacagagatggagaataagggaataaaagctagcatcataacatacaacgcgataataaacggtttgtgtaaagctggtcactgtgaaaaggctgttgaaatttctgaaggtgttgctgctgataatttcacatatagcacactgttacatggttacattaacagaggtgacataactggtgttatggcaatgaaggataggctcgaaggtagtggtatttctatggatgttgtcacatgcaatgttcttatcaaagcattgtttatgattaacaaagtgaatgatgcctggagcttgtttcataaaatgcctgagattggcttaaggcctaatactatcacctaccatacaatcatagacaaattgtgtaaagctgagcaagttgacaaggcactggaattgtttgatgaatacaaaaaagatgcaggattctccagtgcagttgttcatgagtgcctgattagagcactgtgtaatggaggaaaagttaacatggccgaccaaatattttatgatcttgttcagaaaaaaataaggcctaatttctttaactgcaggaagttgattcatgcacacttcaaaggacacggtgaacatagtgtgctggatttcatttgtaaggttggtgaactagatattgacttattttcatctgtttgcaattatgcttctgcattcttaagcaagagaaattgttgtcaagcagcaatggatgcttacaagttactcagaatacaagccattgctgtaagtagtaaaacatgctgcaagctgctcaagagtttacaccgaaatggaaatgaagaggtcatacaaccattgctatgtgatttcattaaaatccatggcctgcttgatctgacaatgataaatatgctgtcctgttatctcagcgaaaaagatattagcaaaactatttggttttctaattacatggacaaaggtagtgttcctgtcagtgttctgagaggagctgtctttgctctaaagaagcaaggtgaagttctggacgcatgtaactttttgaaggtagctgaacaaagtgggttttcagtagatctaactatgtattccatagtggtggatggcctttgtaagggtgggtatcttgaaaaagcgctagacctttgtgaaggcatgaaaaaagagggatttcaacctaacattgtcattcataactcagttctcagtggtttgtgtcatcaaggatgccttactgaagctttcaggctctttgactacttagaaaacagcaagatgcttccaacaataatcacctatactattcttataggtgctttgtgtagagaaggtttattagatgatgcagatcagttattccaaaaaatgtccaccaaaggtatcaaacccactacccgtgtttacaacttgctgataagtggtcattgtaactttggattaactggaaaggcccttgagcttatgtctcatatggaggaactctttatacttccagattgttttacacttggtgcaattatcaatggactttgtctgaaaggtgagactgaagctgcattaagattctttaatgaataccgccataggaatatagatcctgattttgttggtttcatgagccttatcaaaggactctatgcaaaaggaaggatggaagaatccaggggcatcttgagggagatgtttcagtgcaaagaagtcacggagttaataaacagtgttggagataagattcaggcagagtcccttgttgatctcctatcttctgcatgtgatcaggggaggattgatgagattgtaacaatcctaaatgaagtgggactcatgcttttatcctcttcaaattctatcagctataatgcgcttgcgcatataaaaaaggtacagaaaactgaggatgcttatggttccatgtcaaattcaggacaagcaagtccagtcgcttatgatatttcaagcaatagtctttgtaggagttctgatggaaaagttcaatccatgatagatggagatgatagtttatcaaaatcgagtggtgacactgatattgactaccgaaatttgcttgggaagtctttcaatgatgattttgagtcatattatgctggtattgcttcactttgctcgaaaggggagcttcttaaggccaacaaggcagttgaagcaatgattcagaattgtggttaaatttggttactgctcaactttttagggaaacctttcctgctgcagtatcaagattgcaaacatattaactcgttctgaaaggcctggaggttgaggatgcatcttgttagattcaaccactttataaccctcagctgatatcctttgtcttctaggcctctggtgtaaatgttgaactgtaggacatgagtaaaagagagccaatagaccagcgggttttgcaaatgcgttttctttaaatacatgaaagcagaagctgtcctatgatttccctcatatcagtgttcaagaatctgaaacaataccgacatatatgaggctgacacaaccagtatcaagctttatagtttgtcagagcatgtaatataaagaacataacagaggaagcagaattgaaccttgacaaagcagtcatggaaatgcagtctgaccaaagatgccgccatcctggtctccttggccacagcctgtgccacaatggac

SEQ ID NO: 29736 - DNA, 4818 bp, Zea Mays
cccgccaggccagcggccatgcccctccccggcggcaacggcgagccctctccccctccaccgccgttcccctcactcatcaaactcggctgcgcggtcaccgctcgccacgtcgaccgcctcctgacagtgctcctccgccgccgcaggcaccgcctcctcgccgcgctcgcctcccaggcgcttgccaacggcatcgcccctactccgcgcacgcacctccttgccgcctccgccctgctcgactccgcgcggccgcgtgacgccgcacagcgcctcgcgcttgcctccagcacctccactcgccacctctgggatgcactgctccgccgggcctgtgccagaggcggcgacccgcgccacgctctggagctactctccgctgccattgaagaccacggcatggtgctgtcgccgtccacgtattgcgggatggtggtgttgctgtgcgcccacggggaggtggattgcgcgctcagggtgttcgacataatgaccaatagggggtgtcaggtagacgatcgcatttgcagctcgatcgtttctgggttctccagaaccggaaaggccggagcagggctgcatttctacgacaaggtgaagcgtcagttcagtggatttgatccaggccttgtgacattgacatcagtcgtccatgctcttgggttggaggggagaactggtgagatggcagagcttatgcgggagatggagtgtaaaggcatgaatgctgatgctgtgttttacggcagcatggttcatggatacatgagtcgtgggttcttgatggaaggtcttcgggagcatcgatccatgctagggaaggggatcacagctgatgtaattaactatactactgttattgatggactctgcagagaaggtagtgtggagaaagtaacaggtttcttggatgagatggtgcgagtggatgctaagccgaatttgattacttatacatcactggttggtggcttttgtaagagagacaggtgggaagatgctttctctatcgtgaggaaactggaacaaacaggcatggtggtggacgagtatgtatattcgattttgattgacagtttgtgcaaaatggacgatttagacagggctttctctttactcacagagatggagaataagggaataaaagctagcatcataacatacaacgcgataataaacggtttgtgtaaagctggtcactgtgaaaaggctgttgaaatttctgaaggtgttgctgctgataatttcacatatagcacactgttacatggttacattaacagaggtgacataactggtgttatggcaatgaaggataggctcgaaggtagtggtatttctatggatgttgtcacatgcaatgttcttatcaaagcattgtttatgattaacaaagtgaatgatgcctggagcttgtttcataaaatgcctgagattggcttaaggcctaatactatcacctaccatacaatcatagacaaattgtgtaaagctgagcaagttgacaaggcactggaattgtttgatgaatacaaaaaagatgcaggattctccagtgcagttgttcatgagtgcctgattagagcactgtgtaatggaggaaaagttaacatggccgaccaaatattttatgatcttgttcagaaaaaaataaggcctaatttctttaactgcaggaagttgattcatgcacacttcaaaggacacggtgaacatagtgtgctggatttcatttgtaaggttggtgaactagatattgacttattttcatctgtttgcaattatgcttctgcattcttaagcaagagaaattgttgtcaagcagcaatggatgcttacaagttactcagaatacaagccattgctgtaagtagtaaaacatgctgcaagctgctcaagagtttacaccgaaatggaaatgaagaggtcatacaaccattgctatgtgatttcattaaaatccatggcctgcttgatctgacaatgataaatatgctgtcctgttatctcagcgaaaaagatattagcaaaactatttggttttctaattacatggacaaaggtagtgttcctgtcagtgttctgagaggagctgtctttgctctaaagaagcaaggtgaagttctggacgcatgtaactttttgaaggtagctgaacaaagtgggttttcagtagatctaactatgtattccatagtggtggatggcctttgtaagggtgggtatcttgaaaaagcgctagacctttgtgaaggcatgaaaaaagagggatttcaacctaacattgtcattcataactcagttctcagtggtttgtgtcatcaaggatgccttactgaagctttcaggctctttgactacttagaaaacagcaagatgcttccaacaataatcacctatactattcttataggtgctttgtgtagagaaggtttattagatgatgcagatcagttattccaaaaaatgtccaccaaaggtatcaaacccactacccgtgtttacaacttgctgataagtggtcattgtaactttggattaactggaaaggcccttgagcttatgtctcatatggaggaactctttatacttccagattgttttacacttggtgcaattatcaatggactttgtctgaaaggtgagactgaagctgcattaagattctttaatgaataccgccataggaatatagatcctgattttgttggtttcatgagccttatcaaaggactctatgcaaaaggaaggatggaagaatccaggggcatcttgagggagatgtttcagtgcaaagaagtcacggagttaataaacagtgttggagataagattcaggcagagtcccttgttgatctcctatcttctgcatgtgatcaggggaggattgatgagattgtaacaatcctaaatgaagtgggactcatgcttttatcctcttcaaattctatcagctataatgcgcttgcgcatataaaaaaggtacagaaaactgaggatgcttatggttccatgtcaaattcaggacaagcaagtccagtcgcttatgatatttcaagcaatagtctttgtaggagttctgatggaaaagttcaatccatgatagatggagatgatagtttatcaaaatcgagtggtgacactgatattgactaccgaaatttgcttgggaagtctttcaatgatgattttgagtcatattatgctggtattgcttcactttgctcgaaaggggagcttcttaaggccaacaaggcagttgaagcaatgattcagaattgtggttaaatttggttactgctcaactttttagggaaacctttcctgctgcagtatcaagattgcaaacatattaactcgagtcgagagagcgtctgctggttgacccatggcactgacccatatagttctgaatatttgatggttcaatatggtttaaggttctgaaaggcctggaggttgaggatgcatcttgttagattcaaccactttataaccctcagctgatatcctttgtcttctagacatctaccaggcctctggtgtaaatgttgaactgtaggacatgagtaaaagagagccaatagaccagcgggttttgcaaatgcgttttctttaaatacatgaaagcagaagctgtcctatgatttccctcatatcagtgttcaagaatctgaaacaataccgacatatatgaggctgacacaaccagtatcaagctttatagtttgtcagagcatgtaatataaagaacataacagaggaagcagaattgaaccttgacaaagcagtcatggaaatgcagtctgaccaaagatgccgccatcctggtctccttggccacagcctgtgccacaatggactgcacaatctccttcgccttggggcacgaatggtcatagaactgtgggaacaagccaccccatgggtggccaaggacggcactgggaaggagagaagaaacaaggcagagcaagacgagacaacccatggaagttgccatggaagggagggttgtgtcgagcatggattcgtatccctgtctttggggacaaaagtgtatacgaatgatgctacagcggcacgcctttttttcgcacaagcttcatatgtataggaaacctatagccggtcctgcagccaacacacacgcatgcttccgatcaggtcaaacgcggggtgtgatgtaccaacgcccagtacacggcgcgtcgtgatgattcgcgttaggtgcttgtgtttgcatggcctacattcatgtcagcacgaccgggttcctcgaaggaggcgttggttggaaagcttccacactgacatgactactggtacccgtaggagctgcttacatttgttcttctgcacaccacatagtgagtggccgtttcttgaaggaaacatcgatcggcgttggttgctactgttaaataaacataaaggaggccatgctgaaaataaggaagtattgtgagattatttatacgacgtcatatcataacgcagttagcagaggaagaaacagcagagagaagagctcatggagaacgtgagctatagtggcgtacaacagtggttttctatctatgtatatcattggctagacaaatactgtacctctgtattgcgatgtttgtccagtactccagtctacacacccagcaggctagcaggcataaacgtctagcgagtttttacgtgcttggatcattactgtattcatatgccgtatatcattagccaccttggtacatgaacagggataacattatgaaatggggcaggtgctgagcttactgataggtcactatacatttcgac

SEQ ID NO: 29737 - DNA, 421 bp, Zea Mays
caacagacccgcacgtaccgcgtcttcctcgccggtgatctcggcgtccgtgcaacgaccacgaagcgttactggagtataagtacgaggcctctgactccctcctcacctttccctcgattcttccctctgcaccgtcaccagaacgcctgcgtgtggcgagggagattgccgccattgacaatctcgacgcgcgtcgtccacctgggctcgtgaagcaatccgagcgaaaggaggaggatctggcggggtgttaccctcgcaattggtgtgcgcagctagcttggagcccggtaatcgctcgccggagggcgtgcgcaggcctggtccacgaccgaccgtcgaccaaccgggacgagcaagctactgtggaaactgaggttcaacaagtagagatagctgagcaggagctcattgaagg

SEQ ID NO: 29738 - DNA, 1946 bp, Zea Mays
cgcgaaatgcatgccgtttaatttgatccgagcccacagtctctcctcgggcccaccgcgtccgaccggcgatggcaaagaccccgtcgttcgcggtggcggcggtcgccggaggccgcgggccggttcacaaccggacccagctcctcctcctcctcctcgtggccgtcgcagcctccgcatccacagcagggttcctcctccgcggtgccctgcgagacccttgcgacggccgtggggaccccgccgccctcaacaccgccgtcgccagcgggagtcccctcgggttcatgaggtccaagctcgtgctcctcgtctcccatgagctctccctctctggtggtccacttttactgatggaattagcatttcttctgaggcatgttggctcgcaagtggtgtggataacaaaccagagatcacaagaaacaaatgatgtcacatatagcttggagcataggatgttgaaccatggagtgcaggattttgcataaccaaaggccatgacacaccaacaaaagatgttgctaccctcattcaaagccttgatcaggttttaccagctagaggacaggaggcagttgatattgctctaaaagctgatctggttatcttaaacactgctgttgctggcaagtggcttgaccctgttctgaaagatcatgttcctaaagtccttccgaagattttgtggtggatccatgaaatgcgtgggcattactttaaggttgaatatgtcaaacatcttccctttgttgctggagccatgattgattctcatacaacggctgagtattggaatagcaggactagcgatcgcctgaaaatacagatgccacaaacttatgttgttcacctggggaatagtaaagaactaatggaagttgctgaagacaatgtcgcaagaagagtcctacgggaacatattcgtgaatcccttggagtacggagtgaggatctcctgtttgcaataataaacagtgtatcacgaggaaagggacaagacttatttcttcaagcattttatcaggctttgcagctcatccaacacgagaaacttaaagtgcctagaatacatgctgtagttgtgggaagtgatgttaatgctcagaccaaatttgagactcagttacgtgactttgtggtgaagaacacgattcatgaccgtgtccattttgtgaacaagacattggcagtggccccttacttggcagcaattgatgtgcttgttcagaattctcagggccgtggagaatgctttggaaggataacaattgaagcaatggcattcaagttgccagtattgggcacggctgctggagggaccacggagatcgtcctggacggctcgactggccttctgcatcctgctgggaaggagggcgtggcgcctcttgcaaagaacatcgtcagactcgcaagccacgccgagcagagggtctccatgggggaaaagggctatggcagggtgaaggaaatgttcatggagcaccacatggctgagaggatcgcggcggtgttgaaggatgtcctgaggaaatcacaggagcactccaggtcttgagctttgccgtgcccatcagcttgcgctaacatgttgaactagattttacgggctacgcctacgtggttcaggctgtaaactgtagattgcactctgttggtctactttttcacattcatgttttacctattaggccatgtccgattctattccaattcatataggttctatttcaatccatatagattaagagggattgaggagatttcaatcttagtaagtcaaaatctctttcaatccatatcaatcctttccaatccatatggattgaaaataactgaacgaagcctttagggatagaaccgacgctttgagggatgtttggtttgagaaattaaatcatctaaaataagatagtgtattatgggtctattcttcaaat

SEQ ID NO: 29739 - DNA, 1604 bp, Zea Mays
tgtgatcccatcattggcagcttattggaacatgtgacggtgcactttgcgctttgcagtggtgattggtggtccacttttactgatggaattagcatttcttctgaggcatgttggctcgcaagtggtgtggataacaaaccagagatcacaagaaacaaatgatgtcacatatagcttggagcataggatgttgaaccatggagtgcaggttttaccagctagaggacaggaggcagttgatattgctctaaaagctgatctggttatcttaaacactgctgttgctggcaagtggcttgaccctgttctgaaagatcatgttcctaaagtccttccgaagattttgtggtggatccatgaaatgcgtgggcattactttaaggttgaatatgtcaaacatcttccctttgttgctggagccatgattgattctcatacaacggctgagtattggaatagcaggactagcgatcgcctgaaaatacagatgccacaaacttatgttgttcacctggggaatagtaaagaactaatggaagttgctgaagacaatgtcgcaagaagagtcctacgggaacatattcgtgaatcccttggagtacggagtgaggatctcctgtttgcaataataaacagtgtatcacgaggaaagggacaagacttatttcttcaagcattttatcaggctttgcagctcatccaacacgagaaacttaaagtgcctagaatacatgctgtagttgtgggaagtgatgttaatgctcagaccaaatttgagactcagttacgtgactttgtggtgaagaacacgattcatgaccgtgtccattttgtgaacaagacattggcagtggccccttacttggcagcaattgatgtgcttgttcagaattctcagggccgtggagaatgctttggaaggataacaattgaagcaatggcattcaagttgccagtattgggcacggctgctggagggaccacggagatcgtcctggacggctcgactggccttctgcatcctgctgggaaggagggcgtggcgcctcttgcaaagaacatcgtcagactcgcaagccacgccgagcagagggtctccatgggggaaaagggctatggcagggtgaaggaaatgttcatggagcaccacatggctgagaggatcgcggcggtgttgaaggatgtcctgaggaaatcacaggagcactccaggtcttgagctttgccgtgcccatcagcttgcgctaacatgttgaactagattttacgggctacgcctacgtggttcaggctgtaaactgtagattgcactctgttggtctactttttcacattcatgttttacctattaggccatgtccgattctattccaattcatataggttctatttcaatccatatagattaagagggattgaggagatttcaatcttagtaagtcaaaatctctttcaatccatatcaatcctttccaatccatatggattgaaaataactgaacgaagcctttagggatagaaccgacgctttgagggatgtttggtttgagaaattaaatcatctaaaataagatagtgtattatgggtctattcttcaaat

SEQ ID NO: 29740 - DNA, 1472 bp, Zea Mays
tcagatccctcattggatttggggaagatagtgggattgatacctctggcatgatgaatggtggcacttaaattgtcgggttttaccagctagaggacaggaggcagttgatattgctctaaaagctgatctggttatcttaaacactgctgttgctggcaagtggcttgaccctgttctgaaagatcatgttcctaaagtccttccgaagattttgtggtggatccatgaaatgcgtgggcattactttaaggttgaatatgtcaaacatcttccctttgttgctggagccatgattgattctcatacaacggctgagtattggaatagcaggactagcgatcgcctgaaaatacagatgccacaaacttatgttgttcacctggggaatagtaaagaactaatggaagttgctgaagacaatgtcgcaagaagagtcctacgggaacatattcgtgaatcccttggagtacggagtgaggatctcctgtttgcaataataaacagtgtatcacgaggaaagggacaagacttatttcttcaagcattttatcaggctttgcagctcatccaacacgagaaacttaaagtgcctagaatacatgctgtagttgtgggaagtgatgttaatgctcagaccaaatttgagactcagttacgtgactttgtggtgaagaacacgattcatgaccgtgtccattttgtgaacaagacattggcagtggccccttacttggcagcaattgatgtgcttgttcagaattctcagggccgtggagaatgctttggaaggataacaattgaagcaatggcattcaagttgccagtattgggcacggctgctggagggaccacggagatcgtcctggacggctcgactggccttctgcatcctgctgggaaggagggcgtggcgcctcttgcaaagaacatcgtcagactcgcaagccacgccgagcagagggtctccatgggggaaaagggctatggcagggtgaaggaaatgttcatggagcaccacatggctgagaggatcgcggcggtgttgaaggatgtcctgaggaaatcacaggagcactccaggtcttgagctttgccgtgcccatcagcttgcgctaacatgttgaactagattttacgggctacgcctacgtggttcaggctgtaaactgtagattgcactctgttggtctactttttcacattcatgttttacctattaggccatgtccgattctattccaattcatataggttctatttcaatccatatagattaagagggattgaggagatttcaatcttagtaagtcaaaatctctttcaatccatatcaatcctttccaatccatatggattgaaaataactgaacgaagcctttagggatagaaccgacgctttgagggatgtttggtttgagaaattaaatcatctaaaataagatagtgtattatgggtctattcttcaaat

SEQ ID NO: 29741 - DNA, 1427 bp, Zea Mays
aaatagtatttattccagacgagatgcacccagggttttaccagctagaggacaggaggcagttgatattgctctaaaagctgatctggttatcttaaacactgctgttgctggcaagtggcttgaccctgttctgaaagatcatgttcctaaagtccttccgaagattttgtggtggatccatgaaatgcgtgggcattactttaaggttgaatatgtcaaacatcttccctttgttgctggagccatgattgattctcatacaacggctgagtattggaatagcaggactagcgatcgcctgaaaatacagatgccacaaacttatgttgttcacctggggaatagtaaagaactaatggaagttgctgaagacaatgtcgcaagaagagtcctacgggaacatattcgtgaatcccttggagtacggagtgaggatctcctgtttgcaataataaacagtgtatcacgaggaaagggacaagacttatttcttcaagcattttatcaggctttgcagctcatccaacacgagaaacttaaagtgcctagaatacatgctgtagttgtgggaagtgatgttaatgctcagaccaaatttgagactcagttacgtgactttgtggtgaagaacacgattcatgaccgtgtccattttgtgaacaagacattggcagtggccccttacttggcagcaattgatgtgcttgttcagaattctcagggccgtggagaatgctttggaaggataacaattgaagcaatggcattcaagttgccagtattgggcacggctgctggagggaccacggagatcgtcctggacggctcgactggccttctgcatcctgctgggaaggagggcgtggcgcctcttgcaaagaacatcgtcagactcgcaagccacgccgagcagagggtctccatgggggaaaagggctatggcagggtgaaggaaatgttcatggagcaccacatggctgagaggatcgcggcggtgttgaaggatgtcctgaggaaatcacaggagcactccaggtcttgagctttgccgtgcccatcagcttgcgctaacatgttgaactagattttacgggctacgcctacgtggttcaggctgtaaactgtagattgcactctgttggtctactttttcacattcatgttttacctattaggccatgtccgattctattccaattcatataggttctatttcaatccatatagattaagagggattgaggagatttcaatcttagtaagtcaaaatctctttcaatccatatcaatcctttccaatccatatggattgaaaataactgaacgaagcctttagggatagaaccgacgctttgagggatgtttggtttgagaaattaaatcatctaaaataagatagtgtattatgggtctattcttcaaat

SEQ ID NO: 29742 - DNA, 76 bp, Zea Mays
caaaattgctctcatgcttgggttgacatctttttgaatcgtttccatgaaatcagttgacggtcttttcttcgtc

SEQ ID NO: 29743 - DNA, 392 bp, Zea Mays
gccgagctgcacgaacacctttccctcctgtagctggatccgcccatcagtgctcgccgccgtggcctcctgcgatgaccagctcgccactgcactgggcgcgccgaggacctcatcatgcggaggtggagagtaggggctcgatggggatgaggtgcgcgacggggctggagacaccggtggcggcgcagtggcggatcccgccggcggtggtggaggcgcggatccggccagtgggggcagtggaggaggcgcggatccggccggtgggggcagaggtggaggcgcggatcctcccggcggcggtggaggcgcggaccctgccggtggcggtggaggcgcggaccctactggcggggatcgacgcagtggtgcggccctcaacagcatga

SEQ ID NO: 29744 - DNA, 1162 bp, Zea Mays
ctaatctaacttgccactaactcttatcttttctttttttgcttacaataggagatttgctcgtgctgcacaagcgtgtgatgaggatcctgctttgcatctggagttccttgccaattacatcgctgagctatcactactggagtacagtctactctcttaccctccatcactaatagctgcatcggctattttcttggcgagatttatactacagccaacaaagtatccttggaattccacactcgctcattacacacagtacaaaccgtccaaactgagcgaatgtgtaaaggcattgcatcgcctttgcagcgttggttctggtagcaaccttccagcaatcagagaaaagtacagtcaacataagtacaaatttgttgcaaagaagcagtgtccaccgcagatccctactgaattctttcgggacacgacatgctagactagaaacccagaagtgattccagttgcttactggattcttcttgatgtgtcttgaatgcccagtgtagcacagcacaactatgcaagtgctgataacccccaggttgtttcaggtgattacaggggtgtaatcaatgtttgtggtcatgttaggtcattggtgtggtttttcttttcctgcttccagtctttctgtatgtagatcagtgttttcaggcgcttgtaaatccgagttctgtagtagagcacaatatcttgtaagttaactgaagaaatttggtgatcaaccaagttacctacaacttatgttgagctggtgatcaggtttttgcgctagttgaattgtgcttgcatttgtggcctaatgtggttgtcaatataagttgggaacgtatctggtgcaaactaacccctccgtgcaaccgtgaaaacttttaatctgaatcacatgatgaggacgtgcggaggagtgggagagggatttgaaaaagtgtgattagcagcgggcggttaagtataaaattatccacgtccctgcgtcccttgatcaacatcatgtagtttagattacaaatttgaacggttgcacgtatgggttggtttgcactagatacgttcccatataagtttaggtaacttggttgtccagatgtctggcccctacatttttcgatttcaatttgcaagctgtagcgtgttgttatatttacacgttttg

SEQ ID NO: 29745 - DNA, 1193 bp, Zea Mays
ctagcctcgaagcaattcccggtcgcgggtctagtactgtagttctctactctccgcaacttgggagttcaaacccccccgcgcgcgctcggaggtctacaagcttctggatccgtccctggcgccgatggagcggttcgactccaagttccacgagaagtacactgttctcaagaagaggaagctgctagacgaggggctagagcgaaagcgagaggcggagctcaaggagctttacgatgccatgaaagattgggtcagcgaactcaagaaagacaatgcggagctcaacgataagctaatggaaaagcaggatgagctcgagaaggcccgtcaggaattccttgaagatattcttacaagggacactgaaattctgaggctgaagcaactcttagatgagaaagctgaaaaaaacaattctacagcttctgggtttcattgcttaacacctgaagctatcctagaaaattcaacttcaatgtcacctaaaagaaaaacaccactttcccacggcaaggagaagagggtacagttgagtgaaaatgctcctcacagtagccccgcaaaggaatctcaagagctagtttgttctagaagacgtacatgcatcagagggaatgggacaaatgaaattcggagtgcgcatatgcttcgtttgcttcttcaatctttagttcgcatgaaggtctcagtaaatgatgaatcagagatattttcggtttcagtctctcatgaagctagtgcttcaccctcacttggttagaaaaatctgatgaatggtcatataagctctcgtcgttgggcaccctgggaaggatagccgctgattggatgaggcaagacataagattcagcacgaaaatgtgccgtatgttcgttgagcggatatcaagcatcataacaaaaggatgacggcatgctattcgcttcagctagctgtatcagtgtgctaaggctatatggccagcagactgtgcaaaacactgttgcaacagagtggagtttggaatagaggatgggtttgtaaatgggacatccgtaaaaattatctgatgcaatctcattgcgtaaccccgattatggcgtatgttctcgagcgttcgtgggctaggatgatcgctgaggcgtttggctgttttcaaaatgtttttcaaaatacttttgtctatatgatttagttgttttggatt

SEQ ID NO: 29746 - DNA, 1142 bp, Zea Mays
ctagcctcgaagcaattcccggtcgcgggtctagtactgtagttctctactctccgcaacttgggagttcaaacccccccgcgcgcgctcggaggtctacaagcttctggatccgtccctggcgccgatggagcggttcgactccaagttccacgagaagcggagctcaaggagctttacgatgccatgaaagattgggtcagcgaactcaagaaagacaatgcggagctcaacgataagctaatggaaaagcaggatgagctcgagaaggcccgtcaggaattccttgaagatattcttacaagggacactgaaattctgaggctgaagcaactcttagatgagaaagctgaaaaaaacaattctacagcttctgggtttcattgcttaacacctgaagctatcctagaaaattcaacttcaatgtcacctaaaagaaaaacaccactttcccacggcaaggagaagagggtacagttgagtgaaaatgctcctcacagtagccccgcaaaggaatctcaagagctagtttgttctagaagacgtacatgcatcagagggaatgggacaaatgaaattcggagtgcgcatatgcttcgtttgcttcttcaatctttagttcgcatgaaggtctcagtaaatgatgaatcagagatattttcggtttcagtctctcatgaagctagtggttacagcttcaccctcacttggttagaaaaatctgatgaatggtcatataagctctcgtcgttgggcaccctgggaaggatagccgctgattggatgaggcaagacataagattcagcacgaaaatgtgccgtatgttcgttgagcggatatcaagcatcataacaaaaggatgacggcatgctattcgcttcagctagctgtatcagtgtgctaaggctatatggccagcagactgtgcaaaacactgttgcaacagagtggagtttggaatagaggatgggtttgtaaatgggacatccgtaaaaattatctgatgcaatctcattgcgtaaccccgattatggcgtatgttctcgagcgttcgtgggctaggatgatcgctgaggcgtttggctgttttcaaaatgtttttcaaaatacttttgtctatatgatttagttgttttggatt

SEQ ID NO: 29747 - DNA, 1133 bp, Zea Mays
ctagcctcgaagcaattcccggtcgcgggtctagtactgtagttctctactctccgcaacttgggagttcaaacccccccgcgcgcgctcggaggtctacaagcttctggatccgtccctggcgccgatggagcggttcgactccaagttccacgagaagtacactgttctcaagccatgaaagattgggtcagcgaactcaagaaagacaatgcggagctcaacgataagctaatggaaaagcaggatgagctcgagaaggcccgtcaggaattccttgaagatattcttacaagggacactgaaattctgaggctgaagcaactcttagatgagaaagctgaaaaaaacaattctacagcttctgggtttcattgcttaacacctgaagctatcctagaaaattcaacttcaatgtcacctaaaagaaaaacaccactttcccacggcaaggagaagagggtacagttgagtgaaaatgctcctcacagtagccccgcaaaggaatctcaagagctagtttgttctagaagacgtacatgcatcagagggaatgggacaaatgaaattcggagtgcgcatatgcttcgtttgcttcttcaatctttagttcgcatgaaggtctcagtaaatgatgaatcagagatattttcggtttcagtctctcatgaagctagtggttacagcttcaccctcacttggttagaaaaatctgatgaatggtcatataagctctcgtcgttgggcaccctgggaaggatagccgctgattggatgaggcaagacataagattcagcacgaaaatgtgccgtatgttcgttgagcggatatcaagcatcataacaaaaggatgacggcatgctattcgcttcagctagctgtatcagtgtgctaaggctatatggccagcagactgtgcaaaacactgttgcaacagagtggagtttggaatagaggatgggtttgtaaatgggacatccgtaaaaattatctgatgcaatctcattgcgtaaccccgattatggcgtatgttctcgagcgttcgtgggctaggatgatcgctgaggcgtttggctgttttcaaaatgtttttcaaaatacttttgtctatatgatttagttgttttggatt

SEQ ID NO: 29748 - DNA, 2692 bp, Zea Mays
aggccgatagtggcacgggttcgcgattgggcggcagcgtgctgcgacgacgggaggtagtgtgccgccagcacggtgaactgccgctcgttgttgcggtactctattgatccctagatttcacaacgaacatggcggaggcggctgccgattcctccaactcggccgtcgatggcggcggcagtaacgtccaaaacgactatcccaccattgaccccacctcgttcgacgtggtgctctgcggcacgggcctcccggaatctgtcctcgccgccgcctgcgccgccgttgggaagacggtcctccacgttgatcccagcccgttctacggctccctctactcttccatccccctctcctccctcacctccttcctatcccctgaggcctcccctcccacctcgtccgcggcggccgccgcctctgattcgcgcaccgtcgtcgatctccaccgacggagcgtgtactccgatgttgagacttcggggacggtgccagagccggctaggcggttcaccgttgacatggtgggacctcgtgtgctgtactgcgccgatgaggcagtggacctcctcctgcggtcagggggcagccaccatgtggagttcaagagcgtggaggggggcagtctcctctactgggagggctgcctctacccggtgccagactcgaggcaggccatcttcaaggacaccacactcaagctcaaggagaagaacatcctcttcaggttcttcaagcttgtgcaggcacacattgctgcagcatcagcttcatctgatgagacgggacagggggatgcatctaccaagatacccgaggaggacctagatctcccctttgttgagttcctcaagaaacaagggcttcctcccaagatgagagcggttgtgctgtatgcaattgccatggtggattatgatcaagatggtgctgacccttgtgacaaactgactacaacaagggagggaattcagaccattgctttgtactcctcgtccattggaaggtttgctaatgcagaaggcgctttcatttatcctatgtatgggcatgctgagctgcctcaagctttttgtcgctgtgctgcggttaagggtgccctatatgtgttgcggatgccagtggttgcacttcttatggatgagaagcatttcttaggtgccagattggcatctggtcaggatattttgtgccagcaattgataattgacgcgtcttataagattcctaccttggatgtcccatttgatggttcagattcttggaaagttgtgaggggggtatgcataattagcaagtccgtgaaacagggatcatcaaatgttctggttattttccctccaaaatcaggttgcagcggttcggcttcttcagttgagcagcaatctcgcagtatgccctcctgggatgtttatatcatatctgtctactccctgtaccgatgtctcagccggaaagcaatccataaaaaaagcaatagacactcttttcagtcctcaggcttcagatggttcagaaggccattttgaaaccaccaatgaaagcactgaggatgtgaagccaacactaatctggagctgtttgtatgttcaggagatcacacagggaacatctggttctttattgtcatgccccatgcctgatgaatacctggactacagaaacgtactgggatcaacaaaaaagttatttgcaagtatctatcctgatgaagagttcttgcctaaaaagtcagctcctgtatatgctgatgatgcctctgattctgcagagtaaaaccatctttctaaagggctttatcatttggttgaagaacgccgtcattcgaagatgcaggaaggcatcgttctctttctcgtggtgttccttgaagatcagagggcaaatgagcgtcgcaagggggagcctttgggtttgatgagcagatgtgctggatttccaatgtacaggtggccactggctggtcatattgcatttgtggggaacagttggagggagggatgtgcacatgtggtattcacgaaatgctatgtggacacattctggcgatgctcgcaaatgaccttgtattggctgcctggctggcaaaccttgttgtacacaggatcacagcaaatacgggatacatgctgaacgctcgatatgattccctagttaagacatttgaatgagacagggtagaagggtattcaattgacttctttctctgacttcagtccagctcgatacatgtggattaagatgaatactagaatacctaaacaaagcctggaggtaattaaactgttgcgtgtatttttggtagactaaagcggtgagattttggtcttcaccttgcagaattgggtacccttgcacgagcctatgtaatgtgtttttttatggattagtcttttttcgcaacagtttttttatttgttgatgatttatgaaacatcggtgttgcatctatttctacaagaactatcgtatgacgacacgggaacatggggctcattgcacaaggtcagaaggatatctggcccaatgagattccacgtcagtaacggttcccatctatagcgatgtaattggccaccctttgcccgtgcacaaactatacctacaataaaagcatcttcaacagctcctaaaaaaatagcttctaattgggacatccttaaaagcttttgctctaaacaaagactgc

SEQ ID NO: 29749 - DNA, 644 bp, Zea Mays
ccgacctcagtcaaactgtacaaagtatattgctaactactttcgatgagttgataaaatggattatgctgctaattaagtcaaaagctatattaactcaatctctattttggctaatgtgcattaaatccacaagagcatacctctcccaatttgtcacaaatattggctagtacggattgcaaaccagaccaattttggtttgattctaattttattcagggcaccttgcacgacagcacacagaaaaacaacatttatactgcatatttatgtcaaatttcttcccgatggtcatgcagatttagcattaacagaagagcgaagctaacaatgttagccatcaggtgccaaagctacttgaagaaaggcagttaacacagtaggatgcataccatggtgttttttcaacttcaaggactgatctttgtcagggaacaaaattgaagcagcttgtctgctatcatcctgtaacaattatatagtgcaaatataagagaactatgttagatctggattctggaattagcataatagcagaaagtcgatgctgacaagacataaaaaatcgtgctcaaatgctaagaaagaaaaacctacaaatatgtttgtttttgtctgactctaacatcaatgtatatccc

SEQ ID NO: 29750 - DNA, 1200 bp, Zea Mays
aaaaactttgatactttgattttagaagactttgattgggacaataaatgggttgatccattagctaattcttctcatgttagcaatgctcttggagtcttggagataatttcaatttatcatgggaccaagttgatgaaggtattggtgcatctgcacatctcagaggtcgtaattttcctaggagagctgctggtgggtgggtgagaaggaatgaagaccttgagaaagaggagactaattcagcaaatgaagatgacaaggaatatattcttgatgatcttgatatggaagatgaaattgaacaaagcaacagtggaaaagatggtgatgatcaagacgtggatgctcatggtcttaatattgatgagttagatgatggttactgatcatagatacaagttgtaacttatgtggttgaacttatgtcgttgaacttgatctatttctttttatgctatttgatttgtgaactaagtactcaacttatgtatgaacttattctatatttgaacttctatgtcaagtttgaaaagacgtttcaatgtttgtttaaatgttaaaaaggtggttcataatgttttaacgttcttaccgctttaatgcatgtttttagctagctatcaattagtcttgtatgcaaacagtccttacctaaagcacgcttgcgcaaacacatatcaaagctagctttttcccgactatcctagcatggctgcaggtcgaacctgagacgagccgtcaggcgagaggacggcgatggcgcctccaatgtcaggatccaccccaatcacccacccgttggtggtggcgtcagcactggggatgtcgtcggtcggaagcagcgagagggaggcgagccaggggtcccgggcctcaacctccgccaggagcttcgcccgggccttggcactcgcgcgggaccgcggggtacgcgcggcggctgcaggagcgggcgcgcgacggcagcggcgggggcggaagggtggggaaaagaaggaagcggcggctgtggaccagtgcggcgcggagcggcggaggatgcctgtgccgagagccttcataggttcttggctggcgacggcggctgatgcagctccgcccgcggctgcggcagctgccataattcgaaaggctgcagcgggttttgctggttccgcggtggggataagagcagagcaactccaaaaagaatgttaa

SEQ ID NO: 29751 - DNA, 893 bp, Zea Mays
atggtctacgatggcacatctgtaattgaattgttgtctgatagcatgaaccaactgtccattaaaaatgagaatcagttggctctctgtagtttactaagttacttttgttgtgagctactgtgcctttaaatggcagttatttcgctctagcgactggacgggttcacaattgaatggcatccagcaagagatcacggacagggtgtagtggaaagttctttatgagatcagttctgttgtttgaatatttgggagtgccaatgatactgaagtgtgcactaccctatggttacaagaatttggtcgtgagcgatatgtgcgacttgccaagcaaatagatgaatacacgcatctcatcgcaagcataaaagcacagatcaagttggtatgtgaaggtgcatttggggaggctggaattgaaggtttgcaggcaataaaacctcgtctgagagatcagtgcactcaaaaaggaccatcaaacaatcatgagatgggcaaagattttaatagttcaagttctgttggtgaccatggagttgatgttgaagttaccatggtcattggcgaagacgagattgagggtgccaaatggacaatggataatgtcaaattttctgtcaaagaacgaatcgaggcgattgcaacaaaagaagaactagagcaccttgtgatgctttgcagatctgaggctgatgcaatggggaggatcactgctggaattctttgtctccttaaacttgacaaatctcttgggcaaggaactatagaacaactacgtaacctaggaaatggaggctggaattacaaccggaatagaggaggtggcggtggccgaggacgaggcaactggagatatggtgttagcgtgctgggtatttgttcatgactga

SEQ ID NO: 29752 - DNA, 1012 bp, Zea Mays
atggtctacgatggcacatctgtaattgaattgttgtctgatagcatgaaccaactgtccattaaaaatgagaatcagttggctctctgtagtttactaagttacttttgttgtgagctactgtgcctttaaatggcagttatttcgctctagcgactggacgggttcacaattgaatggcatccagcaagagatcacggacagggtgtagtggaaagttctttatgagatcagttctgttgtttgaatatttgggagtgccaatgatactgaagtgtgcactaccctatggttacaagaatttggtcgtgagcgatatgtgcgacttgccaagcaaatagatgaatacacgcatctcatcgcaagcataaaagcacagatcaagttggtatgtgaaggtgcatttggggaggtaaaccttggatctcagcgcccttggcgtatgatttcgcggtgtcagtgggaatgtacagatgcttctccgagaacgtgtgatttgcttgctcgcccatgagcttcagattcaagaaggctggaattgaaggtttgcaggcaataaaacctcgtctgagagatcagtgcactcaaaaaggaccatcaaacaatcatgagatgggcaaagattttaatagttcaagttctgttggtgaccatggagttgatgttgaagttaccatggtcattggcgaagacgagattgagggtgccaaatggacaatggataatgtcaaattttctgtcaaagaacgaatcgaggcgattgcaacaaaagaagaactagagcaccttgtgatgctttgcagatctgaggctgatgcaatggggaggatcactgctggaattctttgtctccttaaacttgacaaatctcttgggcaaggaactatagaacaactacgtaacctaggaaatggaggctggaattacaaccggaatagaggaggtggcggtggccgaggacgaggcaactggagatatggtgttagcgtgctgggtatttgttcatgactga

SEQ ID NO: 29753 - DNA, 1815 bp, Zea Mays
tgtcactgttgacaaatgaattattccctaccgatccagtctctgttccccttcttgtatttcatgataagggatctgcatattgctaaacaaacacaagacattggattttatgctggttttgttggcgcttcatatatgtgtgggagggcagtctcctcaacagtatggggaatcgtggctgataagtatggaaggaaaccagttatcgtactgacccttattgcaatagttatcttcaatactatgtttggactaagctcaaactattggatggcattaatcacacgatgcctgcttggaatcatgtgtggttatctcgggccaattaaggcttatgctacagaagtgtgccgaaaagaatacaatcatctggctttggcagttgtttcttcctcacgaggcattggtctcattattggtccagctattggtggttaccttgcgcagcctgcagataaatatccaagtatattctctcagacgtccatatttgggaggtttccatactttcttccgtgcctgtgtatatcaatccttgcagttattgctctaattgcctgcatctggtttccggaaactttgcataaacacaatggggatgccgttgataattcagttgaaaccgtagaagaatctcttgctggcaccgacactgaagaaaatggaggtggcggatgtctaaaattatttacaaactggccgttgatgtcagctattactttatattgtatcttctctcttcaggatgtggcttatgcagagacattctctctttgggctgtcagtgacagatcgtttggtggattaagctttactaccacagatgtgggcaatgtccttgcgatgtcaggtctcttcctttttctatatcaaatgttgatctatccgttccttgccaaaacggtggaccacatcacattagtccgtgcagtggcgttattgactctaccggttcttgctagctacccattctttccttcgttgtccgggttcgggctcatggtggtagtaaattgtgcatcttttctgaagaatacattctcggtaactaccattaccgtgttcaacattttgatgaatgaagctgtgactcaggatgtaagagccgcagccaatgggatagctgtaacactaatgtccatctctaaagcggttgctccagctgttgcaggaatcatattttcgtgggcccagaggcgtcaaacagctgcatttcttccaggcgaccacttggtgttcttcatactgaacatcttcacgttcatcggtttcgtcttcaccttcagaccgtttttcgttcgaggcagtgccaagcactgaaacatggatgaaccggacgacgacccatggtatcctatccaggggcaatcgaatataaattttcttccggcgtggccaagggaggtgccgagtctgtaccagtacgacgactcaggccagaacacacggcgtatggtatggtacacagcaaggccgtgttgttgctgtaagttttgtaatttctgtttccttctcggcttcgcagcatgcagttgctgtatatgatggaagaacactctgttactgggcatgttgcgcggtttccacgcgtgtaagtaatgtagaagtcgctatggtaggtatttccataccgtcattagtggatcattgattttttttttgtaagaaggttattgcaatgccctttttccgggcatgaataagaaaaaggaaatatgcttatatgcatggtatgaataagtgagcaatagacttgtactgtgttcttgatttatttaaaatcagactaagagaactggtgacattttaaac

SEQ ID NO: 29754 - DNA, 1228 bp, Zea Mays
gtcattacccatttacctcagtaccctttgttttggtttgagaaagcttggagcaagtctcatcagcaaactgctgcacatgactaatagtgcacatatgtctagtttgttgtaataattagtaatatatgctaaaacgaagaacaatatctgaggcatgtgaatgaaaacttacttggaactcagttatttgtatattttaaggtttgatggtctattgtactgcagagagagctagatatacttatgtatatgtattttgacaggtctcttcctttttctatatcaaatgttgatctatccgttccttgccaaaacggtggaccacatcacattagtccgtgcagtggcgttattgactctaccggttcttgctagctacccattctttccttcgttgtccgggttcgggctcatggtggtagtaaattgtgcatcttttctgaagaatacattctcggtaactaccattaccgtgttcaacattttgatgaatgaagctgtgactcaggatgtaagagccgcagccaatgggatagctgtaacactaatgtccatctctaaagcggttgctccagctgttgcaggaatcatattttcgtgggcccagaggcgtcaaacagctgcatttcttccaggcgaccacttggtgttcttcatactgaacatcttcacgttcatcggtttcgtcttcaccttcagaccgtttttcgttcgaggcagtgccaagcactgaaacatggatgaaccggacgacgacccatggtatcctatccaggggcaatcgaatataaattttcttccggcgtggccaagggaggtgccgagtctgtaccagtacgacgactcaggccagaacacacggcgtatggtatggtacacagcaaggccgtgttgttgctgtaagttttgtaatttctgtttccttctcggcttcgcagcatgcagttgctgtatatgatggaagaacactctgttactgggcatgttgcgcggtttccacgcgtgtaagtaatgtagaagtcgctatggtaggtatttccataccgtcattagtggatcattgattttttttttgtaagaaggttattgcaatgccctttttccgggcatgaataagaaaaaggaaatatgcttatatgcatggtatgaataagtgagcaatagacttgtactgtgttcttgatttatttaaaatcagactaagagaactggtgacattttaaac

SEQ ID NO: 29755 - DNA, 2005 bp, Zea Mays
cccttttccccgtttttctcttccttttggggaccatctatttctgggctggccggaaagcgaaactgccaccaccgctgaaacttttattagccgagccgagcgagcgttcgagggcgaggaggaaatcagggaggaggatgccgccgctgccgcggagattgatagtactagtataaagcaggcggagacagccggcccctctggcctcgctgctcccccttcctccccgtccccacccacatgccctgcctccgccccgccccgccctgcccaaggtgattgattgattggttggttggttggttgcttgcttgcttcgtttcatgctttccccttgctttgctgagatccaaaagctgagactcagcttgtggatccatctgttctgtgcgcctactcgtatcttatcgccgccagattgggagcgtatgtgcctgctatctgtggatccatctgtatgttgttttcctgattgaatcgtgtgttggatgcctggtggttgaccttgctcctagtcttttgatttacacgagctttcgacgaagccgcgtctggtctgtctgctccatcacaagagcacgcaaatgctgagttcccccacccccaacaaacaattactagagtagctgcattggcggggaaattaaagcgctagaagctcagcagcaatggcggagcaggcgggcgtcggaaggtactggtgccacatgtgcgccgcggccgttagccccgcggagggcgaggtggagatgaagtgcccgttctgccacagcggcttcctcgaggagatggagaccgcccgcggggccgcgaccgacgacggtgacggcgacggcgcggtggctcaggtgcaccccggcgccgaccgcccgagctccatctgggcgcacgctatcctcagcacggtcgacagctccgcccgtcgccgccgcaaccggcggcagcaggaggccgccagcgacgtctacgactggaacgaccccgagttctcgctgcgccggcggcgcgtcaccgcgttcctgcggctcctgcacgagctccgggaccgccagctgcagcggctggagtccgctgccggcgtcgccctcgaaggcgaccagctgaccccgttcggccggagcctcttcatcggcgcagccggcggcgagcatggcgtggcgctgggcgactacttcctcggccccagcctcgacgccttggtacagcagctcgccgagaacgatgcggcgcggcacggaacgccgccggccaagaaggaggccgtggaggcaatgcctaccgtggaaatcgccggcggcaacgatgacgacgacgcggccagctgcccggtctgcctggaggactacgcgcccggcgagcgcgcccgcgagatgccctgcaggcacaggttccacggcaattgcatcgtgccgtggctcgagatgcacagctcctgccctgtctgccggttccagctgccggccaccgacgacaagagctcatgcagcggcggcgacggtggtttcgtcagtgtcgatgcggatcgtgaaggcagtgacaacggcgggggtgatggtagggcaagctctccgggcaacgccgagctagctgaagctgaagagagtggcaggcggttgccgccatccttgcagtggctcaacagcctgttctcgccgtcggcgcagtcctccggtagcggcggcagcagttcgcatcattgggagaactaagcaatattgccatggttgctgccgcttgaaagcttggcccgttggttggtcccaatgtacataggaaggagcaggagcatgccgggttggtgccatgtaaaaatctggagccttttttcagtttggctcatgttaatggtctctgatatgtatcatggctgtaaaaaagaacagaaatgggcaaatgtatgaacttgccgcgctcttgcgtgaactgggtgctaatcatcgtcttactactcaattttggtttttattaacaaaactatagtatttatgatattaaatgtctt

SEQ ID NO: 29756 - DNA, 2208 bp, Zea Mays
ctcctgcagccatcagaaaagggggcaaaaaggcccccgaattctcctcgcccgggcacaacctcgctccagagtccaggccagaccagcaggccgcctttccgctcgagcacccacgcaatcatcaccgccgtcttcctctcgctcttctcttccccttccattcctcggcaccacgtcctcgggaaccccgcatgccctccgcacaaggcgccgcctgttcccggtgaccgcggggccgagatcggcgcgccatggccgcgcccggaggcctggaccaggactgtgcacaggacgccgccattaagctcttcggccgcagcatcccggttctccactcctccgtcttcgccgccaccgctgcggccgcatccgaggttagcaccaaattatcaaatgatgttagaagcaatgatggcatgccatgccttccaaacatgtctttgattgtcaaaacaaatcccttcccttccaagagcaatatgaagaatggtttacaggcaatcagcagtcagcatgggaaaatggaagctgattccaactctgaggaagctaagaatagtttacaagctatcatcagtcagcctgggaaaagatacgattccaagtctgaggaagctaagactgaatctggtggatctggccaagagaaggtactcaagaagccagataagattctgccttgccctcgctgcaatagtatggaaacaaagttctgctacttcaacaattacaacgtgaaccagcccaggcatttctgccgaaactgcaagaggtactggactgctggggggactatgagaaatgtccctgtaggttctggtagacgcagaaataaggatccatctcatcaccatcatttcaccaaggtgtgtgattataccattgctactaatggagatgtttctgatgcaactcagcgccagtccgttgcagccaagccatgtctccttcaaggttcaggaaaacaaaatgaaacagcgtgcaagtctgtatctccagtcagtaatattaaagagcagaacaatgccgaccttatttccttggtctctggtgataataaggaagagaaatcatgtgcatcttctgcagtggtatctggttcctccgaaaattggatgccagaaaatacagttaaaaaggaggaggataatacttcagcgtacggtaatggtgtgaaagtacctgatcacaaaatgcagcctcaccatgctggacctgtttcggtgttctccagaaatcctgctgcagtcatggcgactaatcagtgctcagaagatggtattcatacgccgggaaatggtacggtcagtcctctttcactgccaccactacccatggtaccaaccccaggaatttgtgcacctgctgttccattccctttccctctcgtgccagccttcgtgagctgcattcctggctggccaagtggactatggggtgcaccatggcctggaagtagtgcccctacattactatctcttcctccaaacggtttagctctttcaggaagcaactctggggtgttaggaaagcatacaagggtagctaatttgcaggaagaacagaaggcagaaaagaagttttgggtccctaaagctctccgaattgacaacccagaagaggcagcaaagagttcgatctgggcctctcttggtatcaagcctgatgacagaatcatattcaagtctttccagtccaaggatctgaaaaatagtgcgactaagacgccagaatccctgcaggccaatccagcagcgttttcccgctctcagacatttcaggagagggcctgatacaaaaataaagtgtcctcaaaacaaaggataccagaggatggtcaatgttcctatttaagctttttcttgagttgatctgtcgctaagcgcagcagtttggcaatcaactcaggcctggccaagatttacattttttttctttctagcgatagctaggttggtgtgaagattctgactgctcaaggagcgcttatgtaaatacagtaggcctgtgaattgatgttgaatgttgatagtcttttacctggcaccggttaatgttctaatgtactccctctcttctcaattatagttataagtcattctggttttcgtaaacacatattttgctattctaattcatcctataaaaaagaaaaaaatctatcatttttaatccatcatattagatagattttttatttttaaa

SEQ ID NO: 29757 - DNA, 386 bp, Zea Mays
caggaaccaaccacgctcgatcgctctctccacccaccgcgcatgccatgcgccgtagctacgcatcgcgcccaccaggccgccccatctcctattcatcttctccaaaccgcctctccccacccatctcgcccatgttcgcgaaacccagagccgaacccctcccagtcgacctcggctcttcggcgagctgccctccatgtcctggccactcagtcgttcgccgcgtcgatcgcccaggaagatctgcgatgctctcatcgttgccgagatcgcgatttgtttccaagcttcgaggaattgacgatcaagcgttggcgaccaagtgatctggctcttcgagttctacgaggttgaagaccctgagcatctgtttagtgaaggca

SEQ ID NO: 29758 - DNA, 351 bp, Zea Mays
atgcgccgtagctacgcatcgcgcccaccaggccgccccatctcctattcatcttctccaaaccgcctctccccacccatctcgcccatgttcgcgaaacccagagccgaacccctcccagtcgacctcggctcttcggcgagctgccctccatgtcctggccactcagtcgttcgccgcgtcgatcgcccaggaagatctgcgatgctctcatcgttgccgaggttagtggccggatcgcgatttgtttccaagcttcgaggaattgacgatcaagcgttggcgaccaagtgatctggctcttcgagttctacgaggttgaagaccctgagcatctgtttagtgaaggca

SEQ ID NO: 29759 - DNA, 2417 bp, Zea Mays
tgcgcagttggggccggaccgctttcgcacgccaactcgcctcgctttcttccccgttcccacctctctctatctctctctcacacacacagtcacacacacaccgtcctccctccttggtccttggctccccttgctaccttgccttcacagatctcccactccccaacagaactgtcacgtctcggcgcccgggggccgtggtattacggctcatcgcggctcggcagtggtggcgcgcagctgaccggatcgagcagcggatggacggcggcggcgggctgggcggcctgcggtggaccgcggaagaggcgtcgacgatcggaggcatcgccacggtgtcgctgctgcactccttcatccccacgcactggctccccttctccatcgtcgcgcgcgcgcagcgctggccgctctcccgcacccttctcgtcactgcatttggaggtgttcttcatgttgtttctacggctcttcttgggataactgcagttactatggcaaatactatagctggcgaagaaacagtgcataaacttgcctcgctgttgctgatttttcttggagcaagttatatcctcttgtttgccttaggaaaaggtggtcatagccatgcccataatcatccaatggaaaaaatggcagtcgccggtcttgtacttgtacctgcattatcaccttgtgcaacaactcttccagtttttcttgctgttggcaactcttcctcaatgatgattcttgcaatcattgtgctcctcttcagcaccatcacagtgatgacatccttggtggccctttcattctacggtgctagccagatcaagttccactgggtggagcgttacgacaagatcctcgtcggcacggtgctgtgccttgttggagtcttaacatatgtgttccatcatcacgatggtgatgagcatgtgcaccagaaactcgtatctccctagatgcatacatactgaagttccatctctgttgctccctatttgtatacaatcctgattatcgacttactctgccgctctggttttgctggagatacgtatcatctgatcaagtgaatatatttgagcaaactgcgtgaagtttgtatcgttgtggtggtagtggcctctttttcggcactctgaaatggtaccttcctacttttggacgcaataaattgttttctgaaatttcctttccttggttcttttttcctttcaatccattttatttaggaaaaaaactgtttatgctgggtgtaaaagtaaaacccaattgaccgcaaattgtgtttgaaaaaaaaaaactgttggcagaagatgagagcttaggttcagtggggtttttcgcaaattcggcccagtatactgcaaatagccgagccgggcctggggaaaacgcgcggcaggcagagcggccacgacgccgcccgtcgccgccgatccctttcgaccgctcgggtctccctgctccttcgcctttcctcctgaaatccagcgaccgaatccgatcgccttggcgcaggcgttcgatgggcaaccactaccagacgctgggtgtccggcaggacgccaccaaggctgaggtcaaggctgccttccgtcgcagcgcgctacgcgaccaccctgaccgccacgccggctccaccgacgcggccgcccgtgccgacgccgccagccggtttcgccaggcgtccgacgcgtactacgtcctctccgacgacagacgccgcgccgagtacgacctccgtcttcgcggttccacgtcttcctacgcgcgcacctcctcctctggttgggcctcctcgtcggcttcctacgggtacggccatggcggcggttcgtggcgacggactcctccgggtgcaggtgccggcgccggcgcctcggtggggtcaattgattgggaattcttactgaaggcggtcactcggcgagggttccttatcaatctgggattagccagtgtattgctatctggggcaacttttcttgattggactattttagaaatttggaagatgaataacaccgggaaatcatttgaggatgcgatggagaaggtcggaaagacgcaggaggtagatagagcttgaatctttttcatggtacattagtgtatatatatatacactaatgtacaaacctatgtgcatatcgatcgttgtccacatcctcctgatgttactttgtaatatgtatagatctgaacagttttttctatcacgactcacgagcttgtgcttgatccatagaacccctgctgtcgccgtcgtagaaactgaaccatgtaggttcttcgacagcgaaagctcaggttatgctctgattcttttgctgacgaaacgaagtaactgttgaataaattgctgtaattcaagtacgcttcgaggccagctacatggtcgcaggaataaaataataaaa

SEQ ID NO: 29760 - DNA, 2561 bp, Zea Mays
tgcgcagttggggccggaccgctttcgcacgccaactcgcctcgctttcttccccgttcccacctctctctatctctctctcacacacacagtcacacacacaccgtcctccctccttggtccttggctccccttgctaccttgccttcacagatctcccactccccaacagaactgtcacgtctcggcgcccgggggccgtggtattacggctcatcgcggctcggcagtggtggcgcgcagctgaccggatcgagcagcggatggacggcggcggcgggctgggcggcctgcggtggaccgcggaagaggcgtcgacgatcggaggcatcgccacggtgtcgctgctgcactccttcatccccacgcactggctccccttctccatcgtcgcgcgcgcgcagcgctggccgctctcccgcacccttctcgtcagtcagtacccacctcccttccgcgtgcctcgttccccccatttgctgcggttgccgctcgttactgttcaccgcctcggcgcctccagatctggttatctcctaattctaagaggttgggtgaaggctagctcccaattgatggtgcaagagtgtgccattagggttttactctggttgggctgctctcggtggttggttcccttggatggatccggttttgcatggtgtcattaacaaacgatggcagtttttgtgtcatggtagtgtggtggtgcctggctgctgcctattgcgtgtagcatatgctgagtattgcctgaacatctgaatgagattgcatgggcatcatgttcagatgcgcatgctcctatgatctgattttctgtgtgggatggattcgtaagactgcatttgtgcttctgttaccttcctttctcggtggaatgttgttccatggttcagggaacgcaaatttctaggggaagtgtgtccttgtcttcttccgacttctgctgctttcatgtgtacatccgtctgcggtgactgtgacaaatggctattgttgtagtgttttttagtaatgcaagtgatgtaatgtgttctatcaacgagccaagtttgggcaaacaagttatcaaagctttgtttagttaaaccagttgccagcaaatgcctataagttggttgtgatctaatctggcaatgaaataattgcatcatatttgtcatgatctcttaagaattaatgatgacttaaacaaaaaagttatgattcttgcactacatctattttttatctcatcctggttccactgttttggtgcaccctgtttgcttcatcctgggcagtatacactccaagaacctgcaatttcatattttccaattttttaaattttcaaatgatgcccttctctctatatgattgttactgagaaaagattactaacttctgcagctgcatttggaggtgttcttcatgttgtttctacggctcttcttgggataactgcagttactatggcaaatactatagctggcgaagaaacagtgcataaacttgcctcgctgttgctgatttttcttggagcaagttatatcctcttgtttgccttaggaaaaggtggtcatagccatgcccataatcatccaatggaaaaaatggcagtcgccggtcttgtacttgtacctgcattatcaccttgtgcaacaactcttccagtttttcttgctgttggcaactcttcctcaatgatgattcttgcaatcattgtgctcctcttcagcaccatcacagtgatgacatccttggtggccctttcattctacggtgctagccagatcaagttccactgggtggagcgttacgacaagatcctcgtcggcacggtgctgtgccttgttggagtcttaacatatgtgttccatcatcacgatggtgatgagcatgtgcaccagaaactcgtatctccctagatgcatacatactgaagttccatctctgttgctccctatttgtatacaatcctgattatcgacttactctgccgctctggttttgctggagatacgtatcatctgatcaagtgaatatatttgagcaaactgcgtgaagtttgtatcgttgtggtggtagtggcctctttttcggcactctgaaatgtgtattgctatctggggcaacttttcttgattggactattttagaaatttggaagatgaataacaccgggaaatcatttgaggatgcgatggagaaggtcggaaagacgcaggaggtagatagagcttgaatctttttcatggtacattagtgtatatatatatacactaatgtacaaacctatgtgcatatcgatcgttgtccacatcctcctgatgttactttgtaatatgtatagatctgaacagttttttctatcacgactcacgagcttgtgcttgatccatagaacccctgctgtcgccgtcgtagaaactgaaccatgtaggttcttcgacagcgaaagctcaggttatgctctgattcttttgctgacgaaacgaagtaactgttgaataaattgctgtaattcaagtacgcttcgaggccagctacatggtcgcaggaataaaataataaaa

SEQ ID NO: 29761 - DNA, 3002 bp, Zea Mays
tgcgcagttggggccggaccgctttcgcacgccaactcgcctcgctttcttccccgttcccacctctctctatctctctctcacacacacagtcacacacacaccgtcctccctccttggtccttggctccccttgctaccttgccttcacagatctcccactccccaacagaactgtcacgtctcggcgcccgggggccgtggtattacggctcatcgcggctcggcagtggtggcgcgcagctgaccggatcgagcagcggatggacggcggcggcgggctgggcggcctgcggtggaccgcggaagaggcgtcgacgatcggaggcatcgccacggtgtcgctgctgcactccttcatccccacgcactggctccccttctccatcgtcgcgcgcgcgcagcgctggccgctctcccgcacccttctcgtcagtcagtacccacctcccttccgcgtgcctcgttccccccatttgctgcggttgccgctcgttactgttcaccgcctcggcgcctccagatctggttatctcctaattctaagaggttgggtgaaggctagctcccaattgatggtgcaagagtgtgccattagggttttactctggttgggctgctctcggtggttggttcccttggatggatccggttttgcatggtgtcattaacaaacgatggcagtttttgtgtcatggtagtgtggtggtgcctggctgctgcctattgcgtgtagcatatgctgagtattgcctgaacatctgaatgagattgcatgggcatcatgttcagatgcgcatgctcctatgatctgattttctgtgtgggatggattcgtaagactgcatttgtgcttctgttaccttcctttctcggtggaatgttgttccatggttcagggaacgcaaatttctaggggaagtgtgtccttgtcttcttccgacttctgctgctttcatgtgtacatccgtctgcggtgactgtgacaaatggctattgttgtagtgttttttagtaatgcaagtgatgtaatgtgttctatcaacgagccaagtttgggcaaacaagttatcaaagctttgtttagttaaaccagttgccagcaaatgcctataagttggttgtgatctaatctggcaatgaaataattgcatcatatttgtcatgatctcttaagaattaatgatgacttaaacaaaaaagttatgattcttgcactacatctattttttatctcatcctggttccactgttttggtgcaccctgtttgcttcatcctgggcagtatacactccaagaacctgcaatttcatattttccaattttttaaattttcaaatgatgcccttctctctatatgattgttactgagaaaagattactaacttctgcagctgcatttggaggtgttcttcatgttgtttctacggctcttcttgggataactgcagttactatggcaaatactatagctggcgaagaaacagtgcataaacttgcctcgctgttgctgatttttcttggagcaagttatatcctcttgtttgccttaggaaaaggtggtcatagccatgcccataatcatccaatggaaaaaatggcagtcgccggtcttgtacttgtacctgcattatcaccttgtgcaacaactcttccagtttttcttgctgttggcaactcttcctcaatgatgattcttgcaatcattgtgctcctcttcagcaccatcacagtgatgacatccttggtggccctttcattctacggtgctagccagatcaagttccactgggtggagcgttacgacaagatcctcgtcggcacggtgctgtgccttgttggagtcttaacatatgtgttccatcatcacgatggtgatgagcatgtgcaccagaaactcgtatctccctagatgcatacatactgaagttccatctctgttgctccctatttgtatacaatcctgattatcgacttactctgccgctctggttttgctggagatacgtatcatctgatcaagtgaatatatttgagcaaactgcgtgaagtttgtatcgttgtggtggtagtggcctctttttcggcactctgaaatggcgttcgatgggcaaccactaccagacgctgggtgtccggcaggacgccaccaaggctgaggtcaaggctgccttccgtcgcagcgcgctacgcgaccaccctgaccgccacgccggctccaccgacgcggccgcccgtgccgacgccgccagccggtttcgccaggcgtccgacgcgtactacgtcctctccgacgacagacgccgcgccgagtacgacctccgtcttcgcggttccacgtcttcctacgcgcgcacctcctcctctggttgggcctcctcgtcggcttcctacgggtacggccatggcggcggttcgtggcgacggactcctccgggtgcaggtgccggcgccggcgcctcggtggggtcaattgattgggaattcttactgaaggcggtcactcggcgagggttccttatcaatctgggattagccagtgtattgctatctggggcaacttttcttgattggactattttagaaatttggaagatgaataacaccgggaaatcatttgaggatgcgatggagaaggtcggaaagacgcaggaggtagatagagcttgaatctttttcatggtacattagtgtatatatatatacactaatgtacaaacctatgtgcatatcgatcgttgtccacatcctcctgatgttactttgtaatatgtatagatctgaacagttttttctatcacgactcacgagcttgtgcttgatccatagaacccctgctgtcgccgtcgtagaaactgaaccatgtaggttcttcgacagcgaaagctcaggttatgctctgattcttttgctgacgaaacgaagtaactgttgaataaattgctgtaattcaagtacgcttcgaggccagctacatggtcgcaggaataaaataataaaa

SEQ ID NO: 29762 - DNA, 2089 bp, Zea Mays
tgcgcagttggggccggaccgctttcgcacgccaactcgcctcgctttcttccccgttcccacctctctctatctctctctcacacacacagtcacacacacaccgtcctccctccttggtccttggctccccttgctaccttgccttcacagatctcccactccccaacagaactgtcacgtctcggcgcccgggggccgtggtattacggctcatcgcggctcggcagtggtggcgcgcagctgaccggatcgagcagcggatggacggcggcggcgggctgggcggcctgcggtggaccgcggaagaggcgtcgacgatcggaggcatcgccacggtgtcgctgctgcactccttcatccccacgcactggctccccttctccatcgtcgcgcgcgcgcagcgctggccgctctcccgcacccttctcgtcacaccatcacagtgatgacatccttggtggccctttcattctacggtgctagccagatcaagttccactgggtggagcgttacgacaagatcctcgtcggcacggtgctgtgccttgttggagtcttaacatatgtgttccatcatcacgatggtgatgagcatgtgcaccagaaactcgtatctccctagatgcatacatactgaagttccatctctgttgctccctatttgtatacaatcctgattatcgacttactctgccgctctggttttgctggagatacgtatcatctgatcaagtgaatatatttgagcaaactgcgtgaagtttgtatcgttgtggtggtagtggcctctttttcggcactctgaaatggtaccttcctacttttggacgcaataaattgttttctgaaatttcctttccttggttcttttttcctttcaatccattttatttaggaaaaaaactgtttatgctgggtgtaaaagtaaaacccaattgaccgcaaattgtgtttgaaaaaaaaaaactgttggcagaagatgagagcttaggttcagtggggtttttcgcaaattcggcccagtatactgcaaatagccgagccgggcctggggaaaacgcgcggcaggcagagcggccacgacgccgcccgtcgccgccgatccctttcgaccgctcgggtctccctgctccttcgcctttcctcctgaaatccagcgaccgaatccgatcgccttggcgcaggcgttcgatgggcaaccactaccagacgctgggtgtccggcaggacgccaccaaggctgaggtcaaggctgccttccgtcgcagcgcgctacgcgaccaccctgaccgccacgccggctccaccgacgcggccgcccgtgccgacgccgccagccggtttcgccaggcgtccgacgcgtactacgtcctctccgacgacagacgccgcgccgagtacgacctccgtcttcgcggttccacgtcttcctacgcgcgcacctcctcctctggttgggcctcctcgtcggcttcctacgggtacggccatggcggcggttcgtggcgacggactcctccgggtgcaggtgccggcgccggcgcctcggtggggtcaattgattgggaattcttactgaaggcggtcactcggcgagggttccttatcaatctgggattagccagtgtattgctatctggggcaacttttcttgattggactattttagaaatttggaagatgaataacaccgggaaatcatttgaggatgcgatggagaaggtcggaaagacgcaggaggtagatagagcttgaatctttttcatggtacattagtgtatatatatatacactaatgtacaaacctatgtgcatatcgatcgttgtccacatcctcctgatgttactttgtaatatgtatagatctgaacagttttttctatcacgactcacgagcttgtgcttgatccatagaacccctgctgtcgccgtcgtagaaactgaaccatgtaggttcttcgacagcgaaagctcaggttatgctctgattcttttgctgacgaaacgaagtaactgttgaataaattgctgtaattcaagtacgcttcgaggccagctacatggtcgcaggaataaaataataaaa

SEQ ID NO: 29763 - DNA, 2320 bp, Zea Mays
tgcgcagttggggccggaccgctttcgcacgccaactcgcctcgctttcttccccgttcccacctctctctatctctctctcacacacacagtcacacacacaccgtcctccctccttggtccttggctccccttgctaccttgccttcacagatctcccactccccaacagaactgtcacgtctcggcgcccgggggccgtggtattacggctcatcgcggctcggcagtggtggcgcgcagctgaccggatcgagcagcggatggacggcggcggcgggctgggcggcctgcggtggaccgcggaagaggcgtcgacgatcggaggcatcgccacgctgcatttggaggtgttcttcatgttgtttctacggctcttcttgggataactgcagttactatggcaaatactatagctggcgaagaaacagtgcataaacttgcctcgctgttgctgatttttcttggagcaagttatatcctcttgtttgccttaggaaaaggtggtcatagccatgcccataatcatccaatggaaaaaatggcagtcgccggtcttgtacttgtacctgcattatcaccttgtgcaacaactcttccagtttttcttgctgttggcaactcttcctcaatgatgattcttgcaatcattgtgctcctcttcagcaccatcacagtgatgacatccttggtggccctttcattctacggtgctagccagatcaagttccactgggtggagcgttacgacaagatcctcgtcggcacggtgctgtgccttgttggagtcttaacatatgtgttccatcatcacgatggtgatgagcatgtgcaccagaaactcgtatctccctagatgcatacatactgaagttccatctctgttgctccctatttgtatacaatcctgattatcgacttactctgccgctctggttttgctggagatacgtatcatctgatcaagtgaatatatttgagcaaactgcgtgaagtttgtatcgttgtggtggtagtggcctctttttcggcactctgaaatggtaccttcctacttttggacgcaataaattgttttctgaaatttcctttccttggttcttttttcctttcaatccattttatttaggaaaaaaactgtttatgctgggtgtaaaagtaaaacccaattgaccgcaaattgtgtttgaaaaaaaaaaactgttggcagaagatgagagcttaggttcagtggggtttttcgcaaattcggcccagtatactgcaaatagccgagccgggcctggggaaaacgcgcggcaggcagagcggccacgacgccgcccgtcgccgccgatccctttcgaccgctcgggtctccctgctccttcgcctttcctcctgaaatccagcgaccgaatccgatcgccttggcgcaggcgttcgatgggcaaccactaccagacgctgggtgtccggcaggacgccaccaaggctgaggtcaaggctgccttccgtcgcagcgcgctacgcgaccaccctgaccgccacgccggctccaccgacgcggccgcccgtgccgacgccgccagccggtttcgccaggcgtccgacgcgtactacgtcctctccgacgacagacgccgcgccgagtacgacctccgtcttcgcggttccacgtcttcctacgcgcgcacctcctcctctggttgggcctcctcgtcggcttcctacgggtacggccatggcggcggttcgtggcgacggactcctccgggtgcaggtgccggcgccggcgcctcggtggggtcaattgattgggaattcttactgaaggcggtcactcggcgagggttccttatcaatctgggattagccagtgtattgctatctggggcaacttttcttgattggactattttagaaatttggaagatgaataacaccgggaaatcatttgaggatgcgatggagaaggtcggaaagacgcaggaggtagatagagcttgaatctttttcatggtacattagtgtatatatatatacactaatgtacaaacctatgtgcatatcgatcgttgtccacatcctcctgatgttactttgtaatatgtatagatctgaacagttttttctatcacgactcacgagcttgtgcttgatccatagaacccctgctgtcgccgtcgtagaaactgaaccatgtaggttcttcgacagcgaaagctcaggttatgctctgattcttttgctgacgaaacgaagtaactgttgaataaattgctgtaattcaagtacgcttcgaggccagctacatggtcgcaggaataaaataataaaa

SEQ ID NO: 29764 - DNA, 2413 bp, Zea Mays
tgcgcagttggggccggaccgctttcgcacgccaactcgcctcgctttcttccccgttcccacctctctctatctctctctcacacacacagtcacacacacaccgtcctccctccttggtccttggctccccttgctaccttgccttcacagatctcccactccccaacagaactgtcacgtctcggcgcccgggggccgtggtattacggctcatcgcggctcggcagtggtggcgcgcagctgaccggatcgagcagcggatggacggcggcggcgggctgggcggcctgcggtggaccgcggaagaggcgtcgacgatcggaggcatcgccacggtgtcgctgctgcactccttcatccccacgcactggctccccttctccatcgtcgcgcgcgcgcagcgctggccgctctcccgcacccttctcctgcatttggaggtgttcttcatgttgtttctacggctcttcttgggataactgcagttactatggcaaatactatagctggcgaagaaacagtgcataaacttgcctcgctgttgctgatttttcttggagcaagttatatcctcttgtttgccttaggaaaaggtggtcatagccatgcccataatcatccaatggaaaaaatggcagtcgccggtcttgtacttgtacctgcattatcaccttgtgcaacaactcttccagtttttcttgctgttggcaactcttcctcaatgatgattcttgcaatcattgtgctcctcttcagcaccatcacagtgatgacatccttggtggccctttcattctacggtgctagccagatcaagttccactgggtggagcgttacgacaagatcctcgtcggcacggtgctgtgccttgttggagtcttaacatatgtgttccatcatcacgatggtgatgagcatgtgcaccagaaactcgtatctccctagatgcatacatactgaagttccatctctgttgctccctatttgtatacaatcctgattatcgacttactctgccgctctggttttgctggagatacgtatcatctgatcaagtgaatatatttgagcaaactgcgtgaagtttgtatcgttgtggtggtagtggcctctttttcggcactctgaaatggtaccttcctacttttggacgcaataaattgttttctgaaatttcctttccttggttcttttttcctttcaatccattttatttaggaaaaaaactgtttatgctgggtgtaaaagtaaaacccaattgaccgcaaattgtgtttgaaaaaaaaaaactgttggcagaagatgagagcttaggttcagtggggtttttcgcaaattcggcccagtatactgcaaatagccgagccgggcctggggaaaacgcgcggcaggcagagcggccacgacgccgcccgtcgccgccgatccctttcgaccgctcgggtctccctgctccttcgcctttcctcctgaaatccagcgaccgaatccgatcgccttggcgcaggcgttcgatgggcaaccactaccagacgctgggtgtccggcaggacgccaccaaggctgaggtcaaggctgccttccgtcgcagcgcgctacgcgaccaccctgaccgccacgccggctccaccgacgcggccgcccgtgccgacgccgccagccggtttcgccaggcgtccgacgcgtactacgtcctctccgacgacagacgccgcgccgagtacgacctccgtcttcgcggttccacgtcttcctacgcgcgcacctcctcctctggttgggcctcctcgtcggcttcctacgggtacggccatggcggcggttcgtggcgacggactcctccgggtgcaggtgccggcgccggcgcctcggtggggtcaattgattgggaattcttactgaaggcggtcactcggcgagggttccttatcaatctgggattagccagtgtattgctatctggggcaacttttcttgattggactattttagaaatttggaagatgaataacaccgggaaatcatttgaggatgcgatggagaaggtcggaaagacgcaggaggtagatagagcttgaatctttttcatggtacattagtgtatatatatatacactaatgtacaaacctatgtgcatatcgatcgttgtccacatcctcctgatgttactttgtaatatgtatagatctgaacagttttttctatcacgactcacgagcttgtgcttgatccatagaacccctgctgtcgccgtcgtagaaactgaaccatgtaggttcttcgacagcgaaagctcaggttatgctctgattcttttgctgacgaaacgaagtaactgttgaataaattgctgtaattcaagtacgcttcgaggccagctacatggtcgcaggaataaaataataaaa

SEQ ID NO: 29765 - DNA, 2406 bp, Zea Mays
tgcgcagttggggccggaccgctttcgcacgccaactcgcctcgctttcttccccgttcccacctctctctatctctctctcacacacacagtcacacacacaccgtcctccctccttggtccttggctccccttgctaccttgccttcacagatctcccactccccaacagaactgtcacgtctcggcgcccgggggccgtggtattacggctcatcgcggctcggcagtggtggcgcgcagctgaccggatcgagcagcggatggacggcggcggcgggctgggcggcctgcggtggaccgcggaagaggcgtcgacgatcggaggcatcgccacggtgtcgctgctgcactccttcatccccacgcactggctccccttctccatcgtcgcgcgcgcgcagcgctggccgctctcccgcacccttctcgtcactgcatttggaggtgttcttcatgttgtttctacggctcttcttgggataactgcagttactatggcaaatactatagctggcgaagaaacagtgcataaacttgcctcgctgttgctgatttttcttggagcaagttatatcctcttgtttgccttaggaaaaggtggtcatagccatgcccataatcatccaatggaaaaaatggcagtcgccggtcttgtacttgtacctgcattatcaccttgtgcaacaactcttccagtttttcttgctgttggcaactcttcctcaatgatgattcttgcaatcattgtgctcctcttcagtgatgacatccttggtggccctttcattctacggtgctagccagatcaagttccactgggtggagcgttacgacaagatcctcgtcggcacggtgctgtgccttgttggagtcttaacatatgtgttccatcatcacgatggtgatgagcatgtgcaccagaaactcgtatctccctagatgcatacatactgaagttccatctctgttgctccctatttgtatacaatcctgattatcgacttactctgccgctctggttttgctggagatacgtatcatctgatcaagtgaatatatttgagcaaactgcgtgaagtttgtatcgttgtggtggtagtggcctctttttcggcactctgaaatggtaccttcctacttttggacgcaataaattgttttctgaaatttcctttccttggttcttttttcctttcaatccattttatttaggaaaaaaactgtttatgctgggtgtaaaagtaaaacccaattgaccgcaaattgtgtttgaaaaaaaaaaactgttggcagaagatgagagcttaggttcagtggggtttttcgcaaattcggcccagtatactgcaaatagccgagccgggcctggggaaaacgcgcggcaggcagagcggccacgacgccgcccgtcgccgccgatccctttcgaccgctcgggtctccctgctccttcgcctttcctcctgaaatccagcgaccgaatccgatcgccttggcgcaggcgttcgatgggcaaccactaccagacgctgggtgtccggcaggacgccaccaaggctgaggtcaaggctgccttccgtcgcagcgcgctacgcgaccaccctgaccgccacgccggctccaccgacgcggccgcccgtgccgacgccgccagccggtttcgccaggcgtccgacgcgtactacgtcctctccgacgacagacgccgcgccgagtacgacctccgtcttcgcggttccacgtcttcctacgcgcgcacctcctcctctggttgggcctcctcgtcggcttcctacgggtacggccatggcggcggttcgtggcgacggactcctccgggtgcaggtgccggcgccggcgcctcggtggggtcaattgattgggaattcttactgaaggcggtcactcggcgagggttccttatcaatctgggattagccagtgtattgctatctggggcaacttttcttgattggactattttagaaatttggaagatgaataacaccgggaaatcatttgaggatgcgatggagaaggtcggaaagacgcaggaggtagatagagcttgaatctttttcatggtacattagtgtatatatatatacactaatgtacaaacctatgtgcatatcgatcgttgtccacatcctcctgatgttactttgtaatatgtatagatctgaacagttttttctatcacgactcacgagcttgtgcttgatccatagaacccctgctgtcgccgtcgtagaaactgaaccatgtaggttcttcgacagcgaaagctcaggttatgctctgattcttttgctgacgaaacgaagtaactgttgaataaattgctgtaattcaagtacgcttcgaggccagctacatggtcgcaggaataaaataataaaa

SEQ ID NO: 29766 - DNA, 3210 bp, Zea Mays
tgcgcagttggggccggaccgctttcgcacgccaactcgcctcgctttcttccccgttcccacctctctctatctctctctcacacacacagtcacacacacaccgtcctccctccttggtccttggctccccttgctaccttgccttcacagatctcccactccccaacagaactgtcacgtctcggcgcccgggggccgtggtattacggctcatcgcggctcggcagtggtggcgcgcagctgaccggatcgagcagcggatggacggcggcggcgggctgggcggcctgcggtggaccgcggaagaggcgtcgacgatcggaggcatcgccacggtgtcgctgctgcactccttcatccccacgcactggctccccttctccatcgtcgcgcgcgcgcagcgctggccgctctcccgcacccttctcgtcagtcagtacccacctcccttccgcgtgcctcgttccccccatttgctgcggttgccgctcgttactgttcaccgcctcggcgcctccagatctggttatctcctaattctaagaggttgggtgaaggctagctcccaattgatggtgcaagagtgtgccattagggttttactctggttgggctgctctcggtggttggttcccttggatggatccggttttgcatggtgtcattaacaaacgatggcagtttttgtgtcatggtagtgtggtggtgcctggctgctgcctattgcgtgtagcatatgctgagtattgcctgaacatctgaatgagattgcatgggcatcatgttcagatgcgcatgctcctatgatctgattttctgtgtgggatggattcgtaagactgcatttgtgcttctgttaccttcctttctcggtggaatgttgttccatggttcagggaacgcaaatttctaggggaagtgtgtccttgtcttcttccgacttctgctgctttcatgtgtacatccgtctgcggtgactgtgacaaatggctattgttgtagtgttttttagtaatgcaagtgatgtaatgtgttctatcaacgagccaagtttgggcaaacaagttatcaaagctttgtttagttaaaccagttgccagcaaatgcctataagttggttgtgatctaatctggcaatgaaataattgcatcatatttgtcatgatctcttaagaattaatgatgacttaaacaaaaaagttatgattcttgcactacatctattttttatctcatcctggttccactgttttggtgcaccctgtttgcttcatcctgggcagtatacactccaagaacctgcaatttcatattttccaattttttaaattttcaaatgatgcccttctctctatatgattgttactgagaaaagattactaacttctgcagctgcatttggaggtgttcttcatgttgtttctacggctcttcttgggataactgcagttactatggcaaatactatagctggcgaagaaacagtgcataaacttgcctcgctgttgctgatttttcttggagcaagttatatcctcttgtttgccttaggaaaaggtggtcatagccatgcccataatcatccaatggaaaaaatggcagtcgccggtcttgtacttgtacctgcattatcaccttgtgcaacaactcttccagtttttcttgctgttggcaactcttcctcaatgatgattcttgcaatcattgtgctcctcttcagcaccatcacagtgatgacatccttggtggccctttcattctacggtgctagccagatcaagttccactgggtggagcgttacgacaagatcctcgtcggcacggtgctgtgccttgttggagtcttaacatatgtgttccatcatcacgatggtgatgagcatgtgcaccagaaactcgtatctccctagatgcatacatactgaagttccatctctgttgctccctatttgtatacaatcctgattatcgacttactctgccgctctggttttgctggagatacgtatcatctgatcaagtgaatatatttgagcaaactgcgtgaagtttgtatcgttgtggtggtagtggcctctttttcggcactctgaaatgaagatgagagcttaggttcagtggggtttttcgcaaattcggcccagtatactgcaaatagccgagccgggcctggggaaaacgcgcggcaggcagagcggccacgacgccgcccgtcgccgccgatccctttcgaccgctcgggtctccctgctccttcgcctttcctcctgaaatccagcgaccgaatccgatcgccttggcgcaggcgttcgatgggcaaccactaccagacgctgggtgtccggcaggacgccaccaaggctgaggtcaaggctgccttccgtcgcagcgcgctacgcgaccaccctgaccgccacgccggctccaccgacgcggccgcccgtgccgacgccgccagccggtttcgccaggcgtccgacgcgtactacgtcctctccgacgacagacgccgcgccgagtacgacctccgtcttcgcggttccacgtcttcctacgcgcgcacctcctcctctggttgggcctcctcgtcggcttcctacgggtacggccatggcggcggttcgtggcgacggactcctccgggtgcaggtgccggcgccggcgcctcggtggggtcaattgattgggaattcttactgaaggcggtcactcggcgagggttccttatcaatctgggattagccagtgtattgctatctggggcaacttttcttgattggactattttagaaatttggaagatgaataacaccgggaaatcatttgaggatgcgatggagaaggtcggaaagacgcaggaggtagatagagcttgaatctttttcatggtacattagtgtatatatatatacactaatgtacaaacctatgtgcatatcgatcgttgtccacatcctcctgatgttactttgtaatatgtatagatctgaacagttttttctatcacgactcacgagcttgtgcttgatccatagaacccctgctgtcgccgtcgtagaaactgaaccatgtaggttcttcgacagcgaaagctcaggttatgctctgattcttttgctgacgaaacgaagtaactgttgaataaattgctgtaattcaagtacgcttcgaggccagctacatggtcgcaggaataaaataataaaa

SEQ ID NO: 29767 - DNA, 1084 bp, Zea Mays
aaaaagggatttaattatagcaagatgtttttatctctatctaaattaatgaagcaaaaagtagcattgctgacccatgatcatcaggattacctatatcctccttgcctcttagaaggttcttagcctcaggatttcctctgttaggaccgatgagcactttgtgttaccttaaatgatacttggagcacatcgagacaaaaaggaacaaactcaagcagaacactataccgatgcatttgctgacaccatcacagtgatgacatccttggtggccctttcattctacggtgctagccagatcaagttccactgggtggagcgttacgacaagatcctcgtcggcacggtgctgtgccttgttggagtcttaacatatgtgttccatcatcacgatggtgatgagcatgtgcaccagaaactcgtatctccctagatgcatacatactgaagttccatctctgttgctccctatttgtatacaatcctgattatcgacttactctgccgctctggttttgctggagatacgtatcatctgatcaagtgaatatatttgagcaaactgcgtgaagtttgtatcgttgtggtggtagtggcctctttttcggcactctgaaatgtgtattgctatctggggcaacttttcttgattggactattttagaaatttggaagatgaataacaccgggaaatcatttgaggatgcgatggagaaggtcggaaagacgcaggaggtagatagagcttgaatctttttcatggtacattagtgtatatatatatacactaatgtacaaacctatgtgcatatcgatcgttgtccacatcctcctgatgttactttgtaatatgtatagatctgaacagttttttctatcacgactcacgagcttgtgcttgatccatagaacccctgctgtcgccgtcgtagaaactgaaccatgtaggttcttcgacagcgaaagctcaggttatgctctgattcttttgctgacgaaacgaagtaactgttgaataaattgctgtaattcaagtacgcttcgaggccagctacatggtcgcaggaataaaataataaaa

SEQ ID NO: 29768 - DNA, 971 bp, Zea Mays
agcacatctggagagaaatttcagacacatttgagtacactagactgtaagaagattcgattacatggaaacagaattatatttcgtaggcatcgtgtctcaggttctgaacagcgaaattggtaaacggggcaccacacgacacaaagccaaggcagggtggcggtgccgttcatacattcttgagcttcttcatcttggacggtggccacctgcccttcttcctaagcttcctcttgcggacgagccgcttgcgccgctgtctcagtttcttggcaagcttcatccgcgccctctgctccatgatcatcttctgcttcgactcgagcggcatttcctcgatcttggtcgcaggtttcggttcttctggctgctccgccgcaccagcctcagacccctcagccgtggcatggacaggagccgacctcttctcggcgaaagaagcgcaagtagcagtcacgttcagagggctctgtagggatgacaggttcttgcattgcagccttgaggctgcaacaacagtgataacgaaaaggcaaaccacttaaggcccggttattccttgttttgatatgaattggatgagattaaaaaagattataaagaattttaacttgctataaattcaaactcacctaataccgttcaaccaatccatatggatcgaaacgaacaggccctaataggatcttgtgcccacaaatttcacatatttcgatcctgaattcacatgtgggcctaacggagacatgggttcatgacagagaatgagacgttggcgacagcggagataggtcgggagcgaggagcagacggggagacgaaggatacgatcggcggggagaggaggagcgccatgggtgcgtttgaccttggccttcgagggataataatcggataagccttcgagggcagaaaatgtttcccgtccgatcggcactcaacggtcagatctcagtcatgcactcgtg

SEQ ID NO: 29769 - DNA, 1836 bp, Zea Mays
ataatttgctgagcctggggtctggattactagcttgctgctcagctgcctggcagtggcaggcagcatccaagcaggctcctaatgctgaaatgtaggggtttttttcaagcttgttgaatatgttcaaaattcacaactgctcgaactcggagagcgtgattatgctgcacgcgttgatttaacagctaaggtttatggtctacataaagcagaacagtatatcgagaaaattcctgcatctcataggagtgaggttgtgtatagaacacttctggcgaattgtgttgctgaaggcaatgtaaaaaaatcggagcaagtttttaataggatgaaggatcttggattcccagttacaacattttcttccaatcagcttctgctactctacaaaagattggacaagaaaaagattgctgatgttctcacaatgatggaaaaggaggatgtgaaaccatctatctttacttacaaggtccttgtagacgccaagggaatggttggagatgtagaagctatggagaaagtggttgaatcaatggtgaaagatggcattgagccagatctcacgtttaatgctacaattgccagacagtacatatttaatggtcagcgtgataaagcagagacacttttggagtcaatggagggtgatgatatccagaaaaaccgtgctgcttgcaagtttctattacctttatatgcttttctgggcaatggtgatgctgtggaaagaatttggaaggtgtgtgaggataatactcgtatagatgagtgcttgtctgctatagatgccttcggtaagcttggtaatgttgaaaaggcagagaaggtttttgaggatatgtttgtgaaatggaaaaacctctcttccaaatactacaccgctttgctaaaggtgtatgctaatcagaacctcttagacaagggtgaggaactagcaaagcggatggatgaggagggtgccaagtttgggaccccaactttgaatgcacttgtgaagctatatgctgacgctggagaggtggagaaagctgagtccctattgcacaagctatctctgaagaacaacgtcaagcccagttacagctcatacatgacactgcttgatagctactcgaagaaaggagacgtccacaactcggagaaagtgttcaacaagttgagacagataggctacactgggaggatcaggatgtaccagtttctgctccattcttatctacatgctaaggcccctgcgtatggattcaaagagaggatgaaggctgacaacattttccccaacagtgccgtggcaactctgattgccgctactgatccgttcgtcaagaagaaatcagtatcggacttgctcgattagattatggagtagtgtgaggtactgaggtccatcatgttgctatgcgcatgtgctgtttcgataagactgagtagtgtgagaatatatggtgagataataacgtcttagtcttgtaatgaactaccattgactttgcatttagactcatgcgctttgctgaacttgtgagtcatagaaacaggataaagtgcactagagaacttgtgctaattcttgatataatattttttgttatccatttcatttatccagtagaatcaagatgagccttcgcaaatccttttgcgattccaaatcccaattggcagctgtgtgctgaagtttgacggtggcttctgagacctgcagctgatgaaatagtttgcaagtttcttgacatgctcaacggctctgtggacggctgtttgccactgcgctgtgctggtctatcaatataggggggttacttttgtgctgtagttattgggttgctt

SEQ ID NO: 29770 - DNA, 2620 bp, Zea Mays
accaaactcgcttccctacaaacaaggacagcggcacgacgaagaaccaccagcttgaattttcccccataaatatccttctccgccacttgcaaattttcctattccatttcttcttcgtcctcgcaccagtccctcctccttggaagcgagggaggagagtggagggagagggaggagcgaggcaacggtgagctcgggaggcggcgtggggcttgcacgccggccctacccccagctcactcaccacgctcttctctcaccaactctctctctctcttatctccttccaagattcccccatttttttgttgttgtcccccccattcttgctaggatcattccttgatctttcgctcgctccagtacgcccgttttccagctccggagatcccatctcggccacctcctgcggtctccaagctccaagaggccagattccagcacaaatttgaggtcaatttgcccgctgagctcgaatcaatccgctcggcaacaagtgtcctttgttcccccgatccccgggcttcgattcgatcgaatccgacctaattttattgtgtgtgtgtgtgtgtttaaccttctctcgctgcacttttcctttctcctccctgtcgcaaacgcaaagtgggttccatcgcgtcacccgcacggctcctctgatcgggcggagaaagaaagcgcataaaaggcgagctcttgatgcggtcttggtcgtagcaacagcagctccactgctcccggcatcgcctgctgttgtttatccatatacggacggagcagcgggcgctccggcagaggcagtggcagcgcgctccccccgccagcgcgtgctgatgcttgcccccctgctcgccgccttcgctgtcgtcttcctgctcctcctgtccaggccatgcgcccgtgacatgagactgttcctcgcctccctgtgccagcagctcgtgctgtccctgctcgggttcctggcaggcctccgcctgctcagcggcgtcgcggccgcctccgcggccacagagaccatgccgctcatgccctccttcaagaggaagcgggccgcggccacggtggagaatgcggaggaggcggccgccacggccggcggcggcgagacgtcggtgctcgacctgccggagctggccatcgattgcattctggagaagctgcggccggcggagctgcggagcatggccgccgtctgccgctccatgcgcgagcgctgccgcggcgaccacctctgggagcggcacatgacaaacaggtggggccgtgtcctgggccgcgccgccagggacgaatggaggacgcacctggcttccgccagcgagtcccgcgccgcgggtggcggcggcaagcgccggaagtggctcgccgcgctgtcctgcgtttgcccggtggtgtcctggatgcggcccagggccgacggtggcaagtcgtccgcccccgttttggacgattccatcatgtcgtggtacctgtccgtggagagcggcaagttctggttcccggctcaggtctacaaccgcgagcacgggcatgttgggttcatgatgtcatgctatgatgcagcgctcagttacgatttccataccgacacattccgtgcaaggtacccaccacacggtcgacgaaccgtggtgttggaggatggcgtgcaatgggacagggtgagggcaccgcctgttgacacccttgcgcatgacctgcacacctctgactgcctgcatgagctccggcccggcgaccacatcgagattcagtggagaaggaacaaagaattcccatacgataccgtggtgctggagtttaatcagtacacgccgggctcaaggtggaggcaagcgttggtgaagcggaaggagcatagggaggagggcaacgagggcgacgggttctacggcggcataaggaagctccgcggcaaggatgacatctccaagtggaggcagctgtggccaacagacgtcctggagtaagcaggagccgcatcccttctcacaccgagattgatccatcgctcaaatgacacgcctttctttcatcatattgaccaaattcgtcgtctctgtcgcgctgttgtaaacgggttagcagaagaacacacagggtgacaacaaatccttgttcggttatttctaatacatatggattggatgagattggaaaaaattaagaagaagtttaacttgtttgcgattcaaacacatccaatctcattcaattcacatggattgagagctaaccgaacaagcctgtagttggacaagggtgtaacacttatttgtcaggcgtaccgggcacagaccgcttcctatttgttcgtggggatgtaactgtaagccttgtgacccctaagcagtctgcgtcttgtgcctgctgctgtagcggtagagcagagagagagatcaaatgtaaattacattttttagctcaaattcacgacaaattggttgtcctacctgcgtatgaacgcctgggacatctctcttcttcaggcagcagttttttttaaaatttttattttgcagaggaaatcttgtgtgctccagagtagtttgaatgggagagatttcgggtagacgtgtgctctagttcctgcttttgttttgagcacgagtag

SEQ ID NO: 29771 - DNA, 1338 bp, Zea Mays
gtctttctcatcatttactagctgccacttccatccatattgccaagcatagcttgctaattacagtagcactctttgtgctaatgactgaccttttattgttggattacatcccaatttggcttagtagtcctggcctcctgggcaggcttgcaatatacaccttaatttgcacgggcatgttgggttcatgatgtcatgctatgatgcagcgctcagttacgatttccataccgacacattccgtgcaaggtacccaccacacggtcgacgaaccgtggtgttggaggatggcgtgcaatgggacagggtgagggcaccgcctgttgacacccttgcgcatgacctgcacacctctgactgcctgcatgagctccggcccggcgaccacatcgagattcagtggagaaggaacaaagaattcccatacggctggtggtatggagttgttgggcacttggagtcatgtgatggaagcgaacacttttgtcggtgccatcttagtgataccgtggtgctggagtttaatcagtacacgccgggctcaaggtggaggcaagcgttggtgaagcggaaggagcatagggaggagggcaacgagggcgacgggttctacggcggcataaggaagctccgcggcaaggatgacatctccaagtggaggcagctgtggccaacagacgtcctggagtaagcaggagccgcatcccttctcacaccgagattgatccatcgctcaaatgacacgcctttctttcatcatattgaccaaattcgtcgtctctgtcgcgctgttgtaaacgggttagcagaagaacacacagggtgacaacaaatccttgttcggttatttctaatacatatggattggatgagattggaaaaaattaagaagaagtttaacttgtttgcgattcaaacacatccaatctcattcaattcacatggattgagagctaaccgaacaagcctgtagttggacaagggtgtaacacttatttgtcaggcgtaccgggcacagaccgcttcctatttgttcgtggggatgtaactgtaagccttgtgacccctaagcagtctgcgtcttgtgcctgctgctgtagcggtagagcagagagagagatcaaatgtaaattacattttttagctcaaattcacgacaaattggttgtcctacctgcgtatgaacgcctgggacatctctcttcttcaggcagcagttttttttaaaatttttattttgcagaggaaatcttgtgtgctccagagtagtttgaatgggagagatttcgggtagacgtgtgctctagttcctgcttttgttttgagcacgagtag

SEQ ID NO: 29772 - DNA, 1686 bp, Zea Mays
gcggagatttcggagaggctgtaaaccctaacttcatttctattctcctccccagccgccaggaagcaccggcgcctggccaacggcgcgcctcccttttcacttctttgtcttctgttttcgttctgtcacccgcgcagaacttcagccgccagggaactctggttcctggccgaccgagcccttcaattgggctgtgcgccacagagcccgagctgaccttttgctgtctcctttttttcgaaatctgttccgatttttgttcgtgatctgatcggttgtagtgatttctgccgagctctcagggataaaatccctttcattattttactgtttttttaaaataacgaactcggttcattagggcttctggaactcgatacgagttggggattctgtcctaactcctactccgagatcctctttctgtttggaactacaggagaaaacgacccccttcctccaatcgtatagagctcttgatattattaatttttttatttataccaccgcacagatcgaacctcggatttgttgtacccgagctctattatttttctgcgaatgaaatttctgtacctttgactgacaacgaatacatggattatattgataatgctctgtacacataatctgtacgtggtttctgttttattgactgtttcttgtctgtaaatttaaataaaattccgagctactgtgatctctttttgtccctgtttacagatgtaccgattagggttaggtcgtaaaccctaaccctaaacagtgtgtctctatctctttttgtgatctctttttgtccctgtttacatggaacccaaagggccatagaacacaccctaaactaagctaggatcaccttggtctgtgctggccacgaggagatagagaatcggccggcgtggtcacctatggcggggaagaagatggacaaccacctcggccatgcactcggcaagatcatgaccaactggatgacatgataacaaactgaacaatcacacgctagacttatatagtgactgtaagacggtggagaagtggctccaaactgagagacatagcaatggggaggacaaaagaaaacttctgcgcttgttcctattgtgataacaaggcctcaaccaaccagtagaggtatgagctgggacacgcatccttgttgcatgggcagcacgtggaggaaataaaatacagtaaagcgatagatttccccatcggcgtgcaaaactaaggacagacagacagggggaatcaccgtggataatcatagtgcgctgatatttaccacatggaactcccaggcccacccacatcttacctcccacaacccgcatcttacctcccacacatcagaagaaactagagcccgtagtggcatcagatttttttagatctttattgaaccaatctctgaagtctgaactctaactgcaccttcctctgttcagtcttttttttcacacattctaaacaagggaaggccaaactcaattgagcaactttgctctccaattatagatcttcaggttgattataatatcccagggccaaaaacatatggatcataagttataatgccctaaagtcaacacagttcactgaattttagttttagttaactgaaataaccacatattggtagcagaaatttgagagcactttactgcaggttttacacag

SEQ ID NO: 29773 - DNA, 742 bp, Zea Mays
ctgatccctgcttacgcgcgctccctgcccagtgctgccccttacccctgctcggcttcaacaccgaggcccatatccagcgccacctaatccctccctcattcatgggcatcgtcggctggacctccctaatggttacgtgtgcatctccgtgctccatcatcccatcatggaactcaagcaccgacagcgcccccatctactgcccacctcgctgatcggcgagctcaatcgtgtgcgcgtccctgcttccctctattgccgactgtcgttgaccccggcatggggctcgtccctgcgctcggccttcctctacgcgaacgcgcagagctgtgcctgtcgtgtgctcgtctcagccgagcaccgtttgccccagcgtcactcgcccatggtcgccggttcgtcctcagccctggatgccattcttttccgctcacctcacccagcgccggtccggccgctgtctccggtcttgtccttgtttacacggatcatcgtgggcacgtgctgtggcagcgccttggtggctgtcgagcagcgcaccatgcctgcgcagtctcagccatgaagtcgtccatcatgttcggtgcactctaggtattcgacaaaatagaaccaaggaactgtcgtcattcaaacagcttcgccgcgtcttgcatccccgccgaggagtggatgatttgatcaagtaccagtattggagatgctcaacaagtggtcttcatctaacaaacactaacct

SEQ ID NO: 29774 - DNA, 796 bp, Zea Mays
ctgatccctgcttacgcgcgctccctgcccagtgctgccccttacccctgctcggcttcaacaccgaggcccatatccagcgccacctaatccctccctcattcatgggcatcgtcggctggacctccctaatggttacgtgtgcatctccgtgctccatcatcccatcatggaactcaagcaccgacagcgcccccatctactgcccacctcgctgatcggcgagctcaatcgtgtgcgcgtccctgcttccctctattgccgactgtcgttgaccccggcatggggctcgtccctgcgctcggccttcctctacgcgaacgcgcagagctgtgcctgtcgtgtgctcgtctcagccgagcaccgtttgccccagcgtcactcgcccatggtcgccggttcgtcctcagccctggatgccattcttttccgctcacctcacccagcgccggtccggccgctgtctccggtcttgtccttgtttacacggatcatcgtgggcacgtgctgtggcagcgccttggtggctgtcgagcagcgcaccatgcctgcgcagtctcagccatgaagtcgtccatcatgttcggtgcactctaggtattcgacaaaatagaaccaaggaactgtcgtcattcaaacagcttcgccgcgtcttgcatccccgccgatgtggaggaaaagcgttggattaatcccaaagtgatgctgatgcataaaccagaggagtggatgatttgatcaagtaccagtattggagatgctcaacaagtggtcttcatctaacaaacactaacct

SEQ ID NO: 29775 - DNA, 1789 bp, Zea Mays
ctgatccctgcttacgcgcgctccctgcccagtgctgccccttacccctgctcggcttcaacaccgaggcccatatccagcgccacctaatccctccctcattcatgggcatcgtcggctggacctccctaatggttacgtgtgcatctccgtgctccatcatcccatcatggaactcaagcaccgacagcgcccccatctactgcccacctcgctgatcggcgagctcaatcgtgtgcgcgtccctgcttccctctattgccgactgtcgttgaccccggcatggggctcgtccctgcgctcggccttcctctacgcgaacgcgcagagctgtgcctgtcgtgtgctcgtctcagccgagcaccgtttgccccagcgtcactcgcccatggtcgccggttcgtcctcagccctggatgccattcttttccgctcacctcacccagcgccggtccggccgctgtctccggtcttgtccttgtttacacggatcatcgtgggcacgtgctgtggcagcgccttggtggctgtcgagcagcgcaccatgcctgcgcagtctcagccatgaagtcgtccatcatgttcggtgcactctaggtattcgacaaaatagaaccaaggaactgtcgtcattcaaacagcttcgccgcgtcttgcatccccgccggtccttgttcgctgtccgcctggtgcgcgatgaaaggctcgaactgggcatcgttgtcaatctcgtggtttcgagtccgatttagataatagtagccgattcgttacttccgctattggtcggatgaatttagttaaacataatagttgtgtcgtttctcttgtcgatagcatgtgcattgtggtcataaggataatgtttattgcaatgttcgagtcgcttgcggtgatatggtcgtgtgaatggtcgaatgcttgttgaaataccgcagtggcgaggagtgtttgggtagacatgtaggcttaatgtgttagtgttggaaatggtaaattaaccgctatgcttggtgaagtatatgtttgaggttcatatgatagtagagtgtttggtaagcaagtatgtgacatatagtcaagcttagattaaaaatgcaaagtggatgcaagatgattaaattagtaattaattaggcatatgtgagtaaaactgccttaggtatttagcgtattgaggatacagtttcgcggggctccatgctagttgataatgagttgtctgctagatctaaaactaatgtgatattcatgtaattagcgtgttatccaaattagtttgaacaagtggtttagaaagtcagttaatgtgcttctatccttattctaaatttagatgtctaagattaatgattctaagtttgttagtcttctggtgttctataatattaagtctagttttagatgttatgctctactttgaggcctatgttcaattattgttaatttgatgtttgaattaagtatgattatctcgaagattagaattatcgtaaagtcatagttatctagtgtgtgctcataggagttatgatgtatcatcactaagtgtttagttcgcttccgtgaagcattatttattcttgctattccttcttatgttgttatgttcatacatgcgcattatgcatatcattgaggtacgttaattgatcacaagatgtggaggaaaagcgttggattaatcccaaagtgatgctgatgcataaaccagaggagtggatgatttgatcaagtaccagtattggagatgctcaacaagtggtcttcatctaacaaacactaacct

SEQ ID NO: 29776 - DNA, 291 bp, Zea Mays
atgctcagcctcggcctcctgctctgcagcagcggtggggggaccgaacttgccaaccctaccggtggcaaccgccgcatagtactcgaaccggcgcggtgggggccagggtgctgcgacgaagaacgccacgtggggaggcggcgcgaacaaacacactaccttctgttgcggagggggaggggcaccgcggcagcgcggggcacgaactcctgcgcctgcacgttgaggcgactggtggagccggtccgcgggagacctcccagccgctcatccgtcactcagccgtgg

SEQ ID NO: 29777 - DNA, 805 bp, Zea Mays
ccacactcgccctcgccagttcctcgccagaattttgtctgagctccttcgtccgcttttcgtcctcggcgcacggccaccgtggccagcgctgcccaagccatcctagtcttgaccaagaaccccgacacacacttagagccccatgaagcttttccactcgctcccccactcactaccactctgaactggcttgtcaccgctcaccggagcccacagccccacacctccaccgacgaatgtggacaggccagcccagaccaccactgcccaacgggtagctctgccacacttcgatgaagctcctcgaccgaccaatttgagtgctaccgccaccattgacgagccgaattactcgttgtcgtcgatctccgccacctacgcacttggatcgggtagctctgatcacctcctgcaacgatcaacacctcgacgtgaccgcctcggactccccgacttcaccatccctctaccggagctctatcgccactgcaggaagccaatgcaaacgggaaagatggctgaaatttactcacagcaaacacgttcttcagaattgaggctatgttaacaagtattttgagctccaggccgtgtagattggacatgaatggatatgttatgagaagaattatggacaagatctgcaaagcaaacatgtatttaaattcggtacttgaaaacaagttatctaacaaagacaagactacttaggtctcttttacaaaaatgaactggaaccccccctccctacagtttctgttgagcatttttttcctccgatactggcacactattctattat

SEQ ID NO: 29778 - DNA, 1813 bp, Zea Mays
atgatgatgtcatcagagaattcttcggcggccggcgcggcggacgacgagtcgaggctggagccgtggcgcgagctcttccgcgatcgcgacatctacgacgtgatcagcaaagccatcctcgtcgccgccaccgactcgccgcaggagttccggcgccgccgtgacggcatcgtggagcagatatacaccgcgccgaccgtgccggttccgcagggaagggccgcgggcgagcgcagcggcagagcagcgctggaggtgtcggataagggaagcaaagtggcgagctgcacggtcgtcgcgccagcagatgaaggtaacaacagcaagaagaagggcaccgccgctgcccatcatcagcacgcaaatggcaacggtgacagcgccgacactgacgccttcggtgcgagtgggatggactggctgcagtctcttgctgaagagatggacgcagaaacccagcagatcgatgaggttcttcggatcaaggaaatcctcctgaatcaccatgagctgtcatctgacaccttgttcgattcactgaggaggctacagctgatgcagctcactgcggataaaatcaagagtactgaaattgggggtgcaattgcggcaatgaggaagcacaagtcacataaaatcaggatgcttgtgcacaaaatcgtcaaggactggaaagctatcgttgatgattgggttgctgctacaaaagctacgatggatagtggctcaaataaacatatggatacatcggatacagttagcacagaagatggaggactagctactccacctatggacattggagcactctatcttgtgagccatggaacagaaatccaaaatgtctccgagttccttcacggcatggacgacgacgataggataacaggaaaaaggaggccgtctaggaacatgagcccgccagtaacacacaagaaaacgacacaggagcaaggatcgcaagcccctcgtgtgcgcatcaaagttaggcactctagtactgaacacgcacgatgggtactttctaaaaggagttctgttgagaagaaatcctttgaggagaatcatggtacagttacaagaatttctcctgttcttgaagagggggagctgccgtcaggccacgtccttcttgagaaaaatgggatgccaacccaatcatcagctggaccggaggtagggatatggaagaggaagaggaacgctcagttaactgaaatggacatggatgagacgaagcgcaagctccgtggagcttaccaggaagcagaaaactcgaaacagagacgtgcaatccaagtagtggagctgcgtgacattgcaagatcgagagacaataagcacgtaattcgctgcaggaacccttccacgaagtcaatggatctcaccaacaggacccacacgacgaacccaagttagataatcaagagttgggaaaatgatcggtggaaatgagagtattattgtactgttggtgtttgttcctctaaattatctgctttttggtgatccatgtagattaattatagttctactgcgctgttagtattatttatatctccaatctagactagtcgctttttggtattgtgggattacagttgtgtaatccttgtttaggagattctttagacagtgatattgtaaacacacgcgatcacccaggatagtttctctcacgacgagtcaattcgctcgttatctcagaccgacgatcagggatcgtgaccgccgccagttcgccgtatttgtacaacctactgttcagcgaattggacaaaggtttatatatgaatctattacaaatggg

SEQ ID NO: 29779 - DNA, 1755 bp, Zea Mays
ctgaattcactttctgcagagggggcaaaagggtaaagttcttctaccaccgagcgaaccccagcacaccaggtccagtgcccagcctccgtccctctccttcccttacctcgcctcgtctcctctccttgagatctccagggtacgagcgcattcgcgattttggccgcctccgccgccgtccggggagatggcgggtctgggaaaggcgatgtacgcggtggggttctggatccgggagactggccaggccctcgaccgcctgggctgccgcctgcagggcaagtacttcttccacgagcagatttcaaggcatcgcaccatcatgaatatctttgacaaaacccctcatgtgcataaagacgcatttgttgctccaagtgcatcccttattggcgatgttcaagtcgggtcaggagcttccatttggtatgggtgcgtcttaagaggggatgcaaacatcatacaaattggatctgggaccaatatacaagacaattctcttatacatgtggctaaatctaatctaagtgggaaggtctttccaacaaccattggtaataacgtcacagtaggtcatagtgctgtgttacaaggatgcacggttgaggatgaggcttttgttggcattggggcaaccctattagatggtgttgttgttgaaaagcacggaatggtggctgctggagccctcgtacgacagaatactaggatcccttgtggagaggttgagcacacttcctcaactgtcctttgctttgggttcttaattaagccgtctcaagcacctttaccttttttatttcatcgactagtttcaccaagacagggttttcttgtgatgatggaaccccaatgacacagactgcatcgagcactaaattattgttcttcggtgtctaatacatttccatgtggcatacatatttacaggccttgtgcagtggtgactgatgagagagctgtctcactgggtcgcaggttcgaagcagtctctccccatttacggggagaagacttgcctccgtttatgccttcattggatcccactcatgtgggaacctcgggcactgggtctgccctttatacatatttatagtgtccatgagtgggaagtggaacaataatatgctctagaggccttgttttgtatcttatttctgcatgatttcatgactatgctttgttggatttaggtatggggagggaaccctgccaaatttctgaggaagctcacagatgacgagatcagtttcattgcggaatcagctgccaactattccaatctgtccaaggtccatgctgctgagaatgccaaacctcttgaaaagatcgagtttgagaaggtgttgggcaagaagtttgctcaccaggatgagtatgattcctcgattggcgtcgctgaaggggcaccaccagagctcacgtccccaaatccagcccaatgaacctctgtttctgttttctctttggcgccttaatcattttctgttggacagtgctggatcgttgatcgggattctgtattcggcatgtttaagatgtgctcccttgaaagacagaccccaaatagacagaaatgcattgtttttacaggtaaacaaacatatgctcaaccaaagtcaacgtatgaaatggtccagaataagactatgcggccaaccaatcatatgatatatgtcgttgtctgcttattgttaatttgacgtgttagtgaggagtgcaaccataattcccaggtgatcacgacctact

SEQ ID NO: 29780 - DNA, 1271 bp, Zea Mays
cactttctgcagagggggcaaaagggtaaagttcttctaccaccgagcgaaccccagcacaccaggtccagtgcccagcctccgtccctctccttcccttacctcgcctcgtctcctctccttgagatctccagggtacgagcgcattcgcgattttggccgcctccgccgccgtccggggagatggcgggtctgggaaaggcgatgtacgcggtggggttctggatccgggagactggccaggccctcgaccgcctgggctgccgcctgcagggcaagtacttcttccacgagcagatttcaaggcatcgcaccatcatgaatatctttgacaaaacccctcatgtgcataaagacgcatttgttgctccaagtgcatcccttattggcgatgttcaagtcgggtcaggagcttccatttggtatgggtgcgtcttaagaggggatgcaaacatcatacaaattggatctgggaccaatatacaagacaattctcttatacatgtggctaaatctaatctaagtgggaaggtctttccaacaaccattggtaataacgtcacagtaggtcatagtgctgtgttacaaggatgcacggttgaggatgaggcttttgttggcattggggcaaccctattagatggtgttgttgttgaaaagcacggaatggtggctgctggagccctcgtacgacagaatactaggatcccttgtggagaggtatggggagggaaccctgccaaatttctgaggaagctcacagatgacgagatcagtttcattgcggaatcagctgccaactattccaatctgtccaaggtccatgctgctgagaatgccaaacctcttgaaaagatcgagtttgagaaggtgttgggcaagaagtttgctcaccaggatgagtatgattcctcgattggcgtcgctgaaggggcaccaccagagctcacgtccccaaatccagcccaatgaacctctgtttctgttttctctttggcgccttaatcattttctgttggacagtgctggatcgttgatcggggtactgttccatgacactggtggtttatgtttacttttcctccccaataatcttgggtcgagcgatgttataaagctggccatgcacttcttccagattctgtattcggcatgtttaagatgtgctcccttgaaagacagaccccaaatagacagaaatgcattgtttttacagaaatgagtgcatgccgccttaccatgagcggcagtgactcaaatgagaatatttt

SEQ ID NO: 29781 - DNA, 1375 bp, Zea Mays
cactttctgcagagggggcaaaagggtaaagttcttctaccaccgagcgaaccccagcacaccaggtccagtgcccagcctccgtccctctccttcccttacctcgcctcgtctcctctccttgagatctccagggtacgagcgcattcgcgattttggccgcctccgccgccgtccggggagatggcgggtctgggaaaggcgatgtacgcggtggggttctggatccgggagactggccaggccctcgaccgcctgggctgccgcctgcagggcaagtacttcttccacgagcagatttcaaggcatcgcaccatcatgaatatctttgacaaaacccctcatgtgcataaagacgcatttgttgctccaagtgcatcccttattggcgatgttcaagtcgggtcaggagcttccatttggtatgggtgcgtcttaagaggggatgcaaacatcatacaaattggatctgggaccaatatacaagacaattctcttatacatgtggctaaatctaatctaagtgggaaggtctttccaacaaccattggtaataacgtcacagtaggtcatagtgctgtgttacaaggatgcacggttgaggatgaggcttttgttggcattggggcaaccctattagatggtgttgttgttgaaaagcacggaatggtggctgctggagccctcgtacgacagaatactaggatcccttgtggagaggtatggggagggaaccctgccaaatttctgaggaagctcacagatgacgagatcagtttcattgcggaatcagctgccaactattccaatctgtccaaggtccatgctgctgagaatgccaaacctcttgaaaagatcgagtttgagaaggtgttgggcaagaagtttgctcaccaggatgagtatgattcctcgattggcgtcgctgaaggggcaccaccagagctcacgtccccaaatccagcccaatgaacctctgtttctgttttctctttggcgccttaatcattttctgttggacagtgctggatcgttgatcggggtactgttccatgacactggtggtttatgtttacttttcctccccaataatcttgggtcgagcgatgttataaagctggccatgcacttcttccagattctgtattcggcatgtttaagatgtgctcccttgaaagacagaccccaaatagacagaaatgcattgtttttacaggtaaacaaacatatgctcaaccaaagtcaacgtatgaaatggtccagaataagactatgcggccaaccaatcatatgatatatgtcgttgtctgcttattgttaatttgacgtgttagtgaggagtgcaaccataattcccaggtgatcacgacctact

SEQ ID NO: 29782 - DNA, 1867 bp, Zea Mays
ccgaatttcattttattggccaaaatttgttttttgtattttatattttgaatcgaaatctatttaaaatccgaacgaaatctatttgtcggctagtagcgaaaacaaaaaaaaatagcgagaaaataaaccgtgggtatttctaaacccgatatccatcagtcaactgtcaatacgtggatgggcggagtggggaggaagaaggcacaggaggttgggttggaattggatgggaacgccggaacggcaccgattcctctccgcagcagcacaaggccccgtgcggccgtgccggcttcccctgccccccgtctctctctcctccatctccttgctgacacctttgcgtgccctgtggttctgatccgatctatccatcatccaaggccgcctccatcctgtccctgcttctcgcgcgcgcatgcacgctaggagggaggataggaatggcgacggaggtaaaccgggacgccaacgctgacgaccctcctctgccgcaaccggccccttccccgtcgtcggaggggaaggatgccaacaacatcagggacagggtatccttctcgtcgtcctcctccagagcggcccgcccttcgtgctggggaagcatcagaatcattcatcggtttggccggatccggagccggagcctgagcagaatgggcagcgacgagcacgacacgcgcgcaagcctcgggggtcgtgggcgccgctgcggttgcggttgcgtttgcagcggcggcaaggcgggtgcagcggtcgggccgacgaggtccctcctccagcgcaacgatttctactgcgacgattgcaacacgcacgcgtaggagacgtcccttcagctttctgctgcttcatcagattttgcccatggtgtatgttgtgcatctgaatctgatcaggagcgattcaagttttgtagtgcttcatcattttagatagccggtgttttcgctatactgtttcagttacgtatttgttgcctgaaatgtccgtagtagcaatcatttaggcagatcagtttatcctagaacatgaacaactaagaactgtttgattcctttagtcatctgactaaactttagtttaatcactaaaataactcgtttggtttcagtgactaaacttgactaaaaaacattaattgaagtgaataataattgctttacctctattaattagtggatgtctgctgcactaagaaagagaagaggacaagtgagataaaaatacttctttagtctcttttagtcacctccttagtgactagataacttaattttagtcattccactttagtcatcatatttgcttcttcagggactaaaagtgactaaattttagttgcccccaaaccaaaagagaactctgctacagaataaggcttgaagatctcgtagtggtgattaattgaaggaaaaataaacagatccaagctatgtatattataaggagattggcatgaaacagataacaagtgactgatgcaaagaatcgattcctacccactagcacgaaaaggcttctactcggggtacttcgattacaatgacagctgaaataataactcatacagaactggacaaatctactctacttttccaagtctctggagacaatcaaaagaatgtggatcagtagcaaaccccatcccggtggtgtggggaagtataatctaatccaagtaacctttcatcgtcggaacgctcaaagaacgagagatttgctatcttaccgttattatcagtgagcttcgaaaattttaccatcgggctcataaatcataaacatagatggatacacaaatcataagcataaacaaccgacgtaatagtaagaaggcaacagtcacagcggtaaaagatcg

SEQ ID NO: 29783 - DNA, 1991 bp, Zea Mays
aatccaatgccacgtgcggctctctctcacctgtctcattctcacccacgcgcttctctctctcaccagcaggccgcgccgccgccgcaccatcactctccggatcatcggccatccacctcctcctcctcctcgcccgctcaccggccatccctgctgcggtgtcgcgcgttcatgcaggaggccgccgacggcaacggcgacccgactgaggccgacgtgcggaagcgcaggaagggcccgttgtagaagctcaaggcggcgatccagggcctcgcgggatctcgctccgccgccgcggaggtgtacgggggagagtaccagttccagcgcgccgtcgagaatttgtgcgagccaaggttccccaatccactcgcgcgcgcgcatcgctgtggtttcctgtgttgcttccaccctcgcgcgctcttcttcttcatggagccatggcaggaagcggcaacaggagatttggccaggatatggtgtctagcagcacacatttctcccagtggcagatggtctgggttggagaccacgttcctggcggcagagtcgatctgcaatgtggaggtccaatctggccacctatgtcagctcgctctggagctaattccgattccctagcagtgacgacgttcagatgcagcttcagatgcagcgacgacctctctctccatccatggatttctaggcgactgggaaccaggcatcgaaatgaagggaaccaggaatcgaaacggccccgagaatcccaaagcacgagaaggggaacaagggaactaggcatcgtgaagagagcccggggtgatgaattgttacggttcatggacggagcaagcaaggagcctctccgcaagcactgccggtccagtcactgttcccttatctatacttcatgggacttgaaagtggcgactggcgaaagaggagcaagacattgggttttatgctggttttgttggggctacctatttccttggaagggccatcagcgccgtgccatggggcatgttcgctgacaagaatggaaggaagccaggcattgtgatcagcatcctctcagtgattgtgttcaacacactgtttggacttagcacaacttactggatggcaattgtgactaggggattacttgggttgctatgtggtatacttggacccatcaaggcttatgcttcagaagtctgcaggaaagagcaccaagctttgggaatctctcttgttacatcttcacgagccatagctcttgttattgggcctgctattggaggcttccttgcacaggtgaagattatggaatttagatagcagtataagttaaattcgaaatgctaatgagtgccttcatcatgtatcccttaatcataactgacctctgatgtgtaaaaaaagggatagtggccgacaaaaatatttctagcatcaggaaggtaaattatttctagtagtacaatttctagcatttaactatttcattgtttttagacgactattataaaccttcaaaaattatgcatctaattttcaggtttccatacttccttccttgctttgtaatatcgttgctagcagcaggatcatgtattgcatgcatttggcttccggtatgccatatcatcttccctattattttctatcttgaatccaaatagttagatcctcttaagaaaataaaagaaaactctgacaacctatagaggtatgacagctccagacatagcatgatagagaagaccttctcacctatacgactataccaagaaaagaaccgtgcctcatccatacaaacaagatttgttaacccaacataaaattcactcctataaaaatttgaactagaaaggctactaaagggcctaaaaacgaaatatgtttggacttatgtttctccactcaatatacctattttctagttagataaaaaatcgttcttttgaatctagatagaattggcaatatacctattttcctacacatccaatggggccttg

SEQ ID NO: 29784 - DNA, 1114 bp, Zea Mays
gtcacaaaccgaggcccagcaaaatttccccgttcttgcttcccctccgtgtccactctcgatcttcccttccccctcggcgccggtctccaaacccgcttccgcaattcgtaccgcttccggttccgggggcgggcgggcagcaccgtctcggctctcggatactatggcttccggcgaggggtgggaggcggcggtgcgggcggaggtgggcgccgttgcctggtgggacgacctggacagcgccgacctccgcgccaggttcaaggccttcacggggcagcgcagcgactggcctcagcccacggtcctcttctggaaggaccttctcctccgcgtcgccaggcgactccgcgtctgctccgcccctgcccaccacgtgacgagcgcttggttcgcgcgccccggggggctcacgccgctatgcttgccgcaagttctggaagagatgcgtgcggatggggacgtactgctgaaatccgagctgattgatccatcctcaacgaacctgcaccagctggtcaggagggtgagactcatgaccatcagctccaggaaggcggtttggcaggaggatatcctcgtgttcaaattgttgattgagttgattgcaggaacgagctgccgatattgctaggcaattgagtgactctcattggacatcgacatgtgttgtcacgattagcaaattcaatagcttctttgttgacatggatgatgctcatattgcattatgttttttgacgcaacatgggaaagctaggtaccttttgggcaggaaacaagaccctattgagggtgtcaaggttgcactcactgcttcacaagttcctgctgtatccaaacttgaccatgacaccttgcacttagtctggacagaagagaagttgcaagaacagcttgatgtgcttgatcgacgatgggagatttcaaggcgaagggcattggcatccttcaagtctggagataaactagctgcttatcgttatgtgaggcagtctaaattattctcacaaagccggagcagatgcacacagttgttggaaaggattgaagaagtcatcagcctaattgctagtgctgaatcaaataagaagtctgtacatgatactag

SEQ ID NO: 29785 - DNA, 2801 bp, Zea Mays
gtcacaaaccgaggcccagcaaaatttccccgttcttgcttcccctccgtgtccactctcgatcttcccttccccctcggcgccggtctccaaacccgcttccgcaattcgtaccgcttccggttccgggggcgggcgggcagcaccgtctcggctctcggatactatggcttccggcgaggggtgggaggcggcggtgcgggcggaggtgggcgccgttgcctggtgggacgacctggacagcgccgacctccgcgccaggttcaaggccttcacggggcagcgcagcgactggcctcagcccacggtcctcttctggaaggaccttctcctccgcgtcgccaggcgactccgcgtctgctccgcccctgcccaccacgtgacgagcgcttggttcgcgcgccccggggggctcacgccgctatgcttgccgcaagttctggaagagatgcgtgcggatggggacgtactgctgaaatccgagctgattgatccatcctcaacgaacctgcaccagctggtcaggagggtgagactcatgaccatcagctccaggaaggcggtttggcaggaggatatcctcgtgttcaaattgttgattgagttgattgcaggaacgagctgccgatattgctaggcaattgagtgactctcattggacatcgacatgtgttgtcacgattagcaaattcaatagcttctttgttgacatggatgatgctcatattgcattatgttttttgacgcaacatgggaaagctaggtaccttttgggcaggaaacaagaccctattgagggtgtcaaggttgcactcactgcttcacaagttcctgctgtatccaaacttgaccatgacaccttgcacttagtctggacagaagagaagttgcaagaacagcttgatgtgcttgatcgacgatgggagatttcaaggcgaagggcattggcatccttcaagtctggagataaactagctgcttatcgttatgtgaggcagtctaaattattctcacaaagccggagcagatgcacacagttgttggaaaggattgaagaagtcatcagcctaattgctagtgctgaatcaaataagaaggtttatgaggcaatacaaattggtatcctggcaatgaaggacaacactgtcagcatagatgaggttaacatccacatgaaggagattgatgagcttgttgctgcacaaagagaagttgatgctgcccttgtaccactccagtcgttagatgatgaaggagatattgatgaagagttcagcaagcttgaagcagaattgcaggatgacgtccctcatattcatgttcaagaaccaatggcaccttccaacgaggaatcacctgatgaagtggttgaatcattgagccataacatgtcaagaattagactggagcccatctaaatgctccattttacgtttaatcaatttgacctgtacatagtgtgatctagtcaaatcatctagtcccaacaatgtgtcttatgtttcttgttacaccatccttataaaagggcaattctgttgcagatattcctcaatgttgcctgctgttttattgagcctccatggttcacctcctacattttttttgaaacggtggtttcaataccctaaaaacttagttcatatactgtttgatgcatatcgtttagtgactggcattttactttattttctcgatttcagcgcttatgctgtccataaatttagttattttcagtgcactgaatctgtggttcatatttgtatatggcatctattggagaaattgaagaacacatcttatcataggagaatcttgtgtaaatggtatagggttttttaggaatcaatgaaatgtatcactctttgtgatgttgatttgtattgtggcaggttttaagttcatcctttcataaagttgacttcctacaaaaatgaactgtctttgttgaactgtgacccgttcttatcattgctacctcaatggtgatggaaaagggagaagaatggatggatcatctgcaggtgcctctcattaagtattggcaacataagtgatttgtctgagatctattctatcttcatgatgatgctggcctttccggaccagtctttctccatatgagagagttgatcagggcatggataggtgctgactgctgaccaaaagaacaagtcgggatggagtagtaaaatatctgttatacaaaagcagaggaggaaaagaaaagataggcgtaggataagctggcaaggcacatagcatttcctcgatttgaggggatcaagatccatcaatggacgatctgaagataggcctgaaaactgacgacaacacctagtcctgaatgataagacctgaattattggaggggactttgcttgtgctttctccacatgcatagatgcatgaatgtatcagatgcctgtccacaccagtcttcaaagttatgtcacatcacgaataaaataggtagggaaaagcaatcctgtacctccatcaagtgatacaataatgttagataccataactagcttatcctcttacacagtttactgtagagtgatttgtgtgcaatggaaaacataagattaaaatgccagggcagatgactagtactagcagtacaccgtgatgcatgctttctttttctaggccaaagatgtacgtactttaagactttatcaagtccagcatttcagattaaaatttagccccaccttttcatttttgcattgtacttgctgcatgctgggccctgaacttattttagtattgttgagtataatatgcgatttata

SEQ ID NO: 29786 - DNA, 2712 bp, Zea Mays
gtcacaaaccgaggcccagcaaaatttccccgttcttgcttcccctccgtgtccactctcgatcttcccttccccctcggcgccggtctccaaacccgcttccgcaattcgtaccgcttccggttccgggggcgggcgggcagcaccgtctcggctctcggatactatggcttccggcgaggggtgggaggcggcggtgcgggcggaggtgggcgccgttgcctggtgggacgacctggacagcgccgacctccgcgccaggttcaaggccttcacggggcagcgcagcgactggcctcagcccacggtcctcttctggaaggaccttctcctccgcgtcgccaggcgactccgcgtctgctccgcccctgcccaccacgtgacgagcgcttggttcgcgcgccccggggggctcacgccgctatgcttgccgcaagttctggaagagatgcgtgcggatggggacgtactgctgaaatccgagctgattgatccatcctcaacgaacctgcaccagctggtcaggagggtgagactcatgaccatcagctccaggaaggcggtttggcaggaggatatcctcgtgttcaaattgttgattgaggaacgagctgccgatattgctaggcaattgagtgactctcattggacatcgacatgtgttgtcacgattagcaaattcaatagcttctttgttgacatggatgatgctcatattgcattatgttttttgacgcaacatgggaaagctaggtaccttttgggcaggaaacaagaccctattgagggtgtcaaggttgcactcactgcttcacaagttcctgctgtatccaaacttgaccatgacaccttgcacttagtctggacagaagagaagttgcaagaacagcttgatgtgcttgatcgacgatgggagatttcaaggcgaagggcattggcatccttcaagtctggagataaactagctgcttatcgttatgtgaggcagtctaaattattctcacaaagccggagcagatgcacacagttgttggaaaggattgaagaagtcatcagcctaattgctagtgctgaatcaaataagaaggtttatgaggcaatacaaattggtatcctggcaatgaaggacaacactgtcagcatagatgaggttaacatccacatgaaggagattgatgagcttgttgctgcacaaagagaagttgatgctgcccttgtaccactccagtcgttagatgatgaaggagatattgatgaagagttcagcaagcttgaagcagaattgcaggatgacgtccctcatattcatgttcaagaaccaatggcaccttccaacgaggaatcacctgatgaagtggttgaatcattgagccataacatgtcaagaattagactggagcccatctaaatgctccattttacgtttaatcaatttgacctgtacatagtgtgatctagtcaaatcatctagtcccaacaatgtgtcttatgtttcttgttacaccatccttataaaagggcaattctgttgcagatattcctcaatgttgcctgctgttttattgagcctccatggttcacctcctacattttttttgaaacggtggtttcaataccctaaaaacttagttcatatactgtttgatgcatatcgtttagtgactggcattttactttattttctcgatttcagcgcttatgctgtccataaatttagttattttcagtgcactgaatctgtggttcatatttgtatatggcatctattggagaaattgaagaacacatcttatcataggagaatcttgtgtaaatggtatagggttttttaggaatcaatgaaatgtatcactctttgtgatgttgatttgtattgtggcaggttttaagttcatcctttcataaagttgacttcctacaaaaatgaactgtctttgttgaactgtgacccgttcttatcattgctacctcaatggtgatggaaaagggagaagaatggatggatcatctgcaggtgcctctcattaagtattggcaacataagtgatttgtctgagatctattctatcttcatgatgatgctggcctttccggaccagtctttctccatatgagagagttgatcagggcatggataggtgctgactgctgaccaaaagaacaagtcgggatggagtagtaaaatatctgttatacaaaagcagaggaggaaaagaaaagataggcgtaggataagctggcaaggcacatagcatttcctcgatttgaggggatcaagatccatcaatggacgatctgaagataggcctgaaaactgacgacaacacctagtcctgaatgataagacctgaattattggaggggactttgcttgtgctttctccacatgcatagatgcatgaatgtatcagatgcctgtccacaccagtcttcaaagttatgtcacatcacgaataaaatagtttactgtagagtgatttgtgtgcaatggaaaacataagattaaaatgccagggcagatgactagtactagcagtacaccgtgatgcatgctttctttttctaggccaaagatgtacgtactttaagactttatcaagtccagcatttcagattaaaatttagccccaccttttcatttttgcattgtacttgctgcatgctgggccctgaacttattttagtattgttgagtataatatgcgatttata

SEQ ID NO: 29787 - DNA, 2430 bp, Zea Mays
gtcacaaaccgaggcccagcaaaatttccccgttcttgcttcccctccgtgtccactctcgatcttcccttccccctcggcgccggtctccaaacccgcttccgcaattcgtaccgcttccggttccgggggcgggcgggcagcaccgtctcggctctcggatactatggcttccggcgaggggtgggaggcggcggtgcgggcggaggtgggcgccgttgcctggtgggacgacctggacagcgccgacctccgcgccaggttcaaggccttcacggggcagcgcagcgactggcctcagcccacggtcctcttctggaaggaccttctcctccgcgtcgccaggcgactccgcgtctgctccgcccctgcccaccacgtgacgagcgcttggttcgcgcgccccggggggctcacgccgctatgcttgccgcaagttctggaagagatgcgtgcggatggggacgtactgctgaaatccgagctgattgatccatcctcaacgaacctgcaccagctggtcaggagggtgagactcatgaccatcagctccaggaaggcggtttggcaggaggatatcctcgtgttcaaattgttgattgaggaacgagctgccgatattgctaggcaattgagtgactctcattggacatcgacatgtgttgtcacgattagcaaattcaatagcttctttgttgacatggatgatgctcatattgcattatgttttttgacgcaacatgggaaagctaggtaccttttgggcaggaaacaagaccctattgagaagagaagttgcaagaacagcttgatgtgcttgatcgacgatgggagatttcaaggcgaagggcattggcatccttcaagtctggagataaactagctgcttatcgttatgtgaggcagtctaaattattctcacaaagccggagcagatgcacacagttgttggaaaggattgaagaagtcatcagcctaattgctagtgctgaatcaaataagaaggtttatgaggcaatacaaattggtatcctggcaatgaaggacaacactgtcagcatagatgaggttaacatccacatgaaggagattgatgagcttgttgctgcacaaagagaagttgatgctgcccttgtaccactccagtcgttagatgatgaaggagatattgatgaagagttcagcaagcttgaagcagaattgcaggatgacgtccctcatattcatgttcaagaaccaatggcaccttccaacgaggaatcacctgatgaagtggttgaatcattgagccataacatgtcaagaattagactggagcccatctaaatgctccattttacgtttaatcaatttgacctgtacatagtgtgatctagtcaaatcatctagtcccaacaatgtgtcttatgtttcttgttacaccatccttataaaagggcaattctgttgcagatattcctcaatgttgcctgctgttttattgagcctccatggttcacctcctacattttttttgaaacggttttaagttcatcctttcataaagttgacttcctacaaaaatgaactgtctttgttgaactgtgacccgttcttatcattgctacctcaatggtgatggaaaagggagaagaatggatggatcatctgcaggtgcctctcattaagtattggcaacataagtgatttgtctgagatctattctatcttcatgatgatgctggcctttccggaccagtctttctccatatgagagagttgatcagggcatggataggtgctgactgctgaccaaaagaacaagtcgggatggagtagtaaaatatctgttatacaaaagcagaggaggaaaagaaaagataggcgtaggataagctggcaaggcacatagcatttcctcgatttgaggggatcaagatccatcaatggacgatctgaagataggcctgaaaactgacgacaacacctagtcctgaatgataagacctgaattattggaggggactttgcttgtgctttctccacatgcatagatgcatgaatgtatcagatgcctgtccacaccagtcttcaaagttatgtcacatcacgaataaaataggtagggaaaagcaatcctgtacctccatcaagtgatacaataatgttagataccataactagcttatcctcttacacagtttactgtagagtgatttgtgtgcaatggaaaacataagattaaaatgccagggcagatgactagtactagcagtacaccgtgatgcatgctttctttttctaggccaaagatgtacgtactttaagactttatcaagtccagcatttcagattaaaatttagccccaccttttcatttttgcattgtacttgctgcatgctgggccctgaacttattttagtattgttgagtataatatgcgatttata

SEQ ID NO: 29788 - DNA, 2512 bp, Zea Mays
gtcacaaaccgaggcccagcaaaatttccccgttcttgcttcccctccgtgtccactctcgatcttcccttccccctcggcgccggtctccaaacccgcttccgcaattcgtaccgcttccggttccgggggcgggcgggcagcaccgtctcggctctcggatactatggcttccggcgaggggtgggaggcggcggtgcgggcggaggtgggcgccgttgcctggtgggacgacctggacagcgccgacctccgcgccaggttcaaggccttcacggggcagcgcagcgactggcctcagcccacggtcctcttctggaaggaccttctcctccgcgtcgccaggcgactccgcgtctgctccgcccctgcccaccacgtgacgagcgcttggttcgcgcgccccggggggctcacgccgctatgcttgccgcaagttctggaagagatgcgtgcggatggggacgtactgctgaaatccgagctgattgatccatcctcaacgaacctgcaccagctggtcaggagggtgagactcatgaccatcagctccaggaaggcggtttggcaggaggatatcctcgtgttcaaattgttgattgaggaacgagctgccgatattgctaggcaattgagtgactctcattggacatcgacatgtgttgtcacgattagcaaattcaatagcttctttgttgacatggatgatgctcatattgcattatgttttttgacgcaacatgggaaagctaggtaccttttgggcaggaaacaagaccctattgagggtgtcaaggttgcactcactgcttcacaagttcctgctgtatccaaacttgaccatgacaccttgcacttagtctggacagaagagaagttgcaagaacagcttgatgtgcttgatcgacgatgggagatttcaaggcgaagggcattggcatccttcaagtctggagataaactagctgcttatcgttatgtgaggcagtctaaattattctcacaaagccggagcagatgcacacagttgttggaaaggattgaagaagtcatcagcctaattgctagtgctgaatcaaataagaaggtttatgaggcaatacaaattggtatcctggcaatgaaggacaacactgtcagcatagatgaggttaacatccacatgaaggagattgatgagcttgttgctgcacaaagagaagttgatgctgcccttgtaccactccagtcgttagatgatgaaggagatattgatgaagagttcagcaagcttgaagcagaattgcaggatgacgtccctcatattcatgttcaagaaccaatggcaccttccaacgaggaatcacctgatgaagtggttgaatcattgagccataacatgtcaagaattagactggagcccatctaaatgctccattttacgtttaatcaatttgacctgtacatagtgtgatctagtcaaatcatctagtcccaacaatgtgtcttatgtttcttgttacaccatccttataaaagggcaattctgttgcagatattcctcaatgttgcctgctgttttattgagcctccatggttcacctcctacattttttttgaaacggttttaagttcatcctttcataaagttgacttcctacaaaaatgaactgtctttgttgaactgtgacccgttcttatcattgctacctcaatggtgatggaaaagggagaagaatggatggatcatctgcaggtgcctctcattaagtattggcaacataagtgatttgtctgagatctattctatcttcatgatgatgctggcctttccggaccagtctttctccatatgagagagttgatcagggcatggataggtgctgactgctgaccaaaagaacaagtcgggatggagtagtaaaatatctgttatacaaaagcagaggaggaaaagaaaagataggcgtaggataagctggcaaggcacatagcatttcctcgatttgaggggatcaagatccatcaatggacgatctgaagataggcctgaaaactgacgacaacacctagtcctgaatgataagacctgaattattggaggggactttgcttgtgctttctccacatgcatagatgcatgaatgtatcagatgcctgtccacaccagtcttcaaagttatgtcacatcacgaataaaataggtagggaaaagcaatcctgtacctccatcaagtgatacaataatgttagataccataactagcttatcctcttacacagtttactgtagagtgatttgtgtgcaatggaaaacataagattaaaatgccagggcagatgactagtactagcagtacaccgtgatgcatgctttctttttctaggccaaagatgtacgtactttaagactttatcaagtccagcatttcagattaaaatttagccccaccttttcatttttgcattgtacttgctgcatgctgggccctgaacttattttagtattgttgagtataatatgcgatttata

SEQ ID NO: 29789 - DNA, 2266 bp, Zea Mays
gtcacaaaccgaggcccagcaaaatttccccgttcttgcttcccctccgtgtccactctcgatcttcccttccccctcggcgccggtctccaaacccgcttccgcaattcgtaccgcttccggttccgggggcgggcgggcagcaccgtctcggctctcggatactatggcttccggcgaggggtgggaggcggcggtgcgggcggaggtgggcgccgttgcctggtgggacgacctggacagcgccgacctccgcgccaggttcaaggccttcacggggcagcgcagcgactggcctcagcccacggtcctcttctggaaggaccttctcctccgcgtcgccaggcgactccgcgtctgctccgcccctgcccaccacgtgacgagcgcttggttcgcgcgccccggggggctcacgccgctatgcttgccgcaagttctggaagagatgcgtgcggatggggacgtactgctgaaatccgagctgattgatccatcctcaacgaacctgcaccagctggtcaggagggtgagactcatgaccatcagctccaggaaggcggtttggcaggaggatatcctcgtgttcaaattgttgattgaggaacgagctgccgatattgctaggcaattgagtgactctcattggacatcgacatgtgttgtcacgattagcaaattcaatagcttctttgttgacatggatgatgctcatattgcattatgttttttgacgcaacatgggaaagctaggtaccttttgggcaggaaacaagaccctattgagggtgtcaaggttgcactcactgcttcacaagttcctgctgtatccaaacttgaccatgacaccttgcacttagtctggacagaagagaagttgcaagaacagcttgatgtgcttgatcgacgatgggagatttcaaggcgaagggcattggcatccttcaagtctggagataaactagctgcttatcgttatgtgaggcagtctaaattattctcacaaagccggagcagatgcacacagttgttggaaaggattgaagaagtcatcagcctaattgctagtgctgaatcaaataagaaggtttatgaggcaatacaaattggtatcctggcaatgaaggacaacactgtcagcatagatgaggttaacatccacatgaaggagattgatgagcttgttgctgcacaaagagaagttgatgctgcccttgtaccactccagtcgttagatgatgaaggagatattgatgaagagttcagcaagcttgaagcagaattgcaggatgacgtccctcatattcatgttcaagaaccaatggcaccttccaacgaggaatcacctgatgaagtggttttaagttcatcctttcataaagttgacttcctacaaaaatgaactgtctttgttgaactgtgacccgttcttatcattgctacctcaatggtgatggaaaagggagaagaatggatggatcatctgcaggtgcctctcattaagtattggcaacataagtgatttgtctgagatctattctatcttcatgatgatgctggcctttccggaccagtctttctccatatgagagagttgatcagggcatggataggtgctgactgctgaccaaaagaacaagtcgggatggagtagtaaaatatctgttatacaaaagcagaggaggaaaagaaaagataggcgtaggataagctggcaaggcacatagcatttcctcgatttgaggggatcaagatccatcaatggacgatctgaagataggcctgaaaactgacgacaacacctagtcctgaatgataagacctgaattattggaggggactttgcttgtgctttctccacatgcatagatgcatgaatgtatcagatgcctgtccacaccagtcttcaaagttatgtcacatcacgaataaaataggtagggaaaagcaatcctgtacctccatcaagtgatacaataatgttagataccataactagcttatcctcttacacagtttactgtagagtgatttgtgtgcaatggaaaacataagattaaaatgccagggcagatgactagtactagcagtacaccgtgatgcatgctttctttttctaggccaaagatgtacgtactttaagactttatcaagtccagcatttcagattaaaatttagccccaccttttcatttttgcattgtacttgctgcatgctgggccctgaacttattttagtattgttgagtataatatgcgatttata

SEQ ID NO: 29790 - DNA, 2508 bp, Zea Mays
gtcacaaaccgaggcccagcaaaatttccccgttcttgcttcccctccgtgtccactctcgatcttcccttccccctcggcgccggtctccaaacccgcttccgcaattcgtaccgcttccggttccgggggcgggcgggcagcaccgtctcggctctcggatactatggcttccggcgaggggtgggaggcggcggtgcgggcggaggtgggcgccgttgcctggtgggacgacctggacagcgccgacctccgcgccaggttcaaggccttcacggggcagcgcagcgactggcctcagcccacggtcctcttctggaaggaccttctcctccgcgtcgccaggcgactccgcgtctgctccgcccctgcccaccacgtgacgagcgcttggttcgcgcgccccggggggctcacgccgctatgcttgccgcaagttctggaagagatgcgtgcggatggggacgtactgctgaaatccgagctgattgatccatcctcaacgaacctgcaccagctggtcaggagggtgagactcatgaccatcagctccaggaaggcggtttggcaggaggatatcctcgtgttcaaattgttgattgaggaacgagctgccgatattgctaggcaattgagtgactctcattggacatcgacatgtgttgtcacgattagcaaattcaatagcttctttgttgacatggatgatgctcatattgcattatgttttttgacgcaacatgggaaagctaggtaccttttgggcaggaaacaagaccctattgagggtgtcaaggttgcactcactgcttcacaagttcctgctgtatccaaacttgaccatgacaccttgcacttagtctggacagaagagaagttgcaagaacagcttgatgtgcttgatcgacgatgggagatttcaaggcgaagggcattggcatccttcaagtctggagataaactagctgcttatcgttatgtgaggcagtctaaattattctcacaaagccggagcagatgcacacagttgttggaaaggattgaagaagtcatcagcctaattgctagtgctgaatcaaataagaaggtttatgaggcaatacaaattggtatcctggcaatgaaggacaacactgtcagcatagatgaggttaacatccacatgaaggagattgatgagcttgttgctgcacaaagagaagttgatgctgcccttgtaccactccagtcgttagatgatgaaggagatattgatgaagagttcagcaagcttgaagcagaattgcaggatgacgtccctcatattcatgttcaagaaccaatggcaccttccaacgaggaatcacctgatgaagtggttgaatcattgagccataacatgtcaagaattagactggagcccatctaaatgctccattttacgtttaatcaatttgacctgtacatagtgtgatctagtcaaatcatctagtcccaacaatgtgtcttatgtttcttgttacaccatccttataaaagggcaattctgttgcagatattcctcaatgttgcctgctgttttattgagcctccatggttcacctcctacattttttttgaaacggtggtttcaataccctaaaaacttagttcatatactgtttgatgcatatcgtttagtgactggcattttactttattttctcgatttcagcgcttatgctgtccataaatttagttattttcagtgcactgaatctgtggttcatatttgtatatggcatctattggagaaattgaagaacacatcttatcataggagaatcttgtgtaaatggtatagggttttttaggaatcaatgaaatgtatcactctttgtgatgttgatttgtattgtggcaggttttaagttcatcctttcataaagttgacttcctacaaaaatgaactgtctttgttgaactgtgacccgttcttatcattgctacctcaatggtgatggaaaagggagaagaatggatggatcatctgcaggtgcctctcattaagtattggcaacataagtgatttgtctgagatctattctatcttcatgatgatgctggcctttccggaccagtctttctccatatgagagagttgatcagggcatggataggtgctgactgctgaccaaaagaacaagtcgggatggagtagtaaaatatctgttatacaaaagcagaggaggaaaagaaaagataggcgtaggataagctggcaaggcacatagcatttcctcgatttgaggggatcaagatccatcaatggacgatctgaagataggcctgaaaactgacgacaacacctagtcctgaatgataagacctgaattattggaggggactttgcttgtgctttctccacatgcatagatgcatgaatgtatcagatgcctgtccacaccagtcttcaaagttatgtcacatcacgaataaaatagccatgacggctgggacttgaggtgccaggtttggcctaacaggaag

SEQ ID NO: 29791 - DNA, 2334 bp, Zea Mays
gtcacaaaccgaggcccagcaaaatttccccgttcttgcttcccctccgtgtccactctcgatcttcccttccccctcggcgccggtctccaaacccgcttccgcaattcgtaccgcttccggttccgggggcgggcgggcagcaccgtctcggctctcggatactatggcttccggcgaggggtgggaggcggcggtgcgggcggaggtgggcgccgttgcctggtgggacgacctggacagcgccgacctccgcgccaggttcaaggccttcacggggcagcgcagcgactggcctcagcccacggtcctcttctggaaggaccttctcctccgcgtcgccaggcgactccgcgtctgctccgcccctgcccaccacgtgacgagcgcttggttcgcgcgccccggggggctcacgccgctatgcttgccgcaagttctggaagagatgcgtgcggatggggacgtactgctgaaatccgagctgattgatccatcctcaacgaacctgcaccagctggtcaggagggtgagactcatgaccatcagctccaggaaggcggtttggcaggaggatatcctcgtgttcaaattgttgattgagttgattgcaggaacgagctgccgatattgctaggcaattgagtgactctcattggacatcgacatgtgttgtcacgattagcaaattcaatagcttctttgttgacatggatgatgctcatattgcattatgttttttgacgcaacatgggaaagctaggtaccttttgggcaggaaacaagaccctattgagggtgtcaaggttgcactcactgcttcacaagttcctgctgtatccaaacttgaccatgacaccttgcacttagtctggacagaagagaagttgcaagaacagcttgatgtgcttgatcgacgatgggagatttcaaggcgaagggcattggcatccttcaagtctggagataaactagctgcttatcgttatgtgaggcagtctaaattattctcacaaagccggagcagatgcacacagttgttggaaaggattgaagaagtcatcagcctaattgctagtgctgaatcaaataagaaggacaacactgtcagcatagatgaggttaacatccacatgaaggagattgatgagcttgttgctgcacaaagagaagttgatgctgcccttgtaccactccagtcgttagatgatgaaggagatattgatgaagagttcagcaagcttgaagcagaattgcaggatgacgtccctcatattcatgttcaagaaccaatggcaccttccaacgaggaatcacctgatgaagtggttgaatcattgagccataacatgtcaagaattagactggagcccatctaaatgctccattttacgtttaatcaatttgacctgtacatagtgtgatctagtcaaatcatctagtcccaacaatgtgtcttatgtttcttgttacaccatccttataaaagggcaattctgttgcagatattcctcaatgttgcctgctgttttattgagcctccatggttcacctcctacattttttttgaaacggtggtttcaataccctaaaaacttagttcatatactgtttgatgcatatcgtttagtgactggcattttactttattttctcgatttcagcgcttatgctgtccataaatttagttattttcagtgcactgaatctgtggttcatatttgtatatggcatctattggagaaattgaagaacacatcttatcataggagaatcttgtgtaaatggtatagggttttttaggaatcaatgaaatgtatcactctttgtgatgttgatttgtattgtggcaggttttaagttcatcctttcataaagttgacttcctacaaaaatgaactgtctttgttgaactgtgacccgttcttatcattgctacctcaatggtgatggaaaagggagaagaatggatggatcatctgcaggtgcctctcattaagtattggcaacataagtgatttgtctgagatctattctatcttcatgatgatgctggcctttccggaccagtctttctccatatgagagaggtacagtccgatcagttcaatggtagctcgagcttcagagtcaggaatgagcctgtacagagaccgattgcatgcttaccctttcggacaaattgtgcacctccgcggtgcggctgcgcttcgtacctctgccgcctgatcctcgcatcccaccggactcatcatcaagatcctgaacaaaaccattttttacgaattgttagcagtaagtacaaggactcgccattgccggagcagagcgatg

SEQ ID NO: 29792 - DNA, 1849 bp, Zea Mays
ggaacatccgagcgttttaggtaagccgcgtagaacgtccgtttcgagtttaagcgttgcttaagcgtcctaatcgcgttttaggacgttttacgcgtgctgaggacgttctacccgtcccgggcctttcctgggcctttaggtttttctctaggtggttggacgcacgtcgccctccactctcctctcctccaacggctcagccggccgccgccctcctctctcctctcctccaacatctctggcgcgtctctcctctcctcagccatggaggcacagccggccgtcggccgtggaggcacagcagacctgcgccaccgccggccgcctaccccacagcagatctgcgcccaagaccagcagccagccagccatcctctgcggctccactccgccagcgccctagaccagcagccagctatcctccacctccactgctctctattttgatcatttgtgaatttcaatggcaacaaatagtgaggcattgtctgtcggtcaaagtaatgactcctatgacccactcaaagatcagtcacgaaggccaaagtcaaatgatccaggatggaaatatgctcatggtcttaatattgatgagttcgatgatggttactgatcatgcataaaagtcgtaacttgtgtggttgaacttgatctgtttctttttatgctatttggtttgtgaactcaagtactcaacttatgtattaacttattctatatttgaacttctatgtcaagtctgaaaagacgtttcaacgttcgtttaaatgtttaaatgttaaaaaggtggttcataatgttttaccgctttaataaccatgaccccaaaacactgcctagacgacagatataatggggcagagggaatatctttcgtgtatctcaactttcaaaaggactgcctttcgtgtattggttggttgtcttctatagattgcaaactcctgaagagtacatgacccagcagatgatacttttttggccagttttgtacacagaagtgcattaatatcgctggttgcccaaaggtgatccatctactttcaacacattaataacacaacatgtaaacagtgaataggttattatgattttctatatatgaccttttgaattgggaaggggctacccagcctattgcttcctgctagtgctacgagatctgacaatttcatgctattggattctccatcacttcctcacacctttctggtactgctgccccttctgccttttgtacttgtgatgtcaatttttttaggatctcaaattcctacatttggctgttggatgttgttcagtgttgaaaattacgtcacacaatcattggtatattaatatttaatatagcaaccagaaggtctagattaaatcgtaaactgaataaggttctgtactatgggttaatactgaactccatgaattgtactatgatcatagtggagtttgataaatgctagtgcaaaaatttgctgacttgtaaagaattatcttttgatagttcaaggcgaagggcattggcatccttcaagtctggagataaactagctgcttatcgttatgtgaggcagtctaaattattctcacaaagccggagcagatgcacacagttgttggaaaggattgaagaagtcatcagcctaattgctagtgctgaatcaaataagaaggtttatgaggcaatacaaattggtatcctggcaatgaaggacaacactgtcagcatagatgaggttaacatccacatgaaggagattgatgagcttgttgctgcacaaagagaagttgatgctgcccttgggaacacacgacgtattgcgcccctaccttcgccagtttgtggttg

SEQ ID NO: 29793 - DNA, 3088 bp, Zea Mays
ggaacatccgagcgttttaggtaagccgcgtagaacgtccgtttcgagtttaagcgttgcttaagcgtcctaatcgcgttttaggacgttttacgcgtgctgaggacgttctacccgtcccgggcctttcctgggcctttaggtttttctctaggtggttggacgcacgtcgccctccactctcctctcctccaacggctcagccggccgccgccctcctctctcctctcctccaacatctctggcgcgtctctcctctcctcagccatggaggcacagccggccgtcggccgtggaggcacagcagacctgcgccaccgccggccgcctaccccacagcagatctgcgcccaagaccagcagccagccagccatcctctgcggctccactccgccagcgccctagaccagcagccagctatcctccacctccactgctctctattttgatcatttgtgaatttcaatggcaacaaatagtgaggcattgtctgtcggtcaaagtaatgactcctatgacccactcaaagatcagtcacgaaggccaaagtcaaatgatccaggatggaaatatgctcatggtcttaatattgatgagttcgatgatggttactgatcatgcataaaagtcgtaacttgtgtggttgaacttgatctgtttctttttatgctatttggtttgtgaactcaagtactcaacttatgtattaacttattctatatttgaacttctatgtcaagtctgaaaagacgtttcaacgttcgtttaaatgtttaaatgttaaaaaggtggttcataatgttttaccgctttaataaccatgaccccaaaacactgcctagacgacagatataatggggcagagggaatatctttcgtgtatctcaactttcaaaaggactgcctttcgtgtattggttggttgtcttctatagattgcaaactcctgaagagtacatgacccagcagatgatacttttttggccagttttgtacacagaagtgcattaatatcgctggttgcccaaaggtgatccatctactttcaacacattaataacacaacatgtaaacagtgaataggttattatgattttctatatatgaccttttgaattgggaaggggctacccagcctattgcttcctgctagtgctacgagatctgacaatttcatgctattggattctccatcacttcctcacacctttctgttcaaggcgaagggcattggcatccttcaagtctggagataaactagctgcttatcgttatgtgaggcagtctaaattattctcacaaagccggagcagatgcacacagttgttggaaaggattgaagaagtcatcagcctaattgctagtgctgaatcaaataagaaggtttatgaggcaatacaaattggtatcctggcaatgaaggacaacactgtcagcatagatgaggttaacatccacatgaaggagattgatgagcttgttgctgcacaaagagaagttgatgctgcccttgtaccactccagtcgttagatgatgaaggagatattgatgaagagttcagcaagcttgaagcagaattgcaggatgacgtccctcatattcatgttcaagaaccaatggcaccttccaacgaggaatcacctgatgaagtggttgaatcattgagccataacatgtcaagaattagactggagcccatctaaatgctccattttacgtttaatcaatttgacctgtacatagtgtgatctagtcaaatcatctagtcccaacaatgtgtcttatgtttcttgttacaccatccttataaaagggcaattctgttgcagatattcctcaatgttgcctgctgttttattgagcctccatggttcacctcctacattttttttgaaacggtggtttcaataccctaaaaacttagttcatatactgtttgatgcatatcgtttagtgactggcattttactttattttctcgatttcagcgcttatgctgtccataaatttagttattttcagtgcactgaatctgtggttcatatttgtatatggcatctattggagaaattgaagaacacatcttatcataggagaatcttgtgtaaatggtatagggttttttaggaatcaatgaaatgtatcactctttgtgatgttgatttgtattgtggcaggttttaagttcatcctttcataaagttgacttcctacaaaaatgaactgtctttgttgaactgtgacccgttcttatcattgctacctcaatggtgatggaaaagggagaagaatggatggatcatctgcaggtgcctctcattaagtattggcaacataagtgatttgtctgagatctattctatcttcatgatgatgctggcctttccggaccagtctttctccatatgagagagttgatcagggcatggataggtgctgactgctgaccaaaagaacaagtcgggatggagtagtaaaatatctgttatacaaaagcagaggaggaaaagaaaagataggcgtaggataagctggcaaggcacatagcatttcctcgatttgaggggatcaagatccatcaatggacgatctgaagataggcctgaaaactgacgacaacacctagtcctgaatgataagacctgaattattggaggggactttgcttgtgctttctccacatgcatagatgcatgaatgtatcagatgcctgtccacaccagtcttcaaagttatgtcacatcacgaataaaataggtagggaaaagcaatcctgtacctccatcaagtgatacaataatgttagataccataactagcttatcctcttacacagtttactgtagagtgatttgtgtgcaatggaaaacataagattaaaatgccagggcagatgactagtactagcagtacaccgtgatgcatgctttctttttctaggccaaagatgtacgtactttaagactttatcaagtccagcatttcagattaaaatttagccccaccttttcatttttgcattgtacttgctgcatgctgggccctgaacttattttagtattgttgagtataatatgcgatttata

SEQ ID NO: 29794 - DNA, 3377 bp, Zea Mays
ggaacatccgagcgttttaggtaagccgcgtagaacgtccgtttcgagtttaagcgttgcttaagcgtcctaatcgcgttttaggacgttttacgcgtgctgaggacgttctacccgtcccgggcctttcctgggcctttaggtttttctctaggtggttggacgcacgtcgccctccactctcctctcctccaacggctcagccggccgccgccctcctctctcctctcctccaacatctctggcgcgtctctcctctcctcagccatggaggcacagccggccgtcggccgtggaggcacagcagacctgcgccaccgccggccgcctaccccacagcagatctgcgcccaagaccagcagccagccagccatcctctgcggctccactccgccagcgccctagaccagcagccagctatcctccacctccactgctctctattttgatcatttgtgaatttcaatggcaacaaatagtgaggcattgtctgtcggtcaaagtaatgactcctatgacccactcaaagatcagtcacgaaggccaaagtcaaatgatccaggatggaaatatgctcatggtcttaatattgatgagttcgatgatggttactgatcatgcataaaagtcgtaacttgtgtggttgaacttgatctgtttctttttatgctatttggtttgtgaactcaagtactcaacttatgtattaacttattctatatttgaacttctatgtcaagtctgaaaagacgtttcaacgttcgtttaaatgtttaaatgttaaaaaggtggttcataatgttttaccgctttaataaccatgaccccaaaacactgcctagacgacagatataatggggcagagggaatatctttcgtgtatctcaactttcaaaaggactgcctttcgtgtattggttggttgtcttctatagattgcaaactcctgaagagtacatgacccagcagatgatacttttttggccagttttgtacacagaagtgcattaatatcgctggttgcccaaaggtgatccatctactttcaacacattaataacacaacatgtaaacagtgaataggttattatgattttctatatatgaccttttgaattgggaaggggctacccagcctattgcttcctgctagtgctacgagatctgacaatttcatgctattggattctccatcacttcctcacacctttctggtactgctgccccttctgccttttgtacttgtgatgtcaatttttttaggatctcaaattcctacatttggctgttggatgttgttcagtgttgaaaattacgtcacacaatcattggtatattaatatttaatatagcaaccagaaggtctagattaaatcgtaaactgaataaggttctgtactatgggttaatactgaactccatgaattgtactatgatcatagtggagtttgataaatgctagtgcaaaaatttgctgacttgtaaagaattatcttttgatagttcaaggcgaagggcattggcatccttcaagtctggagataaactagctgcttatcgttatgtgaggcagtctaaattattctcacaaagccggagcagatgcacacagttgttggaaaggattgaagaagtcatcagcctaattgctagtgctgaatcaaataagaaggtttatgaggcaatacaaattggtatcctggcaatgaaggacaacactgtcagcatagatgaggttaacatccacatgaaggagattgatgagcttgttgctgcacaaagagaagttgatgctgcccttgtaccactccagtcgttagatgatgaaggagatattgatgaagagttcagcaagcttgaagcagaattgcaggatgacgtccctcatattcatgttcaagaaccaatggcaccttccaacgaggaatcacctgatgaagtggttgaatcattgagccataacatgtcaagaattagactggagcccatctaaatgctccattttacgtttaatcaatttgacctgtacatagtgtgatctagtcaaatcatctagtcccaacaatgtgtcttatgtttcttgttacaccatccttataaaagggcaattctgttgcagatattcctcaatgttgcctgctgttttattgagcctccatggttcacctcctacattttttttgaaacggtggtttcaataccctaaaaacttagttcatatactgtttgatgcatatcgtttagtgactggcattttactttattttctcgatttcagcgcttatgctgtccataaatttagttattttcagtgcactgaatctgtggttcatatttgtatatggcatctattggagaaattgaagaacacatcttatcataggagaatcttgtgtaaatggtatagggttttttaggaatcaatgaaatgtatcactctttgtgatgttgatttgtattgtggcaggttttaagttcatcctttcataaagttgacttcctacaaaaatgaactgtctttgttgaactgtgacccgttcttatcattgctacctcaatggtgatggaaaagggagaagaatggatggatcatctgcaggtgcctctcattaagtattggcaacataagtgatttgtctgagatctattctatcttcatgatgatgctggcctttccggaccagtctttctccatatgagagagttgatcagggcatggataggtgctgactgctgaccaaaagaacaagtcgggatggagtagtaaaatatctgttatacaaaagcagaggaggaaaagaaaagataggcgtaggataagctggcaaggcacatagcatttcctcgatttgaggggatcaagatccatcaatggacgatctgaagataggcctgaaaactgacgacaacacctagtcctgaatgataagacctgaattattggaggggactttgcttgtgctttctccacatgcatagatgcatgaatgtatcagatgcctgtccacaccagtcttcaaagttatgtcacatcacgaataaaataggtagggaaaagcaatcctgtacctccatcaagtgatacaataatgttagataccataactagcttatcctcttacacagtttactgtagagtgatttgtgtgcaatggaaaacataagattaaaatgccagggcagatgactagtactagcagtacaccgtgatgcatgctttctttttctaggccaaagatgtacgtactttaagactttatcaagtccagcatttcagattaaaatttagccccaccttttcatttttgcattgtacttgctgcatgctgggccctgaacttattttagtattgttgagtataatatgcgatttata

SEQ ID NO: 29795 - DNA, 2153 bp, Zea Mays
ttatggtatcagggtgtgaaatcttgagaggcaaatcagaccagaacgatagttcatagagagatataggttattttttcaagaaatattttgctgcaatcgaccctgggccccaaattcgtcttgcaaccagggcccaagttcaagggcgaagaaggcctccgtcacccttgtgtatcttgtgtagactttgacgaatgactgattgctggattggatatccacaaaaccaatcacacacggcaaatgcaattcctagcccacctgtgccgttccagtgggccatccctaactccaagcccaactgccttacctcatctcgtcgcgtcattccttccgcctccgccgcacacgcgctcgctggctcgctgctccgcaacgccgtggggaatggtcgcagctaccgccatggccaccgctgcgtctgcggcctcaccgctactcaatgggagccgaaggctgcgcggctccgccatcgcggactcaggctacagcgccgaggcaccggcctccaccggcgcgcagctgtacgcggactgcgtcgtggtgggcggcggcatcagtggcctctgcaccgcgcaggcgctgtccaggcggcacggcgtcggggacgtgcttgtcacggaggcccgcgcccgctccggcggcaacatcaccccggtcgagcgacccgaggaagggtacctttgagacttgggagggagaaatttgtgattgtgtcactctcaagtctcaattttgttaggaataattggatctataccattaaaagatccaaactttagatatataccatggaccacacatgtcatttactcatgtggactcacatgtaagtgagatagtaatgatatagatctaaagtggtgatcttttaatggtatggatccaaatttcccattttgttattatgttatttcatgtttatgactgttggaaccatttatgtctattatttgtgaattagatggtatagcggtgaagtctacaaatcataatgacaaaattgtcaatgtctcgaaaagaggagagtcccaacagcttccagccatccgaccccgttctcaccatagccgtggacagcgagctgaaggatgacttggtttttggggacccgaacgcgccgcggttcgtgctgtgggaggggaagctgaagcccgctccatccaagcccgccgacctcccgttcttcgatttcatgaatcattaacatccctggcaagccgagggccggtctaggcgcgcttggcttccgcccgcctcctccagtttcagggccgcgaggagtcagtggaggagttcgtgcgccgcagcctcggtgctgaggtctttgagcgcctcattgagcctttctgctcagtatgaaggctgcatttgggaaagtgtggcggttagaagaagctggaggtagtattattggtggaaccatcaaccatcaacactattcaggcaggagaggggcaagaatctgaaaccactagggatccccgtcttccggagacagaagacagttgcatctttcaggaagggtcttgccatgcttccaaattctatcacatccaggaacaatatacacctcagcatccgcctgggtcgcttgagacagctgcatccttgcagacagagccaactagaatgctgaaggtctattaccgcagagggtcaaaagcaagtcaatttcacgacggccaacaagatggaacaggaagggagttgctggcaatggagaatgggcatacaactgatccaagacctgataccctcacagccatgggtgctccgctgtctgcgacaagaaaagaagagttcctcaacaacatctgtagaagacctgacgcttgtctgctgataccaaataaaaacagcaagaaagcaactcctccctctccaacaacacctgctgctgcgccaagacgaagccgacgtgtcgctggagctggagtggaattcagcatgcaagattggggtggcagggccaccaaaaaagccatgaaagccctgcagattattactgaagatgaaggcatcagtcaggaagccctcaaggcttatgcagagcttttcaagcacccactttctcagctccaggtggaggccttgtcagcccttttcggttggcccacgccaccagaagggcctgtttgaagcctagg

SEQ ID NO: 29796 - DNA, 8421 bp, Zea Mays
ttatggtatcagggtgtgaaatcttgagaggcaaatcagaccagaacgatagttcatagagagatataggttattttttcaagaaatattttgctgcaatcgaccctgggccccaaattcgtcttgcaaccagggcccaagttcaagggcgaagaaggcctccgtcacccttgtgtatcttgtgtagactttgacgaatgactgattgctggattggatatccacaaaaccaatcacacacggcaaatgcaattcctagcccacctgtgccgttccagtgggccatccctaactccaagcccaactgccttacctcatctcgtcgcgtcattccttccgcctccgccgcacacgcgctcgctggctcgctgctccgcaacgccgtggggaatggtcgcagctaccgccatggccaccgctgcgtctgcggcctcaccgctactcaatgggagccgaaggctgcgcggctccgccatcgcggactcaggctacagcgccgaggcaccggcctccaccggcgcgcagctgtacgcggactgcgtcgtggtgggcggcggcatcagtggcctctgcaccgcgcaggcgctgtccaggcggcacggcgtcggggacgtgcttgtcacggaggcccgcgcccgctccggcggcaacatcaccccggtcgagcgacccgaggaagggtacctttgagacttgggagggagaaatttgtgattgtgtcactctcaagtctcaattttgttaggaataattggatctataccattaaaagatccaaactttagatatataccatggaccacacatgtcatttactcatgtggactcacatgtaagtgagatagtaatgatatagatctaaagtggtgatcttttaatggtatggatccaaatttcccattttgttattatgttatttcatgtttatgactgttggaaccatttatgtctattatttgtgaattagatggtatagcggtgaagtctacaaatcataatgacaaaattgtcaatgtctcgaaaagaggagagtcccaacagcttccagccatccgaccccgttctcaccatagccgtggacagcgagctgaaggatgacttggtttttggggacccgaacgcgccgcggttcgtgctgtgggaggggaagctgaagcccgctccatccaagcccgccgacctcccgttcttcgatttcatgaatcattaacatccctggcaagccgagggccggtctaggcgcgcttggcttccgcccgcctcctccagtttcagggccgcgaggagtcagtggaggagttcgtgcgccgcagcctcggtgctgaggtctttgagcgcctcattgagcctttctgctcaggtgtctatgctggtgatccttccaagctcagtatgaaggctgcatttgggaaagtgtggcggttagaagaagctggaggtagtattattggtggaaccatcaaccatcaacactattcaggcaggagaggggcaagaatctgaaaccactagggatccgtgagagcttgctccattttctttttgttccactaattggcttggctgttgtgtcatattgatctgtttgacctcttttagccgtcttccggagacagaagacagttgcatctttcaggaagggtcttgccatgcttccaaattctatcacatccaggtttgcttttattgttttgtatatttactaacaaatatgttcgtgtgttgcaacaaacatcttgttacgctgtcacttgaccgacttgaggctcacatatatatgcaatggctgtgtcatctgttccatatgtcttggattcagacttcataatgtgactagacacatgttgttctaacttgtattagcttgggtgtggtttggttcacaaaatgtaacgtaaatattaacggtaatggttcgcactcgattaccagcggtaacaaatttgaataggccgatatcaattcctagtatagtattcgattacggttgaacttaaacatacatgatttaacgttatctgttacccattacattacaaatatgtgaaccaaacaacacattggttcctaagtctgggtcatagacgagatagataggtgtgtgaggatattgtgagaagtaaaatatcttggacgtaatagtcctttctgcttataatatcattaatcatgtgtgtatgtagatagagaggtgccctacaaacataacccactacactaaccaagactctaggaaggcatcaccatgcctcaacctgagtcatgataaaaaaactaagagcaaggacaaacccttagcaccacaccacatctgacactcatcatcaactaaagagaaggccttagcgacattaggtggtaaaccttcaaaaacacactcattgcggtgcctccgaatactccaagctcctaagatcacaagcgagttaacgccgatgtcttcatgaacgcgattaactgaagcatttcaccaagcctcgaaattatttttcccgatgtctggggacaacgcagccaagcccatcctttggaagaggtagaaccaaaagttgataatggaagtctttcaccattttaagtcataataaaaatactaagctgccccctctcattccattttatatcatattggcccccttctcatttcatgcccaagcttcgccactgtaggggatattaatggtcaaaatctcctagaaaatatgtcttacattgatggacagagggtggatcatttacattttattagatctgttggcattcttcctctttgagcatgaactctgtctttaccctctgccgagcgatgcttcagatgccctatcaagattctaatatccaccagttgctgctgtaactgtttcgtatccaaaggaagcaattagaaaagaatgcttaattgatggtgagctctaggattttggccagctgcatccacgtagtcaagaagttgagacattatgtatttcttggaatcatcaagtcttaaagctcgaaacacatacagacagttttcttttccagcttgcttttattctagcaaggctgaatccaagatacagataatgatatagaagtactattggtaacatgcttttgtaggaacaatatacacctcagcatccgcctgggtcgcttgagacagctgcatccttgcagacagagccaactagaatgctgaaggtctattaccgcagagggtcaaaagcaagtcaatttcacgacggccaacaagatggaacaggaagggagttgctggcaatggagaatgggcatacaactgatccaagacctgataccctcacagccatgggtgctccgctgtctgcgacaagaaaagaagagttcctcaacaacatctgtagaagacctgacgcttgtctgctgataccaaataaaaacagcaagaaagcaactcctccctctccaacaacacctgctgctgcgccaagacgaagccgacgtgtcgctggagctggagtggaattcagcatgcaagattggggtggcagggccaccaaaaaagccatgaaagccctgcagattattactgaagatgaaggcatcagtcaggaagccctcaaggcttatgcagagcttttcaagcacccactttctcagctccaggtggaggccttgtcagcccttttcggttggcccacgccaccagaagggcctgtttgaagcctaggttcccccccccccctgttctttgtggtagtgttctgtagactgttatccatgaatccaaacaaaattttattctggaatgtgagaggactgaactcctcagtacggcaagactcagtcagagagcttgtggactcttcccaagtggatgtggtttgtgtccaggaaactaaaatgcagaacatttcaacaagaactatcctgtccatgcttggagctgagttctctgattacgtctacctgccatcaacaggtgcaagtggtggcatcttgatcacttggaaaagacatataggtcatacagggcagcaaagaatcgacaatcacagtgtttcagtccagttgtgcatggagcaagggcaggcttggtggcttacctgtgtgtacggccctcagggagatgatggaaaaatcctttttcttcaggaactcagagatgtcagaacagcctgtgctggcccttggttggtggctggggattttaacctcatctataaaacatcagataagaataactccaattttaatagagccatgatgggtcgtttcagggatttgatcaatgatcttggcctcaaggagattccgctgttaggacgcaaattcacttggtctaaccagcaagataaccctgtccttgttaagcttgatagagtgttttgtactgtggattgggagctaaccttccccagagttcttcttcatagtgctgcgtcacttgattcggaccactgtcctttgcttctgggacgcagtgacaataggcctggaaaacggcgtttccatttcgaatccttttggaccaagcttgaaggttttcaggaggaagtgcattcagcatggaactcagtcgaagctgtcagatgccctttccagactctagagaagaagctaaagatgacagcaagaagactgcaaggttggagtgacaagcaggttgggcatgtaagattgcagttggctttggcaaaggagttgctgcatagactggagatggcacatgatgaaagaccacttaccccggcagagatctggcttaaaaacaggctcaaaaaacaatctttgatgctgtcctctttcaagcgaaccatggcaagattaaggtcaagaatttcatggctcaaagagggggatgcgaacacaagatttttccatattcatgcaaggcatcgtaagaggaagaatttcgtggccatgttggttgatggagatcgtatcctaaccaaccactgtgaaaaagcagcagcagtggatcagttttatacaaacctcattggaaatgtggaaacagggaaaggactattgatttggatgcccttggactgcctagacataatctggaggacctagactcccctttttcagaacaagaggttttggaaaccattaaaggcttgcctttggataaggccccagggccggatggattcacagggcgattctataaagattgctggggaagtattaaagcagaggttatggctgcagttagggcagtttggagcaggaatttcaacaatttctacaagctcaacacggcctttattaccttgataccgaaaaaagagggggcagagcaggtcaaagactttaggcctattagtcttgtgcacagttttgcaaaactgatcaccaagattcttgctaaccggctggccaaaaggctcaatgagctggtctctccgattcaaagcgcatttataaagggaaggttcatccaagataatttcatgttggtacaataaactgcaaggctgtttcaccagcagaaattgcctcgcctactcctcaaacttgatatcactaaggcctttgattcagtgtcctggccattcctaattgaagtcatgcagcagattggttttggtcatatctggagggatattgtttgtgggttattggcctcctccactacacaagtgctgctcaatggttccccgggggaacgtttagcccataggagagggctcaggcaggaagaccccctctcccccatgctattcatcctagttatggatgttcttggcctcttattcgctaaagctgaagaagcaggtttgctacagcagttatctagaagaaagaagctccataggatttctatttatgcagatgatgtggctgtgtttttatatcctactgctgaagaaacttctatcactctagacatcctgcaactttttggagatgcttctggcctcataaataatgtgcagaaatcaaatgtatatcctattcaatgctccgaggggaatttgatggaagttcagagtttgctgccttgtgagatggcaaccttcccctgcagatatttggggctccccctatccttgcataagctttctcggcagcagttccagccctttgttgaaagaattgcagatcaactctctaattggaaagctgacttaatgtctagagcaggaaggagaattcaggtgcaacatgttctcacaggcatgacagtttatttagcaatggcaattgacatcccccaatgggccttagatgccattgataagataagaaagggttttctttggagaggcacaaaggaagcaaagggaggacactgtttggttgcctggggaaaggtgtgtcgtccccttcagctgggaggcttgggaatctcaagtctccctgagctttgttgggctctccgcatgagatggctgtggttgcagaaaacagatttgggtcggccttgggcaagtcttcccatacaggtcccaaacaaagctagggcttttttctctatggctcttgtttctatggttggggatggttcaaacaccttgttctggaatgatagatggctgcatggcactcaaatcgctgatattgcccctagcctgcacaagtcaattccaacaagaattgctaacaaaaggacggtgaaagaagcacttgtaaacaggaaatggatttcagatattaagggggctcttacagtaagagtcttggttgattatctaaacctttgggaatctctttcagggattgagttacagccaaacataagggataaacatgttttcagccttgctgcagatggtaaatacacaacgaaagcagcttataatgacctgtttttaggatctgctacttttgatcactacaaaagaatctggagatcttgggccccctcaaagtgccgttttttcatttggttggtggcacacaacagatgctggactgctgatcgtttggccaaaaagggcctgaatcacccgcaaaggtgtcttctttgtgaccaggaagatgaaaccatgaaccacctccttatttcctgtgtcttcacaagaattttctggtatatgctcctaaggaaatttgggttacatgccctggccccacagcctggcctcacatccttcttagagtggtggaaaggggctgctgaggcagtgcagggaatggtcaagaaagggctgaattctctcatcatattgggtgcctggaagatatggaacctccgcaatagatgtgtgtttgatggagagacccccagcctctctcgaatcctgcaacaggctgatgaggagagaaacctttttgggagctagcaggggccaagagtctctcctttttggctgctcctttgtcggtagcctgaattcctaatggatttgtttctttatgcttgtttctggcctccgtaaggagagctattgtactatgtattatgtttctcctcttcttaatataattaaaggcgcagttcccctgcgctttcgaaaaaaaaggaacaatatacacctcatcactctttccaaatcgtgctcctgctagtagggtgttacttctaaactacataggaggtgctacaaacacaggaattgtttccaaggttagcaagtctctttcaacaatattgccttgtatttttgtgattatgatgtgtttatatatctttttagtgcccttctttatgaatagaacttttagtaccaatattctgttctttaatatcactataaaaacactaactgcacggaactcctggaaaatttgagctgcttgttatgtagtatgttttaaatatagtctttattcgattgcctgttattggctgtatttttttatgatcccaactcatttcaagactgaaagtgagctggtagaagcagttgatcgttgtcaacagagggtaactgcaaggcctactcgtgcgcccagctaagctctgcaagctagggatctaactggagtcccacatagttcgccttccgttgctcaccatctcattgtaatcgccaggccaacggcctcgcacatgtatatgtacggcactccagagatcaatagacttgctggttgagcattttctctcttcaatcgtgacctccgaaaaatgcttataaatcctacagcagtggatcctttagtcttaggtgtccgagtttggccacaagccatacctcggttcctggtaggacatcttgttcttccggaggccgcaaaatctgccctggaccgaggtgcctacgatgggctgttcctgggaggtaactatgttgcaagagttgccctgggaagatgcgtcgacgacgcgtatgagtgtgcctcgcaaatatatgactttttaaccatgtatgtctacaagtgatgaaagaagtggaaggcttcatgttaattgtcatgttgcataggagattgttctaatcacgaccctacaaaaaaaattgcattcgtttatgagagctgtgaagactcatgtagcgtttttat

SEQ ID NO: 29797 - DNA, 8302 bp, Zea Mays
ttatggtatcagggtgtgaaatcttgagaggcaaatcagaccagaacgatagttcatagagagatataggttattttttcaagaaatattttgctgcaatcgaccctgggccccaaattcgtcttgcaaccagggcccaagttcaagggcgaagaaggcctccgtcacccttgtgtatcttgtgtagactttgacgaatgactgattgctggattggatatccacaaaaccaatcacacacggcaaatgcaattcctagcccacctgtgccgttccagtgggccatccctaactccaagcccaactgccttacctcatctcgtcgcgtcattccttccgcctccgccgcacacgcgctcgctggctcgctgctccgcaacgccgtggggaatggtcgcagctaccgccatggccaccgctgcgtctgcggcctcaccgctactcaatgggagccgaaggctgcgcggctccgccatcgcggactcaggctacagcgccgaggcaccggcctccaccggcgcgcagctgtacgcggactgcgtcgtggtgggcggcggcatcagtggcctctgcaccgcgcaggcgctgtccaggcggcacggcgtcggggacgtgcttgtcacggaggcccgcgcccgctccggcggcaacatcaccccggtcgagcgacccgaggaagggtacctttgagacttgggagggagaaatttgtgattgtgtcactctcaagtctcaattttgttaggaataattggatctataccattaaaagatccaaactttagatatataccatggaccacacatgtcatttactcatgtggactcacatgtaagtgagatagtaatgatatagatctaaagtggtgatcttttaatggtatggatccaaatttcccattttgttattatgttatttcatgtttatgactgttggaaccatttatgtctattatttgtgaattagatggtatagcggtgaagtctacaaatcataatgacaaaattgtcaatgtctcgaaaagaggagagtcccaacagcttccagccatccgaccccgttctcaccatagccgtggacagcgagctgaaggatgacttggtttttggggacccgaacgcgccgcggttcgtgctgtgggaggggaagctgaagcccgctccatccaagcccgccgacctcccgttcttcgatttcatgaatcattaacatccctggcaagccgagggccggtctaggcgcgcttggcttccgcccgcctcctccaggccgcgaggagtcagtggaggagttcgtgcgccgcagcctcggtgctgaggtctttgagcgcctcattgagcctttctgctcagtatgaaggctgcatttgggaaagtgtggcggttagaagaagctggaggtagtattattggtggaaccatcaaccatcaacactattcaggcaggagaggggcaagaatctgaaaccactagggatccccgtcttccggagacagaagacagttgcatctttcaggaagggtcttgccatgcttccaaattctatcacatccaggtttgcttttattgttttgtatatttactaacaaatatgttcgtgtgttgcaacaaacatcttgttacgctgtcacttgaccgacttgaggctcacatatatatgcaatggctgtgtcatctgttccatatgtcttggattcagacttcataatgtgactagacacatgttgttctaacttgtattagcttgggtgtggtttggttcacaaaatgtaacgtaaatattaacggtaatggttcgcactcgattaccagcggtaacaaatttgaataggccgatatcaattcctagtatagtattcgattacggttgaacttaaacatacatgatttaacgttatctgttacccattacattacaaatatgtgaaccaaacaacacattggttcctaagtctgggtcatagacgagatagataggtgtgtgaggatattgtgagaagtaaaatatcttggacgtaatagtcctttctgcttataatatcattaatcatgtgtgtatgtagatagagaggtgccctacaaacataacccactacactaaccaagactctaggaaggcatcaccatgcctcaacctgagtcatgataaaaaaactaagagcaaggacaaacccttagcaccacaccacatctgacactcatcatcaactaaagagaaggccttagcgacattaggtggtaaaccttcaaaaacacactcattgcggtgcctccgaatactccaagctcctaagatcacaagcgagttaacgccgatgtcttcatgaacgcgattaactgaagcatttcaccaagcctcgaaattatttttcccgatgtctggggacaacgcagccaagcccatcctttggaagaggtagaaccaaaagttgataatggaagtctttcaccattttaagtcataataaaaatactaagctgccccctctcattccattttatatcatattggcccccttctcatttcatgcccaagcttcgccactgtaggggatattaatggtcaaaatctcctagaaaatatgtcttacattgatggacagagggtggatcatttacattttattagatctgttggcattcttcctctttgagcatgaactctgtctttaccctctgccgagcgatgcttcagatgccctatcaagattctaatatccaccagttgctgctgtaactgtttcgtatccaaaggaagcaattagaaaagaatgcttaattgatggtgagctctaggattttggccagctgcatccacgtagtcaagaagttgagacattatgtatttcttggaatcatcaagtcttaaagctcgaaacacatacagacagttttcttttccagcttgcttttattctagcaaggctgaatccaagatacagataatgatatagaagtactattggtaacatgcttttgtaggaacaatatacacctcagcatccgcctgggtcgcttgagacagctgcatccttgcagacagagccaactagaatgctgaaggtctattaccgcagagggtcaaaagcaagtcaatttcacgacggccaacaagatggaacaggaagggagttgctggcaatggagaatgggcatacaactgatccaagacctgataccctcacagccatgggtgctccgctgtctgcgacaagaaaagaagagttcctcaacaacatctgtagaagacctgacgcttgtctgctgataccaaataaaaacagcaagaaagcaactcctccctctccaacaacacctgctgctgcgccaagacgaagccgacgtgtcgctggagctggagtggaattcagcatgcaagattggggtggcagggccaccaaaaaagccatgaaagccctgcagattattactgaagatgaaggcatcagtcaggaagccctcaaggcttatgcagagcttttcaagcacccactttctcagctccaggtggaggccttgtcagcccttttcggttggcccacgccaccagaagggcctgtttgaagcctaggttcccccccccccctgttctttgtggtagtgttctgtagactgttatccatgaatccaaacaaaattttattctggaatgtgagaggactgaactcctcagtacggcaagactcagtcagagagcttgtggactcttcccaagtggatgtggtttgtgtccaggaaactaaaatgcagaacatttcaacaagaactatcctgtccatgcttggagctgagttctctgattacgtctacctgccatcaacaggtgcaagtggtggcatcttgatcacttggaaaagacatataggtcatacagggcagcaaagaatcgacaatcacagtgtttcagtccagttgtgcatggagcaagggcaggcttggtggcttacctgtgtgtacggccctcagggagatgatggaaaaatcctttttcttcaggaactcagagatgtcagaacagcctgtgctggcccttggttggtggctggggattttaacctcatctataaaacatcagataagaataactccaattttaatagagccatgatgggtcgtttcagggatttgatcaatgatcttggcctcaaggagattccgctgttaggacgcaaattcacttggtctaaccagcaagataaccctgtccttgttaagcttgatagagtgttttgtactgtggattgggagctaaccttccccagagttcttcttcatagtgctgcgtcacttgattcggaccactgtcctttgcttctgggacgcagtgacaataggcctggaaaacggcgtttccatttcgaatccttttggaccaagcttgaaggttttcaggaggaagtgcattcagcatggaactcagtcgaagctgtcagatgccctttccagactctagagaagaagctaaagatgacagcaagaagactgcaaggttggagtgacaagcaggttgggcatgtaagattgcagttggctttggcaaaggagttgctgcatagactggagatggcacatgatgaaagaccacttaccccggcagagatctggcttaaaaacaggctcaaaaaacaatctttgatgctgtcctctttcaagcgaaccatggcaagattaaggtcaagaatttcatggctcaaagagggggatgcgaacacaagatttttccatattcatgcaaggcatcgtaagaggaagaatttcgtggccatgttggttgatggagatcgtatcctaaccaaccactgtgaaaaagcagcagcagtggatcagttttatacaaacctcattggaaatgtggaaacagggaaaggactattgatttggatgcccttggactgcctagacataatctggaggacctagactcccctttttcagaacaagaggttttggaaaccattaaaggcttgcctttggataaggccccagggccggatggattcacagggcgattctataaagattgctggggaagtattaaagcagaggttatggctgcagttagggcagtttggagcaggaatttcaacaatttctacaagctcaacacggcctttattaccttgataccgaaaaaagagggggcagagcaggtcaaagactttaggcctattagtcttgtgcacagttttgcaaaactgatcaccaagattcttgctaaccggctggccaaaaggctcaatgagctggtctctccgattcaaagcgcatttataaagggaaggttcatccaagataatttcatgttggtacaataaactgcaaggctgtttcaccagcagaaattgcctcgcctactcctcaaacttgatatcactaaggcctttgattcagtgtcctggccattcctaattgaagtcatgcagcagattggttttggtcatatctggagggatattgtttgtgggttattggcctcctccactacacaagtgctgctcaatggttccccgggggaacgtttagcccataggagagggctcaggcaggaagaccccctctcccccatgctattcatcctagttatggatgttcttggcctcttattcgctaaagctgaagaagcaggtttgctacagcagttatctagaagaaagaagctccataggatttctatttatgcagatgatgtggctgtgtttttatatcctactgctgaagaaacttctatcactctagacatcctgcaactttttggagatgcttctggcctcataaataatgtgcagaaatcaaatgtatatcctattcaatgctccgaggggaatttgatggaagttcagagtttgctgccttgtgagatggcaaccttcccctgcagatatttggggctccccctatccttgcataagctttctcggcagcagttccagccctttgttgaaagaattgcagatcaactctctaattggaaagctgacttaatgtctagagcaggaaggagaattcaggtgcaacatgttctcacaggcatgacagtttatttagcaatggcaattgacatcccccaatgggccttagatgccattgataagataagaaagggttttctttggagaggcacaaaggaagcaaagggaggacactgtttggttgcctggggaaaggtgtgtcgtccccttcagctgggaggcttgggaatctcaagtctccctgagctttgttgggctctccgcatgagatggctgtggttgcagaaaacagatttgggtcggccttgggcaagtcttcccatacaggtcccaaacaaagctagggcttttttctctatggctcttgtttctatggttggggatggttcaaacaccttgttctggaatgatagatggctgcatggcactcaaatcgctgatattgcccctagcctgcacaagtcaattccaacaagaattgctaacaaaaggacggtgaaagaagcacttgtaaacaggaaatggatttcagatattaagggggctcttacagtaagagtcttggttgattatctaaacctttgggaatctctttcagggattgagttacagccaaacataagggataaacatgttttcagccttgctgcagatggtaaatacacaacgaaagcagcttataatgacctgtttttaggatctgctacttttgatcactacaaaagaatctggagatcttgggccccctcaaagtgccgttttttcatttggttggtggcacacaacagatgctggactgctgatcgtttggccaaaaagggcctgaatcacccgcaaaggtgtcttctttgtgaccaggaagatgaaaccatgaaccacctccttatttcctgtgtcttcacaagaattttctggtatatgctcctaaggaaatttgggttacatgccctggccccacagcctggcctcacatccttcttagagtggtggaaaggggctgctgaggcagtgcagggaatggtcaagaaagggctgaattctctcatcatattgggtgcctggaagatatggaacctccgcaatagatgtgtgtttgatggagagacccccagcctctctcgaatcctgcaacaggctgatgaggagagaaacctttttgggagctagcaggggccaagagtctctcctttttggctgctcctttgtcggtagcctgaattcctaatggatttgtttctttatgcttgtttctggcctccgtaaggagagctattgtactatgtattatgtttctcctcttcttaatataattaaaggcgcagttcccctgcgctttcgaaaaaaaaggaacaatatacacctcatcactctttccaaatcgtgctcctgctagtagggtgttacttctaaactacataggaggtgctacaaacacaggaattgtttccaaggttagcaagtctctttcaacaatattgccttgtatttttgtgattatgatgtgtttatatatctttttagtgcccttctttatgaatagaacttttagtaccaatattctgttctttaatatcactataaaaacactaactgcacggaactcctggaaaatttgagctgcttgttatgtagtatgttttaaatatagtctttattcgattgcctgttattggctgtatttttttatgatcccaactcatttcaagactgaaagtgagctggtagaagcagttgatcgttgtcaacagagggtaactgcaaggcctactcgtgcgcccagctaagctctgcaagctagggatctaactggagtcccacatagttcgccttccgttgctcaccatctcattgtaatcgccaggccaacggcctcgcacatgtatatgtacggcactccagagatcaatagacttgctggttgagcattttctctcttcaatcgtgacctccgaaaaatgcttataaatcctacagcagtggatcctttagtcttaggtgtccgagtttggccacaagccatacctcggttcctggtaggacatcttgttcttccggaggccgcaaaatctgccctggaccgaggtgcctacgatgggctgttcctgggaggtaactatgttgcaagagttgccctgggaagatgcgtcgacgacgcgtatgagtgtgcctcgcaaatatatgactttttaaccatgtatgtctacaagtgatgaaagaagtggaaggcttcatgttaattgtcatgttgcataggagattgttctaatcacgaccctacaaaaaaaattgcattcgtttatgagagctgtgaagactcatgtagcgtttttat

SEQ ID NO: 29798 - DNA, 1379 bp, Zea Mays
cttttgtcagccactaagccctctcatcgccacaccagctatataaacacagctgctctcctgctccctttcccttccccccttccgttccgttccgatttgacgagttggtggctgctatagattcactccacccctctccatttctgataagtatccagctagctaccagtgtatgcaccaggcagcagcagcatggcggagtgcaaggacgacgacagcggccggcggtctccgtcgtcgtccatggacagcagcacccaccccccggcgctctccaccgcgtcctcggcctcccgccgcccgccggagaggagggaccagctcagccccgacctgcagctagggctcagcctgtcgccggcgtcctccgccctcctggtagcggagacaaacaacagcatcgtcccttctacgccaaggaaccaagcactcccggattggcccccgatcaaaccgttccttagaagcgccctgactgcctcggcacgccgacggcgaacgctgttcgtcaaggtgtacatggaaggcgtcccgatcggccggaagctggacatgctcttgctggacgggtacagcagcctcctagcgaaactttgccacatgttcaaggcatctatcacttgtaagtatatatgcaactagccaataagctcatcattaccacagattttttaatcagaggaagcaaaaaaaaaaaaaagatggtaatcattccatgccaacactagtttttcttgggattctagccacaaccactagaccacaaatttgaattattcaaattttggagttcttgcctcacactttatatatattgggtagataaactctcagacacgtaaaaaagtgttgacaagtaaaaaaaaatgaaaggagtattgcaaatgcttgccggtcgctctataataaatatgtgatatgattagatgctgacgctgtggagtaccatcagcgggttcctcacgagaaggccgcgcatgttctcacctatgaagaccatgatggagactggatgatggttggggatgtaccgtgggagctctttctcggaagcgtaaagaagctgaggattgcgagaaccgacaggtgctagatagcaaactttttcatgcggtggatcgactctgtttcttcttctttttttaatatatattaggttcattaggaaagattttgctgaacagagtggagtcgtgatgctgaggctatactaaccgtgtacagtgtactgaagaaacgccagccttgctaccatccctgcaaaattaaattttggtattttatgtttcctttcctgtttctttgactgccttgtaaataccatggttatttgttaaagaacaagcaatttgcatggaaaatattatagttccaag

SEQ ID NO: 29799 - DNA, 1028 bp, Zea Mays
tctcatcgccacaccagctatataaacacagctgctctcctgctccctttcccttccccccttccgttccgttccgatttgacgagttggtggctgctatagattcactccacccctctccatttctgataagtatccagctagctaccagtgtatgcaccaggcagcagcagcatggcggagtgcaaggacgacgacagcggccggcggtctccgtcgtcgtccatggacagcagcacccaccccccggcgctctccaccgcgtcctcggcctcccgccgcccgccggagaggagggaccagctcagccccgacctgcagctagggctcagcctgtcgccggcgtcctccgccctcctggtagcggagacaaacaacagcatcgtcccttctacgccaaggaaccaagcactcccggattggcccccgatcaaaccgttccttagaagcgccctgactgcctcggcacgccgacggcgaacgctgttcgtcaaggtgtacatggaaggcgtcccgatcggccggaagctggacatgctcttgctggacgggtacagcagcctcctagcgaaactttgccacatgttcaaggcatctatcacttcgggttcctcacgagaaggccgcgcatgttctcacctatgaagaccatgatggagactggatgatggttggggatgtaccgtgggagctctttctcggaagcgtaaagaagctgaggattgcgagaaccgacaggtgctagatagcaaactttttcatgcggtggatcgactctgtttcttcttctttttttaatatatattaggttcattaggaaagattttgctgaacagagtggagtcgtgatgctgaggctatactaaccgtgtacagtgtactgaagaaacgccagccttgctaccatccctgcaaaattaaattttggtattttatgtttcctttcctgtttctttgactgccttgtaaataccatggttatttgttaaagaacaagcaatttgcatggaaaatattatagttccaag

SEQ ID NO: 29800 - DNA, 1073 bp, Zea Mays
ctctgtgctcttgtatattcatgtctccaagtccattggccaaggcatgggcctgctccctgtttggtattaaaatccagaactaggtaatttcaccttagtaaaaactagaaacatggagacacaaagcttaaataaacatctacacactatgtcacgtttcatattcctttatctctaccacagatacaactctgagtagccacggataaaagaagaggaagctcaaacaggaatattgccaagggataaacatctacacacttagatacactttttctacctcgatccatgtgtgttggagtgttggagtggattggtttataatttaaacttgaattgagtttgatacaagtgcatcgaaacaaggtctcatgtggaagaaaacaaacttggaaccttaacctgaccctgaggctctcatctgactgccaaaaaaatgtgatccaacatgatggcaccacagtagaagttcttgcaagagatgctgtactgctctatttcctcattttctgtatagttcagcatgtagcagtggttactacgaggaatacatgtatattgaccaccagtgctgaaaaggcgactaggcttccaagcaagtgctaagtctgcctggacgcctaggaaacaaggaatcactgtttcccaaggcgagctggagatacctggagacggctggacgtgcgtaggcaacacctttgaaacactatacaactgttctgcattttctgtcttctgctctcactaataaggaagtaaacttcttcgtatatggttcgaatgaaccataccttgcagattccactgctgggagccttggatgcccatgaacccttgagtatgcagaaactccagtaggccttattgccttaattgtgtctagataaaataggtagcgagcttttatgtttgacaagtgcaggtaccatccttgagacaatagaaacctcacctttgctgaagtattcataaggtacagatttggttctcaattgttgattaaactgcatcccttttccttccttaactcctgaaacatcatccacctccgcacctcctttgcctcctcc

SEQ ID NO: 29801 - DNA, 1112 bp, Zea Mays
cccacccctctattttccctagccgccactctctcttctcccctttctttttctctcacgcacaaccttcttccttctctgttcctggcgtagcagcagggagccgtgctcctctccatggcgcccaggcctgctcctcccctcggccagccatggcgtcccctgcccttctcctcccatgggcgtgagctccacttcccctgcaggcgagcagcaacttcggccagcaagcagcccacgccccttgcttccatcgatggccggcgccctgcacaatgtccgactccctctccttcccaaacagatagcgacattcatcttcctactccagcgaccagcagcaaggacagcccccttccctcgctcctttccgatgtgcctcgcgtgttcaacacaatgcctgcgaggaagatgtgttgttgcagccccgtcgacgctcgccgggtgtttgctgtttttggcgcagacccgctcgcgacgtcgtcgaccctcgccaccgtcaaagtcgcgcttcgtgccttgcagttcgacgaaatgctgagccacgtggacagtccatgcggctaaatcccgactcgttcaggttgaatccatgtgattgacttacttgcacatttgtcattgtcatatatatatatatgtatgtgaatatgttgtatgcgaattaaaactcatggaggagaaagtggtacgcgtagatgtgtttgcgattggaatgccaataagtgtatatgtggctgcgatagttcttttgtacgtcgtagggattggtcgcagatgtattaattgtttgctaaagcacttcgtcataaagtagtgtgttagttgtggtaaattaaataaagcgtaaaacatacttagtaatttccatagtcggctaatgagttagtctatgttaaatatattttatgtattcatcgtggtgtaggatagagtgggtcgaagatataaattatgagacatgtgatttgtgtttaaggacgagatgtgcgaataatcggttactgtttcacatgtctagtcgataaatgtggttataaataattgtgctcgacataaatgtttggtcgttgtatcacttcctctatgtttataagtcgagtcaaaatgcg

SEQ ID NO: 29802 - DNA, 1035 bp, Zea Mays
cgccactctctcttctcccctttctttttctctcacgcacaaccttcttccttctctgttcctggcgtagcagcagggagccgtgctcctctccatggcgcccaggcctgctcctcccctcggccagccatggcgtcccctgcccttctcctcccatgggcgtgagctccacttcccctgcaggcgagcagcaacttcggccagcaagcagcccacgccccttgcttccatcgatggccggcgccctgcacaatcgaccagcagcaaggacagcccccttccctcgctcctttccgatgtgcctcgcgtgttcaacacaatgcctgcgaggaagatgtgttgttgcagccccgtcgacgctcgccgggtgtttgctgtttttggcgcagacccgctcgcgacgtcgtcgaccctcgccaccgtcaaagtcgcgcttcgtgccttgcagttcgacgaaatgctgagccacgtggacagtccatgcggctaaatcccgactcgttcaggttgaatccatgtgattgacttacttgcacatttgtcattgtcatatatatatatatgtatgtgaatatgttgtatgcgaattaaaactcatggaggagaaagtggtacgcgtagatgtgtttgcgattggaatgccaataagtgtatatgtggctgcgatagttcttttgtacgtcgtagggattggtcgcagatgtattaattgtttgctaaagcacttcgtcataaagtagtgtgttagttgtggtaaattaaataaagcgtaaaacatacttagtaatttccatagtcggctaatgagttagtctatgttaaatatattttatgtattcatcgtggtgtaggatagagtgggtcgaagatataaattatgagacatgtgatttgtgtttaaggacgagatgtgcgaataatcggttactgtttcacatgtctagtcgataaatgtggttataaataattgtgctcgacataaatgtttggtcgttgtatcacttcctctatgtttataagtcgagtcaaaatgcg

SEQ ID NO: 29803 - DNA, 760 bp, Zea Mays
cttcactttcccatgtcgaggcaaagaagagatatgaatttttggaggctgttagtgcgatgatggactcacatcttcgatattttaaacaaggatatgaactattgcatcaaatggaaccatatattaatcagtagttgggagaggtgatctttgcatgagtccagtagaatttcaaccttctgtaagtgaagatttagtactggagaagaaatctggaaatgggcagcatgatgtcagaggcacacatcatcacagaaccaacatgaaacctgaaaaaccaattgacttgcttaggaaagttgatggcaataatatgtgtgctgactgtggtgcttcagaacctgattgggcatcattaaaccttggcgcacttctatgcatagagtgttctggggtacacagaaatcttggagtgcatatatcaaaggttagatctcttacacttgatgtcagagtttgggagccatctgtaatcaatctctttcagtcattaggcaacatgtttgtcaacagtatttgggaagagacgctgccagatgataattcaagtgctgatggatcagacacatcacagtacctctctgttagcaagcctaaacacaaagatgtattctctgccaaggagaagtttattcatgccaaggtattcactacattcacaactgcttatattcctttgttctttagcaatgtatggggtgttaaaaaccaaattatctccatgcgaaggatgattgcacaaatatgactccttaac

SEQ ID NO: 29804 - DNA, 5287 bp, Zea Mays
agcccagcacggtctcctcctgcgaccagctgtcacagctcacggccaatgatctcccgacacgtgatctctatgtgagccgttcgaatcgaaccgcctcatctccgccgctcgctttggccaacgggagtgggtaccataaataaatacctttgtttccgccaattattcgataaccaagaacaaaccattgttggacgcgttcccctcctgcacgcaacctcatctcgtcctccagatccaggatggccgtcctccttgagaccttgcctccccgagtgctctcgtccttgcctgcaaggttcttgttgttttgttttggtggtcgagcatcgcatgttctgcttctggatccagatctggagaaatcgcgaagtcgtcgtcgttcggttcggagcggatctgaggcgacgatagatggaggcggcgggatctctcggtctgcagtcctgctccacctcgatggatgatgtctctgcgctgataattattggatcaatttcgataattattagtagatctatgagatatgccgcctggaagaggcgaggtaagctgcagcatgtaaaaaagagaaaaaagatgtgacatcctagaggaggaggcctttgccatgatgggtgcgctcgcatggcaggccaggcaataataaaaagatgattattgcgtgccgggggaggagatcgcacgggggttgatgtttttggccccgggttctcctccctcatcttgttccgtgttcctgtatgcgttgcttccgctcctgttggtccgctacgcacgccggatttttgcatcgagcacggagatctacaacaaaaacatggagctacgacgcgattcccaagtatgatggattccactattcatcaaccgaaattatggcgcgcttcaatcgtggctacgctgatggggaactgatccgttatggtgtgcttggatcgtggctgtgtggagatgtgtggaactcattggttataatggtgatgctgatggaactgattttgctcccgttggacggcctgattggttactttgccctgttgactgtttgagaacgtaccgcccaggtttacttatacttactgctttttgacggtactgtacatacagttcgacaatttatttattggcagttcaattcatccatttagctaggggcacgagagcatgagttcccctggagatcaatttcatgttgctttttttttgcgaagttccattttctattttcaatttgattagggctagtttgggaacttattcttccaaggtttcctaaggaaaattagttcatttttttttttgggaaaatgaagtttccaaaagggtttcaaatccatggtggtgtgggaattgattgcagtaaaggcgatgggtaagctgataccggtgggttgagaattagaccatcagtagcttactctttcccatatttaaactataatctacactacaaaatagtgcaaaaggtgttcatagtgacctatgaataatataatctacactacaaaaatagtccaaaaggtgtttgtagtgaccatatatgggtgtacattgtacctttttacattgtatttgtagtgatcatatatgggtgaactactgtacttttttatattgtagatcgtattatttatagtgtgcagtttgaatataggtaagctgatggtcttattgcctgtcaagttcatatataatagttttgggattaattttttttgcgtcatagaaattcataagcatgtgagtttatcacatatatacatcagaatattaactagaatatatttaaaattggtttcgttcatatactcggaattgtgcccagcgggattatataatttaacaaagaacatggtacagaattataagccgtgactttataccattatattaaacgtaattgggaatatttaaattgtttttcattctaattgactgcattttgtttaagtctcaagggtgccgtgcttttaatctagggcctaaaattgggtgattaaggggctgtttggttcgtggtcatactttacctaaggttagtcgtttgaactgaaaaactaatcttagtcagaaaagttaagcaaagtgtagtaagttagtcatcaaaccaaacaggctctaaaagcaagttaaaatccaccggaattgactgcattttgtttgtcttgttttcatcaatccaccggaattcagtgattaaatctcgcaagttaaaatttttcttaatttgctcaatatttttcagcgatatccgttcttttgaatgggtctattcacagaaggtttggttgtgaacacgaatattcaattgatatatgtgtactttttaaaggtattttatggttatttaaatgtagctgcgtctgctcgttgaggtgtggatctttcctcaacacggtgaggtcatccgtttgactgctagcctaggcgtgctgtcccggatggatggtggttcaaatccaccaagattctttagtagtcggaacttattgctcaccaaagaacttaccattgctttaggatgttttatttttgtatataggcttagccggttagggcctgtttggatcagtttataagaaactgttttttgaaaattgaggtggttccaaatatatcactagactttcaaacagcatcttagttaaacaggaccttagttttgatacgaggcctgcactcagcccggcggcgatcaaaatcgaacgtgtgggatctctgatatttgactaggtctggtcggtagcaaaccaaacatgtaagaatttgtacatatactcaacgtcttagaatttgcagtttagagaacagagagtttttgtttttgtttttgcttagttcacgtctctttcatcgaagtggcttctcatttttgcctagactctttattttacaagtaagaatttcttcctagatttttatgatccacgggaatttacactgaatcttttgtcagaaaaatgcaagaatttcatataatccagtttatttttattttttgataataaaatttctctagtaaaaaaatgttgtagggcctaggagttctataatttataattcataccgaattatcagcaatctcctttatagaagtgatatatgtagaaaacaaaaaaaaaagatggcattcacgttttctagaagtggtgataatttgaattttgtccaaagtcgtactgacatgttccgtgcgaaagggcgttctcaatgggaagaggaaaacactgtttccaaagctaccatctcaaaaaacactaaatctcgtatttttctttattaaattgtatattgtgttatcttatttgtttacgtgacgtattattaataaaaataaaactcttatgaaactcctattaagaatgacttcatttagagtaaaattataaaaaatttactaacatttatgatattaagtataattattataataatatttttgtttatagtaaatctacttaaagttaagatacttggaggctctttggatccaaacaagttcagccaaagtgactaaaatgacatatttttattattttagtcacttttaactagcttggaatgtgattgaactttattaatgtttgttttagcacctaaacaggctcttagatcatggctactactaatagttaactactagctaatatgtcataactactatgtaactactattacccctattaggactagtttaggaacttcattttcttaaggaatttctatttttcaagaggacttggataaatgaggttcccaaactagtccttaacaaatttcactcgactagtaaaatagtactattattagctactagaaaaatattgctaacaatcagttaaactattagcaacatgtatttggattcaagaaaataattatgagtagctaattagtaattactatctttcttgaacctaagtaggatcataattaataaaaatcctatagtttttagagagccaagataggatcataattaacataaataatgtagtttaattttttgatagacagtactagggcatgtttagtttcattgtgctaaactttagcatcacttaaagagataaagtgctaatgtatgttaaactttagcattttacttttaatatcttctagtatattttagcactcatgtttggatttacaagagctaaagtttactaaagatgtagtgctaaactttagcattatggaatcaaacatgcccttagagtgtacataataagaactgcacattaggccttagactgccttcaacaactaccttattttattctatattttaaactttactctgcaatcagtataatccatagtataaataataaatctcttattttacatgatctagtgtacataataagaactgcatattaggccttagctatcttcaacaactatctcatttcattctatatgtcaaattttactctgcaatcagtataatctatagtataaatctcttattttacatgatttgttgtggacaatctttacatggatggcacatggacctgagacaacattggacgacatgtgaaactttctttggacaatattggacaacaggagaaagctagaaggagcatacaaatttgaattctgcttcttttccaacattggataatatgaaaaacttagaagaaacatagacataggattctacttcttttccagtttttttgtggtaaatagatcattattaatttggcataattatattcataatcgagcattgcatctaattgtgctaattcatttgctgctgaattttgctttgtttttatcagctgaaccctccaaccaactgaaggctacaaatactcctctgtttggacgagggtgaacatgagcttagacttgtcctcattcgatttgcaacgtctcgacaacccttgcacgatctgactctactgttagatcgtccgtacccatagtttatccaaaagaattattttacacggtatgtactgttatgtgttgtagattatattgttagaaaagtgaagtttgaatatataggtatagagatggataaactgtcatagatttagtcttagaggtacaacaccattccgttgcaagcctctgcctcaacaacttgtgccatttaaaatcacttgtcgtctctaccagtctgcctcgtgccatgtaaaaatcacttgccaagctgtaaattagacagttgtactatcatcttttgccaccgccttcaaaattgtatacaaggaatatatatatagtgaattccttattttatgtgccttatttgcat

SEQ ID NO: 29805 - DNA, 5262 bp, Zea Mays
gggtaccataaataaatacctttgtttccgccaattattcgataaccaagaacaaaccattgttggacgcgttcccctcctgcacgcaacctcatctcgtcctccagatccaggatggccgtcctccttgagaccttgcctccccgagtgctctcggtgagctactttgtttcgatttatcaggaaatccgtttgcttcatgttgtgcaggctcatatctgattgctggattcggcaaacccgcgttggatcctgtatcgatctggagaaatcgcgaagtcgtcgtcgttcggttcggagcggatctgaggcgacgatagatggaggcggcgggatctctcggtctgcagtcctgctccacctcgatggatgatgtctctgcgctgataattattggatcaatttcgataattattagtagatctatgagatatgccgcctggaagaggcgaggtaagctgcagcatgtaaaaaagagaaaaaagatgtgacatcctagaggaggaggcctttgccatgatgggtgcgctcgcatggcaggccaggcaataataaaaagatgattattgcgtgccgggggaggagatcgcacgggggttgatgtttttggccccgggttctcctccctcatcttgttccgtgttcctgtatgcgttgcttccgctcctgttggtccgctacgcacgccggatttttgcatcgagcacggagatctacaacaaaaacatggagctacgacgcgattcccaagggatacttgtttcttgtaagtctgttagcatgtttgaaccatagcaattggcggacgtgtgtaaaactgcagtatgatggattccactattcatcaaccgaaattatggcgcgcttcaatcgtggctacgctgatggggaactgatccgttatggtgtgcttggatcgtggctgtgtggagatgtgtggaactcattggttataatggtgatgctgatggaactgattttgctcccgttggacggcctgattggttactttgccctgttgactgtttgagaacgtaccgcccaggtttacttatacttactgctttttgacggtactgtacatacagttcgacaatttatttattggcagttcaattcatccatttagctaggggcacgagagcatgagttcccctggagatcaatttcatgttgctttttttttgcgaagttccattttctattttcaatttgattagggctagtttgggaacttattcttccaaggtttcctaaggaaaattagttcatttttttttttgggaaaatgaagtttccaaaagggtttcaaatccatggtggtgtgggaattgattgcagtaaaggcgatgggtaagctgataccggtgggttgagaattagaccatcagtagcttactctttcccatatttaaactataatctacactacaaaatagtgcaaaaggtgttcatagtgacctatgaataatataatctacactacaaaaatagtccaaaaggtgtttgtagtgaccatatatgggtgtacattgtacctttttacattgtatttgtagtgatcatatatgggtgaactactgtacttttttatattgtagatcgtattatttatagtgtgcagtttgaatataggtaagctgatggtcttattgcctgtcaagttcatatataatagttttgggattaattttttttgcgtcatagaaattcataagcatgtgagtttatcacatatatacatcagaatattaactagaatatatttaaaattggtttcgttcatatactcggaattgtgcccagcgggattatataatttaacaaagaacatggtacagaattataagccgtgactttataccattatattaaacgtaattgggaatatttaaattgtttttcattctaattgactgcattttgtttaagtctcaagggtgccgtgcttttaatctagggcctaaaattgggtgattaaggggctgtttggttcgtggtcatactttacctaaggttagtcgtttgaactgaaaaactaatcttagtcagaaaagttaagcaaagtgtagtaagttagtcatcaaaccaaacaggctctaaaagcaagttaaaatccaccggaattgactgcattttgtttgtcttgttttcatcaatccaccggaattcagtgattaaatctcgcaagttaaaatttttcttaatttgctcaatatttttcagcgatatccgttcttttgaatgggtctattcacagaaggtttggttgtgaacacgaatattcaattgatatatgtgtactttttaaaggtattttatggttatttaaatgtagctgcgtctgctcgttgaggtgtggatctttcctcaacacggtgaggtcatccgtttgactgctagcctaggcgtgctgtcccggatggatggtggttcaaatccaccaagattctttagtagtcggaacttattgctcaccaaagaacttaccattgctttaggatgttttatttttgtatataggcttagccggttagggcctgtttggatcagtttataagaaactgttttttgaaaattgaggtggttccaaatatatcactagactttcaaacagcatcttagttaaacaggaccttagttttgatacgaggcctgcactcagcccggcggcgatcaaaatcgaacgtgtgggatctctgatatttgactaggtctggtcggtagcaaaccaaacatgtaagaatttgtacatatactcaacgtcttagaatttgcagtttagagaacagagagtttttgtttttgtttttgcttagttcacgtctctttcatcgaagtggcttctcatttttgcctagactctttattttacaagtaagaatttcttcctagatttttatgatccacgggaatttacactgaatcttttgtcagaaaaatgcaagaatttcatataatccagtttatttttattttttgataataaaatttctctagtaaaaaaatgttgtagggcctaggagttctataatttataattcataccgaattatcagcaatctcctttatagaagtgatatatgtagaaaacaaaaaaaaaagatggcattcacgttttctagaagtggtgataatttgaattttgtccaaagtcgtactgacatgttccgtgcgaaagggcgttctcaatgggaagaggaaaacactgtttccaaagctaccatctcaaaaaacactaaatctcgtatttttctttattaaattgtatattgtgttatcttatttgtttacgtgacgtattattaataaaaataaaactcttatgaaactcctattaagaatgacttcatttagagtaaaattataaaaaatttactaacatttatgatattaagtataattattataataatatttttgtttatagtaaatctacttaaagttaagatacttggaggctctttggatccaaacaagttcagccaaagtgactaaaatgacatatttttattattttagtcacttttaactagcttggaatgtgattgaactttattaatgtttgttttagcacctaaacaggctcttagatcatggctactactaatagttaactactagctaatatgtcataactactatgtaactactattacccctattaggactagtttaggaacttcattttcttaaggaatttctatttttcaagaggacttggataaatgaggttcccaaactagtccttaacaaatttcactcgactagtaaaatagtactattattagctactagaaaaatattgctaacaatcagttaaactattagcaacatgtatttggattcaagaaaataattatgagtagctaattagtaattactatctttcttgaacctaagtaggatcataattaataaaaatcctatagtttttagagagccaagataggatcataattaacataaataatgtagtttaattttttgatagacagtactagggcatgtttagtttcattgtgctaaactttagcatcacttaaagagataaagtgctaatgtatgttaaactttagcattttacttttaatatcttctagtatattttagcactcatgtttggatttacaagagctaaagtttactaaagatgtagtgctaaactttagcattatggaatcaaacatgcccttagagtgtacataataagaactgcacattaggccttagactgccttcaacaactaccttattttattctatattttaaactttactctgcaatcagtataatccatagtataaataataaatctcttattttacatgatctagtgtacataataagaactgcatattaggccttagctatcttcaacaactatctcatttcattctatatgtcaaattttactctgcaatcagtataatctatagtataaatctcttattttacatgatttgttgtggacaatctttacatggatggcacatggacctgagacaacattggacgacatgtgaaactttctttggacaatattggacaacaggagaaagctagaaggagcatacaaatttgaattctgcttcttttccaacattggataatatgaaaaacttagaagaaacatagacataggattctacttcttttccagtttttttgtggtaaatagatcattattaatttggcataattatattcataatcgagcattgcatctaattgtgctaattcatttgctgctgaattttgctttgtttttatcagctgaaccctccaaccaactgaaggctacaaatactcctctgtttggacgagggtgaacatgagcttagacttgtcctcattcgatttgcaacgtctcgacaacccttgcacgatctgactctactgttagatcgtccgtacccatagtttatccaaaagaattattttacacggtatgtactgttatgtgttgtagattatattgttagaaaagtgaagtttgaatatataggtatagagatggataaactgtcatagatttagtcttagaggtacaacaccattccgttgcaagcctctgcctcaacaacttgtgccatttaaaatcacttgtcgtctctaccagtctgcctcgtgccatgtaaaaatcacttgccaagctgtaaattagacagttgtactatcatcttttgccaccgccttcaaaattgtatacaaggaatatatatatagtgaattccttattttatgtgccttatttgcat

SEQ ID NO: 29806 - DNA, 5190 bp, Zea Mays
gggtaccataaataaatacctttgtttccgccaattattcgataaccaagaacaaaccattgttggacgcgttcccctcctgcacgcaacctcatctcgtcctccagatccaggatggccgtcctccttgagaccttgcctccccgagtgctctcggtgagctactttgtttcgatttatcaggaaatccgtttgcttcatgttgtgcaggctcatatctgattgctggattcggcaaacccgcgttggatcctgtatcgatctggagaaatcgcgaagtcgtcgtcgttcggttcggagcggatctgaggcgacgatagatggaggcggcgggatctctcggtctgcagtcctgctccacctcgatggatgatgtctctgcgctgataattattggatcaatttcgataattattagtagatctatgagatatgccgcctggaagaggcgaggtaagctgcagcatgtaaaaaagagaaaaaagatgtgacatcctagaggaggaggcctttgccatgatgggtgcgctcgcatggcaggccaggcaataataaaaagatgattattgcgtgccgggggaggagatcgcacgggggttgatgtttttggccccgggttctcctccctcatcttgttccgtgttcctgtatgcgttgcttccgctcctgttggtccgctacgcacgccggatttttgcatcgagcacggagatctacaacaaaaacatggagctacgacgcgattcccaagtatgatggattccactattcatcaaccgaaattatggcgcgcttcaatcgtggctacgctgatggggaactgatccgttatggtgtgcttggatcgtggctgtgtggagatgtgtggaactcattggttataatggtgatgctgatggaactgattttgctcccgttggacggcctgattggttactttgccctgttgactgtttgagaacgtaccgcccaggtttacttatacttactgctttttgacggtactgtacatacagttcgacaatttatttattggcagttcaattcatccatttagctaggggcacgagagcatgagttcccctggagatcaatttcatgttgctttttttttgcgaagttccattttctattttcaatttgattagggctagtttgggaacttattcttccaaggtttcctaaggaaaattagttcatttttttttttgggaaaatgaagtttccaaaagggtttcaaatccatggtggtgtgggaattgattgcagtaaaggcgatgggtaagctgataccggtgggttgagaattagaccatcagtagcttactctttcccatatttaaactataatctacactacaaaatagtgcaaaaggtgttcatagtgacctatgaataatataatctacactacaaaaatagtccaaaaggtgtttgtagtgaccatatatgggtgtacattgtacctttttacattgtatttgtagtgatcatatatgggtgaactactgtacttttttatattgtagatcgtattatttatagtgtgcagtttgaatataggtaagctgatggtcttattgcctgtcaagttcatatataatagttttgggattaattttttttgcgtcatagaaattcataagcatgtgagtttatcacatatatacatcagaatattaactagaatatatttaaaattggtttcgttcatatactcggaattgtgcccagcgggattatataatttaacaaagaacatggtacagaattataagccgtgactttataccattatattaaacgtaattgggaatatttaaattgtttttcattctaattgactgcattttgtttaagtctcaagggtgccgtgcttttaatctagggcctaaaattgggtgattaaggggctgtttggttcgtggtcatactttacctaaggttagtcgtttgaactgaaaaactaatcttagtcagaaaagttaagcaaagtgtagtaagttagtcatcaaaccaaacaggctctaaaagcaagttaaaatccaccggaattgactgcattttgtttgtcttgttttcatcaatccaccggaattcagtgattaaatctcgcaagttaaaatttttcttaatttgctcaatatttttcagcgatatccgttcttttgaatgggtctattcacagaaggtttggttgtgaacacgaatattcaattgatatatgtgtactttttaaaggtattttatggttatttaaatgtagctgcgtctgctcgttgaggtgtggatctttcctcaacacggtgaggtcatccgtttgactgctagcctaggcgtgctgtcccggatggatggtggttcaaatccaccaagattctttagtagtcggaacttattgctcaccaaagaacttaccattgctttaggatgttttatttttgtatataggcttagccggttagggcctgtttggatcagtttataagaaactgttttttgaaaattgaggtggttccaaatatatcactagactttcaaacagcatcttagttaaacaggaccttagttttgatacgaggcctgcactcagcccggcggcgatcaaaatcgaacgtgtgggatctctgatatttgactaggtctggtcggtagcaaaccaaacatgtaagaatttgtacatatactcaacgtcttagaatttgcagtttagagaacagagagtttttgtttttgtttttgcttagttcacgtctctttcatcgaagtggcttctcatttttgcctagactctttattttacaagtaagaatttcttcctagatttttatgatccacgggaatttacactgaatcttttgtcagaaaaatgcaagaatttcatataatccagtttatttttattttttgataataaaatttctctagtaaaaaaatgttgtagggcctaggagttctataatttataattcataccgaattatcagcaatctcctttatagaagtgatatatgtagaaaacaaaaaaaaaagatggcattcacgttttctagaagtggtgataatttgaattttgtccaaagtcgtactgacatgttccgtgcgaaagggcgttctcaatgggaagaggaaaacactgtttccaaagctaccatctcaaaaaacactaaatctcgtatttttctttattaaattgtatattgtgttatcttatttgtttacgtgacgtattattaataaaaataaaactcttatgaaactcctattaagaatgacttcatttagagtaaaattataaaaaatttactaacatttatgatattaagtataattattataataatatttttgtttatagtaaatctacttaaagttaagatacttggaggctctttggatccaaacaagttcagccaaagtgactaaaatgacatatttttattattttagtcacttttaactagcttggaatgtgattgaactttattaatgtttgttttagcacctaaacaggctcttagatcatggctactactaatagttaactactagctaatatgtcataactactatgtaactactattacccctattaggactagtttaggaacttcattttcttaaggaatttctatttttcaagaggacttggataaatgaggttcccaaactagtccttaacaaatttcactcgactagtaaaatagtactattattagctactagaaaaatattgctaacaatcagttaaactattagcaacatgtatttggattcaagaaaataattatgagtagctaattagtaattactatctttcttgaacctaagtaggatcataattaataaaaatcctatagtttttagagagccaagataggatcataattaacataaataatgtagtttaattttttgatagacagtactagggcatgtttagtttcattgtgctaaactttagcatcacttaaagagataaagtgctaatgtatgttaaactttagcattttacttttaatatcttctagtatattttagcactcatgtttggatttacaagagctaaagtttactaaagatgtagtgctaaactttagcattatggaatcaaacatgcccttagagtgtacataataagaactgcacattaggccttagactgccttcaacaactaccttattttattctatattttaaactttactctgcaatcagtataatccatagtataaataataaatctcttattttacatgatctagtgtacataataagaactgcatattaggccttagctatcttcaacaactatctcatttcattctatatgtcaaattttactctgcaatcagtataatctatagtataaatctcttattttacatgatttgttgtggacaatctttacatggatggcacatggacctgagacaacattggacgacatgtgaaactttctttggacaatattggacaacaggagaaagctagaaggagcatacaaatttgaattctgcttcttttccaacattggataatatgaaaaacttagaagaaacatagacataggattctacttcttttccagtttttttgtggtaaatagatcattattaatttggcataattatattcataatcgagcattgcatctaattgtgctaattcatttgctgctgaattttgctttgtttttatcagctgaaccctccaaccaactgaaggctacaaatactcctctgtttggacgagggtgaacatgagcttagacttgtcctcattcgatttgcaacgtctcgacaacccttgcacgatctgactctactgttagatcgtccgtacccatagtttatccaaaagaattattttacacggtatgtactgttatgtgttgtagattatattgttagaaaagtgaagtttgaatatataggtatagagatggataaactgtcatagatttagtcttagaggtacaacaccattccgttgcaagcctctgcctcaacaacttgtgccatttaaaatcacttgtcgtctctaccagtctgcctcgtgccatgtaaaaatcacttgccaagctgtaaattagacagttgtactatcatcttttgccaccgccttcaaaattgtatacaaggaatatatatatagtgaattccttattttatgtgccttatttgcat

SEQ ID NO: 29807 - DNA, 2367 bp, Zea Mays
cgggagagggtaccataaatacatttgtttccgccaattattcgtcgataaccaagaacaaaccattgttggacgcgttcccctcctgcacgcaacctcatctcgtcctccagatcctggatggccgtcctccttgataccttgcctcgcgagtgctctcgagctaggactgggagaaaacaacaaacccgcgttggatcctgtatcgatctggagaaatttctaagtcgtcgtcgtcgtcgtcgttcggttcggagcggatctgaggcgacgatggctggaggcggcgggatctcttggtctgcagtcctgcttcacctcgatggatgatgtctctgcgctgataattattggatcaatttcgataattattagtagatctatgagatatgccgcctggaagaggcgaggtaagctgcagcatgtaaaagtctgcgtgcgtcgacagcaaaaaagagaaaaaaagatgtgacatcctagaggaggcctttgccatgatgggtgcgctcgcatggcaggccaggtattaataaaaagatgattattgtgtgccgggggaggagatcgcacgggggttgatgtttttggccccggggtctcctccctcatcttgttccgtgttcctgtatccgttgtttccgcgcctgttggtccgctgcgcacgccggatttttgcatcgagcacggagatctacaacaaaaacatggagctacgacgcgactcccaaggtacaatcggtaattatgttcaaacaatttttaagtcgttctgcgctccttctattacgagcaacgttttatattctgtgcttgcataatgaatcgaagaaatcctgacaccaatcgaactgaagatcctgaaacgcacgttaataccgttgacgtccgcttcacccagctcgattttcagtcttgtaatactaatcgctccatgagtctgaagtgtgcaaaaatttaggtcgcagctacacaaatttacatgctggttctgttcaacccgtgaatctcctaaggtcacagcgtttttatttcattctatattatatttcagtctggactaatgttgagatctccatatgtatctacgtctaagcatttttcatttgtatttaccatgttggtcaattgggatatttgtttcttgtatgttagcatgtttgaaccatagcaattggtggacgtgtgtagagaagattgcaaaactgcagtatgatggattccactattcatcaaccgagatcatggcgcgcttcaatcgtggctacgctgatggggaattgatccgttatggctcgtggctgtggagatgtggaactcattggttatagtgtgcttcaatcatgggtcatggcgatgctgatggaactgatttgttaccaaggtttaagttttcgctaccgttggacggcctgactggtactttgccctgttgactgtttgagaacgtactgcccaggtttacttaatacttgctgctttttgacggtactgtacatattgttcgacaatttatttcttggcagttcaattcgtccatttagaatttctaggggcacgagagcatgtgttaccctggagatcaatttcatgctgctttttgtaattgatcatgctgctttttgttacaaagttccctattctattttcaatttgattgagggttgcaaaattcatggcgttgtgagggaattgattccagtgaaggcgatggcgactggtaatttgatatcggtgggttgggaattagactatctccaccagattgtctatattcaaattacgctctacaaacaatataatttacactatgggtctactatattgtagattgtactgtttataaattgtagttttaatatctaattgtagattgcattgtttataaattgtttatagattgtttataaattgtaggtgttttaattatatatggtcattcatataatagagttttgggattaagggcccctttggtagggctctggcttctccaaaaacggctttaactctggctcacgaggtgaaaccacttctttagatgagacaaagttattttaaaaaatcatttggcaaaacggcttataggttgtttttcagaaagatccttatatatgtatatctctcctgtacgtggctagggattgagggcaggaccaaaaaataataatctggactggtgggaggactatagtgcaaaaataacgtgagccgaagccgggtgagccacttttttttagttcattttggaaaagtacttcactggtgaagccatctgaaaaagaggtgtttgacataacttttgcatgagccagagccgaagctgaaaaacattttttatcatatgcagcagagtatctttttaaaatt

SEQ ID NO: 29808 - DNA, 3027 bp, Zea Mays
ttcatataattatcatttaaccaagaatatatgacaggattataagccgtgactttatataaaccgtaattttaactgggaatatttaaattgtttttcatcattgcattttgttttagtctcgaagggtgccgtgcttttcatttaggtccttgttttaatctcgatccaccggaattgggtgtttaaatctctagcaagtttggttgtataaatatatcatttgaatattcgttctttttgtatgggtctatttacagaacgcttggttgtgaacacgaatattcataagatatatttatactttttaaaggtattttatggctattaaatgtagctgcgtctgctcgttgatgtgtggatctttcctcagctcggtgaggtcatccgtttgactgctagcctaggtgtgctgtctcggatggatggtggttcaattccaccaagattctttagtgtctgttcggttagtgcctgttcggttagctaggattaagacctgaaactatttagacttatcagttttaatataaataaaactaacattccacgtaaaacagttctaaaggatccgttccgaacataccattgctttaggatgttttatttttgtttagagactaggcctgtttggaagtggaacttactgattctttaggctttgttcggttctacctcaattcatatggattgagggggattgagggggtttcaattcctagtaagtcaaaatccctctcaatccgtatcaatccccttcaatccatatgaattgaaaataaccgaacaagcccttagtcggaacttattgctcaccaaaaaacttatcattgctttaggatgttttatttttgtttagaggcttaaggcctgtttagaagtagaatctgtttttttatattgaggtggttctatacatgtttatgatttaggttttagcttagattatataatctagattataatctaaactatataatctagattataatttagaaagattataatcggcaatgactaatatataagtagtcattaggtgcaagtgtgtaaccactcttagtggtggaaggatttaaaggatttaaatgtataatcgtggtttgttagggttttttttataaagctatatgagatgtggtggaaggatttaaatgttaaatgtgacatatgattatctagatctaatggaacaagagacctgcttgcacctctacacatgtagttgtttgctagtctagattatacaaatatagattattcacaatgacaagagtaccctgtttgtttatttgaggttttatttgaggtgaggatgggtagtgagtttttttgtcaaaaataatcttaaataaactacttttaataagattcatgagattatcataatataggctttagattgcataatctgaatctataatctaggtatttatttaactgctggattatttacgctaaattatataatccgaagagattataatccgaaacaaataaggtcttagttttagtttatagaaactggattcttagttttcttaaaaataagaaactaagaagctgacctttcctaacaaaaaaggtaagtcagtttctttaaaaaactagattgcttactttagttaaacaggaccttagttttgatattaggcggcgatcaaaatcgaacgtctgggatctctgatatttgactgatctctgatatgtgactgggcttggtcgggagcaaaccaaacatgtacttatactcgttttggttttgcttagttcacatctttcatcgaagtggcttctcattttttcctagactgtttattttacaagtaagaatttcttcctagatttttgattatcaacgagaatttacactgaatcttttgtcagaaaaaatgcaagaatttcatataatccagtttattttttattttttgataataaaatttctctggtaaaaaatgctgtagggactaggagttctctaatttataattcatattgaattatcagcaatctcctttatagaagtgacgactatatgtagaaaacaaaaaaaagatggcgttcacgttttctagaagtggtgataatttgaactttgtccaaagtagtactgacatgttccgtgcgaaagattattctcaatgggaagaggaaaacactgtttccaaagctatcatgtcaaaaaaaaaacactaaatctcttgtatttttctttattaaattgtatattgtgtttctctttatctactcactgcagtttctctttatctactcactgcatctactcactgcaccaaagacattcttgattatattattatgatctttaggatcgagctccgcattcttttattggaggttgtgattatatgatcaattttatttatgatttctcttgtaaagtctggaggtttattttataaagcataaaaatgttgctcttactgcattcaagcaatggaaagctttagtgaaaaatcagactggcaggaaaatcaagaaatcgagaatagacaatgaattggaattttgcaatagtgagtttaattctttttgtgctgatcatggtattgctagacacaagactattccaggtatgccccgacacaatggtcttgctgaaagaatgaatcgtactattttgtagcgtgtccgttgcatgctttctaatgccggtttatgggataagcatgatacgtgggtggaagctggttctgccgcctgctatttgattaatcgctctcccaattccgctattgattttaaaattccaaaagaggtatggacaggtaaatcagttgattattctaatctcagaatctttggttgccctgcttatgctcatgttaacaatgagaagctagtgcctagagctcaaaaatgcacttttattggctatggttctggtgttaaaggatatcgtttattatgtgttgattctaaaaaggtgattgtcagtcatgatgttacttttgatgaaagtacatttctttctctagaggtgtttctgatagtggtttctca

SEQ ID NO: 29809 - DNA, 2538 bp, Zea Mays
atgaaccaggtaataaatattattattacaataatttaatttgaatacagatgtaataaatgtagctgaaaatttatatattataccaaatccatacacaaactataaacaaatatgtttattatttagaaataaattcttgaattacaatagtatccacatacattgtttgttccgtacaagattgtaagggggggaaatagtatcaaagccatattgaaatctaccacctttccatcctccatctctagtgcaatgaactcttcactaatttgtgttcaaccgttcttagtcaacaaatgaccttgcttcacattactgcttggtgataagaagacaccaacataaaggatgcatccagcttctttctaaaccatggtagtttcaagatgcagagtttctataagattgtctgccttctttatttccttcaattcatccatacattgctagttgtcgtgctacctgagtaattatatgtatccattcacatagaaccaagcttacagtaatagattaatctttcaatagcaaaattacctactgctaagcagaacacacaagccctctacaaaagaagatataataaataccagatgtcatgaactgctgacaactcttttgaacatcatcatggcctgattcttgaatgaaatttgttaagatcgacaaacaacagtattactgtatgagtttgctatcctgcaagtgacctggcccatagatcataggttagttctttattgaaccgcacaatatcctcacttgtaaagaaaagacaaatcctatgagttacttggcactattatatgacattttgatgtgcattaatcagaaatttagattaccactaaaccagtcttcattcaaaaatgggaaattaagaagatagaaaaagaacattgtaggatactattacctttagtaattagtactttgattggcttcttcgaggcacctacaaattctaatacatacataaacatatacatgtaagtctatagtaaatttggatagaagtaatgccattctcagacaaagaatgattttttagaaaaggcattcgaccactgattcgagcattatgttttacccatgcacaggtttgtttagtttggatagtgcttgctacatcttatggagataatcttctatgtaagttatggcctttacagatgtaggtctatgaaatctcctaaatttagaccactaaacaatctaattgttggatttgcatcaaacatttatttatcaagttttactgatctaagcaactgaaatgacaatgtctagagaacattaacatcaatactcagcctggttctagaaaatgaacaacccaatatacagattattaaaaatgtgaaaaagggaaaaatgataatgaagtatactattaattgaaatgcaatgaaaataatttgaagtcatattatgcgatgctgcaggctaggagacaactaataagatccatgtgcatgcattatgtgtactaacacattatgtctgtgtgtatggttatatacatatgcaaatgtttacacaacaacatacatggatacgtacatagtgtttaataaaacatagtgatggattctactttttctctgcccaattaaggggcgctatgggaaaaactattaagttgagtgcattgacaaggactataaaaaagcagggttcattttttgtgggaaatcatacctgatctggtaaaagttgcaacctgtacaaaagagtttgtgattctacggaacaaatcatatttgttgtatctatgtccaggagggattggaataacgagaaagaaaggatgtgtatgtacattaatatgtatgaagggacaatataaataaacagagatctataatggttagtattgctaacctggagaggatattaatacttgttattataatgactatttgctacaaagaaatatgaattctagaaagatgtagccatctgcaatcgacaccaattgccccccatgtatcaatatttcttgtttttcatgtcaaagaatttatatatgcacttatgaacttatagttataccatatgtcaaatatttaagttaaaatatataaccaaatctatcatgataatttataagttatatataatggttattattttaaataattttgttattatcactagtatgttactcgttgaggaaaaaaattcatgaaagttgaaacatgacacatatatttatgtctcatagaggcatatatgtacatgatagcataatatgtatgtttactctaaccagtttttaatatattaacattaataaaaatagataatgggtcctttgggtgaccgaccatcagcttactgaaacagacgtttcttttgagactggagccaaacccagtgtaaactgctgcttcttgtcggagttcatagctgcagtgttgttcccccataggtacctctcgctcttggccttggtcaggtccatctccacctcaatagttttctttccaatcaccctagcaacacggtatttggtgtcagcaaagcagaaat

SEQ ID NO: 29810 - DNA, 1563 bp, Zea Mays
cccacatcctcaccctacccacgccgccgccatccagaggctataatacaatcaatcctagcaccctaccataaacactctactttccccacttagttatcgttcttttagctttcacatttatcgactcttgttgcatagtcataaagaaatcctccatatgtttaagatctgatatggaaaatatagtagacttctaactttgatgtgcctcataccgtcgcgtggtcgccattgccttggccaccgatgtatcccgcgcccaggtcgtctccattcggggagctccacggctgcgaaggtgacggctgcgcttccgaccaggatacctggcctctacaccatgtgctacggagtggagtgcactgccgcctctgttgctcctgtatcctcctctcccaccgctcgttgtactgctgtcgctgcttcctcctcgtcacctcaccatcgtgcaactacgacaatggcgacacgctcatggcccctccagcaccaaccgtcacctgtcaggtttgccacgacgccgtcgcacacctcccatgcctctaccccccacccaccgatggtgtcttcgtctgccctccctgcaccgcggcccagaacggaaggcccttcacctacgcgccgccctgcaggcagccactcgacgagcgcaacgccagggttctcgtcctaggggcgcggatagcgctagcgctgctgcagcgacacgcgacagcagcgcgcgaagccgcggaacggctggccatggaggcgcgggacgctcgggcgagggcgcatgacgctcttatcgtggccttcgacctcgatgcggaggaagatctttcgtgtgtcgtgccacaacccaccgagaatgacctagcagcttctgaagaagaagaagaagaagaagaagaagatagtgaggcagagacggatgagggggaggtgatgctggtgcggcgcaacgtgatgccgccgttagtcacgccaacaatcgacacggggggcagtgttgtgccgttggcttccgccgaggccaagcacatgcctccgctgtcacaaccaaagctgctttttgaccttaatgagaatgcggctgagaatgagatagatgatgcccaggctgagcccatgcgacatcaggcgcttaactccttcaacgtgaaggaggtggcgatggctgctggcgcggaagctaccagggccagcccgtcgacgccacagacgttgcagttgtttccgatcacataccaagatatagtacctcggacgctgcaactcttcaatgatgatgacgaggagatgtaggactgtttatgattgagcttgatgttgtcaaactgatgaaggatgcagttgtgacttgtgaggtgttttttgttccatactttatctgaacttcctaaacttattggtcagtgatttcagtgggggtggagggcatttatgctacttgtgtgccccaaaaatgtattccatacatagctgttgaattgttagtttctgtggcatgtatcatctcttacattacagctcggtttgcactttgtgcatgccaatgcatgataccatttgcagttc

SEQ ID NO: 29811 - DNA, 776 bp, Zea Mays
cctaggacgatggaggcgagcactcacccatgttgattgcattgccgcaagcccctaagtgcagggcggatctcggtggctacgatgatgcttggcagcggaggcgacgatgtggtttggctcgacgggagcagcacacagaggtgtggagggagctacatgtagaggcttggcagaggtggaggtgcccatattccagacgcttcctggcaacatataaggacaactttctagcaacatggaatgactgggagatccgcatgcttgtgctcagcagtcccgccctccaccagctggcctacctgctcgcgtactccatctgcttcgagcgcacccaccgcatccagaccttctgggcaccattcctcctccacctcggcggccaggacaccatcaccgcctgccttctccaccgaagacaacgacgtgctctggaagcgccacctgctcagcctcctcacctagatggcctgatgctccacagcagtatcctggaaacaccctcctatgatgagtggaagaataatttcccagaccaagaaacagaggaagatcaacccatcataggccactctatcatccatggtgtgacagctgaccaacaattcctaacccagcacaaggatatccgtgtatcagcatgccgctatgctcaccaccacacagtgcatcacaacccacctatttagtaactactaatgatgtggactccactagcgtttgggtccagcctctggatgacaaaaaataaaggttagatttttagatatatggga

SEQ ID NO: 29812 - DNA, 3351 bp, Zea Mays
caggcagagagctctgcctccccaggatacttcgcccctcgttccaccgcgagcccttccgcgttccgcctctgttccgccgctcgggacccgggagacgagaagtagtagccccatccccaactggtcctaacccacgggcgttgcttgcctggataaccacggcatcgttctacccgccgggcccgagctaagtcatacgtgcaaacaaagagcagcaaaagaagaacaagtggggcgacagggacagggaggaggggaaggcagaggaaatggaagcctctttcttgaggaaagatggcggtgatcaagccagtgcggcgacaatgtccggcgagcacaggaacaagggccttgactgggatttgaacgactggaggtgggacgccaacctgttcctggccacgccggcggccatcgtgccgtccgagtgcagcagcaggaagctgagtcgagctcagggggagatcgacttcggcgtcgtcgttgacaagaggcggaggctctcgccagaggaggacggcagcgccggttgcagcaattctggggtagcagatggagacaacaatcatgtggtgcctgctcagagagggcggagcagcgaggaggagacacccaggaaaggtgccagttcgagcaccactccgtcctgccaggttgacggctgccatgccgatctcagcggtgccagggactaccataagaggcacaaggtgtgtgaagcacataccaggacgactgtggtctgcatcaagaatgtagagcatcggttctgtcagcagtgtagcaggtttcagcttcttcaagaatttgatgaagggaagaagagctgccgctcgcgtctagcacaacataatggaaggagaaggaaagttcaaccacaaactgttgtgaatgggaattccatgagtgaaaatcaatctctaagtaacacctcaatccttctgttaaaacaactttccaggctagagtctggtagctcctctgagccaatcaatcatcctaattctttggttaaccttttgaagaaccttgctgctattgctagcacacagtcatatcaagatattctaaagaatgcaaattcaaattcaatattgtcaaatgctggtaataatgctgcaaatggatctactgtgcatgagcaaactatacggtcaattccaatcagaggagaatcattagcagaagagcctccagtgaaaaggcgggtacatgattttgatttgaatgatgcttgctttgaagaagttgagagccgaacagataaaattgtgttcaagctgtttggaaaagagccaaaagattttcctgtagatctacgggaacagatccaacactggttatcgcattatccaactgatatggaaagctatattaggcctggttgtgttattctaactatttacctccgcctccctaattggatgtgggatgagcttgatgatgatccagcttcgtggatagaaaagcttattagcatatccaatgatggactttggagaaaaggatggttgtatgctagggtacaggactgcctaacactgagttacaatggtagtcttatgtttgcatctccctggcaactggtaattggcgacaagcatcagagactgtgtgtaactcctattgcagttgcttgttcttcgtctgtaaaattctctgtgaaaggtttcaatatagttcagccaactacaaaattactttgtgtgtttggtgacaaatatttaattcaagaagagacacaaatgctacttgaagattcaactgtgcagcaaggccctcaatgcctgaccttctcatgttccttttcttgtacaagtggaagaggattcatagaggttgaagattatgatcaaagcagcctttgtgttccctttgttgtcgctgacaaagatgtatgttctgaaattcggatgttggagcatggattgaatttaatttcatttgatgaaacctcggaaagaatagatgatctgatggcttatcgcaatcggtcgttacattttttgcatgaaatcggatggctccttcaaaggagccatgtgcgagctacatctgagcagccacagtattgtccagaccgtttccctgttgaaagatttagatggctgctatcctttgcagttgatcaggaatggtgtgctgttttaaggaagcttctgaacaccatgttccagggtgatattgacctagatgttccgtcaccaattgaattcgccttaggagaaaatgtgttgcttactgctgttaaaaaacgctcaaagcctttagttgagtttctattaagatacacagcaacagattacgccccagtgggcagtggagccggcgctccagttcagttcttgttcactcctgcgatgactggactgtcaaatattacacctctccatattgcagcaacaatcagtgatgctactggtgttttggatgctttaactgatgatcctcggcagttgggaatcaaagcgtggaagaacgctcgtgacgccactggcttcactcctgaggaatatgctcgaaagagaggccacatatcctatatccaattggtacaggacaaaattgacagaagggtgagcagagctcatgtctcggttaccatccccagcacaattgatactgccggaaagcatgctagccgattgaagcctgccgaccaaatcacatttggtgtggagaaaaaacagcgagggatgaaccaaacattgagctgcagacaatgtgtccagcaggtccagcagcttgcattccactcccggacaaataggttcttgtctaataggccggcgatgctttccttggtcgccattgctgccgtttgtgtctgcgtaggattgatcatgaagagcctgccacaagttggtggtatgaggcctttcctctgggacaagatacgttggggccccaattgatagactgcacaagacccaacccaattgtatcagtgtatgatgaagatgtttgcgccgagcgaagctagattcttgtaatgtacatgtttcttagactaaatgcctaaattgaaatttctgttccatagtaaaacctgtgaaatgctctaatttgcctagcttgtagctccattgcatttgcatcctgactgaggtaaagcttttacttgtttttattgagaggaaaaaaaactcagtcttagcttgaaaaaatactcgaagtctcaccctttatcactggcgggccgttactatctactctgcaacgatcacaaggtatagtgagaagatttttttaatcagaaatttgtcctcgaggaatcgaacccgagacctagagaaagaaacccttttacttctgcattttgtttattgttattgcttttttttggtc

SEQ ID NO: 29813 - DNA, 3475 bp, Zea Mays
cagagagctctgcctccccaggatacttcgcccctcgttccaccgcgagcccttccgcgttccgcctctgttccgccgctcgggacccgggagacgagaagtagtagccccatccccaactggtcctaacccacggtacccaatccttgactcggttctctccatgagcttactgccccatctccatttcttcaatcattactcgcctttccgttcaagggcgttgcttgcctggataaccacggcatcgttctacccgccgggcccgagctaagtcatacgtgcaaacaaagagcagcaaaagaagaacaagtggggcgacagggacagggaggaggggaaggcagaggaaatggaagcctctttcttgaggaaagatggcggtgatcaagccagtgcggcgacaatgtccggcgagcacaggaacaagggccttgactgggatttgaacgactggaggtgggacgccaacctgttcctggccacgccggcggccatcgtgccgtccgagtgcagcagcaggaagctgagtcgagctcagggggagatcgacttcggcgtcgtcgttgacaagaggcggaggctctcgccagaggaggacggcagcgccggttgcagcaattctggggtagcagatggagacaacaatcatgtggtgcctgctcagagagggcggagcagcgaggaggagacacccaggaaaggtgccagttcgagcaccactccgtcctgccaggttgacggctgccatgccgatctcagcggtgccagggactaccataagaggcacaaggtgtgtgaagcacataccaggacgactgtggtctgcatcaagaatgtagagcatcggttctgtcagcagtgtagcaggtttcagcttcttcaagaatttgatgaagggaagaagagctgccgctcgcgtctagcacaacataatggaaggagaaggaaagttcaaccacaaactgttgtgaatgggaattccatgagtgaaaatcaatctctaagtaacacctcaatccttctgttaaaacaactttccaggctagagtgtacagacatagtcattctaaatgtgtgcttgtatgggtggcagctggtagctcctctgagccaatcaatcatcctaattctttggttaaccttttgaagaaccttgctgctattgctagcacacagtcatatcaagatattctaaagaatgcaaattcaaattcaatattgtcaaatgctggtaataatgctgcaaatggatctactgtgcatgagcaaactatacggtcaattccaatcagaggagaatcattagcagaagagcctccagtgaaaaggcgggtacatgattttgatttgaatgatgcttgctttgaagaagttgagagccgaacagataaaattgtgttcaagctgtttggaaaagagccaaaagattttcctgtagatctacgggaacagatccaacactggttatcgcattatccaactgatatggaaagctatattaggcctggttgtgttattctaactatttacctccgcctccctaattggatgtgggatgagcttgatgatgatccagcttcgtggatagaaaagcttattagcatatccaatgatggactttggagaaaaggatggttgtatgctagggtacaggactgcctaacactgagttacaatggtagtcttatgtttgcatctccctggcaactggtaattggcgacaagcatcagagactgtgtgtaactcctattgcagttgcttgttcttcgtctgtaaaattctctgtgaaaggtttcaatatagttcagccaactacaaaattactttgtgtgtttggtgacaaatatttaattcaagaagagacacaaatgctacttgaagattcaactgtgcagcaaggccctcaatgcctgaccttctcatgttccttttcttgtacaagtggaagaggattcatagaggttgaagattatgatcaaagcagcctttgtgttccctttgttgtcgctgacaaagatgtatgttctgaaattcggatgttggagcatggattgaatttaatttcatttgatgaaacctcggaaagaatagatgatctgatggcttatcgcaatcggtcgttacattttttgcatgaaatcggatggctccttcaaaggagccatgtgcgagctacatctgagcagccacagtattgtccagaccgtttccctgttgaaagatttagatggctgctatcctttgcagttgatcaggaatggtgtgctgttttaaggaagcttctgaacaccatgttccagggtgatattgacctagatgttccgtcaccaattgaattcgccttaggagaaaatgtgttgcttactgctgttaaaaaacgctcaaagcctttagttgagtttctattaagatacacagcaacagattacgccccagtgggcagtggagccggcgctccagttcagttcttgttcactcctgcgatgactggactgtcaaatattacacctctccatattgcagcaacaatcagtgatgctactggtgttttggatgctttaactgatgatcctcggcagttgggaatcaaagcgtggaagaacgctcgtgacgccactggcttcactcctgaggaatatgctcgaaagagaggccacatatcctatatccaattggtacaggacaaaattgacagaagggtgagcagagctcatgtctcggttaccatccccagcacaattgatactgccggaaagcatgctagccgattgaagcctgccgaccaaatcacatttggtgtggagaaaaaacagcgagggatgaaccaaacattgagctgcagacaatgtgtccagcaggtccagcagcttgcattccactcccggacaaataggttcttgtctaataggccggcgatgctttccttggtcgccattgctgccgtttgtgtctgcgtaggattgatcatgaagagcctgccacaagttggtggtatgaggcctttcctctgggacaagatacgttggggccccaattgatagactgcacaagacccaacccaattgtatcagtgtatgatgaagatgtttgcgccgagcgaagctagattcttgtaatgtacatgtttcttagactaaatgcctaaattgaaatttctgttccatagtaaaacctgtgaaatgctctaatttgcctagcttgtagctccattgcatttgcatcctgactgaggtaaagcttttacttgtttttattgagaggaaaaaaaactcagtcttagcttgaaaaaatactcgaagtctcaccctttatcactggcgggccgttactatctactctgcaacgatcacaaggtatagtgagaagatttttttaatcagaaatttgtcctcgaggaatcgaacccgagacctagagaaagaaacccttttacttctgcattttgtttattgttattgcttttttttggtc

SEQ ID NO: 29814 - DNA, 3312 bp, Zea Mays
cagagagctctgcctccccaggatacttcgcccctcgttccaccgcgagcccttccgcgttccgcctctgttccgccgctcgggacccgggagacgagaagtagtagccccatccccaactggtcctaacccacgggcgttgcttgcctggataaccacggcatcgttctacccgccgggcccgagctaagtcatacgtgcaaacaaagagcagcaaaagaagaacaagtggggcgacagggacagggaggaggggaaggcagaggaaatggaagcctctttcttgaggaaagatggcggtgatcaagccagtgcggcgacaatgtccggcgagcacaggaacaagggccttgactgggatttgaacgactggaggtgggacgccaacctgttcctggccacgccggcggccatcgtgccgtccgagtgcagcagcaggaagctgagtcgagctcagggggagatcgacttcggcgtcgtcgttgacaagaggcggaggctctcgccagaggaggacggcagcgccggttgcagcaattctggggtagcagatggagacaacaatcatgtggtgcctgctcagagagggcggagcagcgaggaggagacacccaggaaaggtgccagttcgagcaccactccgtcctgccaggttgacggctgccatgccgatctcagcggtgccagggactaccataagaggcacaaggtgtgtgaagcacataccaggacgactgtggtctgcatcaagaatgtagagcatcggttctgtcagcagtgtagcaggtttcagcttcttcaagaatttgatgaagggaagaagagctgccgctcgcgtctagcacaacataatggaaggagaaggaaagttcaaccacaaactgttgtgaatgggaattccatgagtgaaaatcaatctctaagtaacacctcaatccttctgttaaaacaactttccaggctagagtctggtagctcctctgagccaatcaatcatcctaattctttggttaaccttttgaagaaccttgctgctattgctagcacacagtcatatcaagatattctaaagaatgcaaattcaaattcaatattgtcaaatgctggtaataatgctgcaaatggatctactgtgcatgagcaaactatacggtcaattccaatcagaggagaatcattagcagaagagcctccagtgaaaaggcgggtacatgattttgatttgaatgatgcttgctttgaagaagttgagagccgaacagataaaattgtgttcaagctgtttggaaaagagccaaaagattttcctgtagatctacgggaacagatccaacactggttatcgcattatccaactgatatggaaagctatattaggcctggttgtgttattctaactatttacctccgcctccctaattggatgtgggatgagcttgatgatgatccagcttcgtggatagaaaagcttattagcatatccaatgatggactttggagaaaaggatggttgtatgctaggtcttatgtttgcatctccctggcaactggtaattggcgacaagcatcagagactgtgtgtaactcctattgcagttgcttgttcttcgtctgtaaaattctctgtgaaaggtttcaatatagttcagccaactacaaaattactttgtgtgtttggtgacaaatatttaattcaagaagagacacaaatgctacttgaagattcaactgtgcagcaaggccctcaatgcctgaccttctcatgttccttttcttgtacaagtggaagaggattcatagaggttgaagattatgatcaaagcagcctttgtgttccctttgttgtcgctgacaaagatgtatgttctgaaattcggatgttggagcatggattgaatttaatttcatttgatgaaacctcggaaagaatagatgatctgatggcttatcgcaatcggtcgttacattttttgcatgaaatcggatggctccttcaaaggagccatgtgcgagctacatctgagcagccacagtattgtccagaccgtttccctgttgaaagatttagatggctgctatcctttgcagttgatcaggaatggtgtgctgttttaaggaagcttctgaacaccatgttccagggtgatattgacctagatgttccgtcaccaattgaattcgccttaggagaaaatgtgttgcttactgctgttaaaaaacgctcaaagcctttagttgagtttctattaagatacacagcaacagattacgccccagtgggcagtggagccggcgctccagttcagttcttgttcactcctgcgatgactggactgtcaaatattacacctctccatattgcagcaacaatcagtgatgctactggtgttttggatgctttaactgatgatcctcggcagttgggaatcaaagcgtggaagaacgctcgtgacgccactggcttcactcctgaggaatatgctcgaaagagaggccacatatcctatatccaattggtacaggacaaaattgacagaagggtgagcagagctcatgtctcggttaccatccccagcacaattgatactgccggaaagcatgctagccgattgaagcctgccgaccaaatcacatttggtgtggagaaaaaacagcgagggatgaaccaaacattgagctgcagacaatgtgtccagcaggtccagcagcttgcattccactcccggacaaataggttcttgtctaataggccggcgatgctttccttggtcgccattgctgccgtttgtgtctgcgtaggattgatcatgaagagcctgccacaagttggtggtatgaggcctttcctctgggacaagatacgttggggccccaattgatagactgcacaagacccaacccaattgtatcagtgtatgatgaagatgtttgcgccgagcgaagctagattcttgtaatgtacatgtttcttagactaaatgcctaaattgaaatttctgttccatagtaaaacctgtgaaatgctctaatttgcctagcttgtagctccattgcatttgcatcctgactgaggtaaagcttttacttgtttttattgagaggaaaaaaaactcagtcttagcttgaaaaaatactcgaagtctcaccctttatcactggcgggccgttactatctactctgcaacgatcacaaggtatagtgagaagatttttttaatcagaaatttgtcctcgaggaatcgaacccgagacctagagaaagaaacccttttacttctgcattttgtttattgttattgcttttttttggtc

SEQ ID NO: 29815 - DNA, 3247 bp, Zea Mays
cagagagctctgcctccccaggatacttcgcccctcgttccaccgcgagcccttccgcgttccgcctctgttccgccgctcgggacccgggagacgagaagtagtagccccatccccaactggtcctaacccacgggcgttgcttgcctggataaccacggcatcgttctacccgccgggcccgagctaagtcatacgtgcaaacaaagagcagcaaaagaagaacaagtggggcgacagggacagggaggaggggaaggcagaggaaatggaagcctctttcttgaggaaagatggcggtgatcaagccagtgcggcgacaatgtccggcgagcacaggaacaagggccttgactgggatttgaacgactggaggtgggacgccaacctgttcctggccacgccggcggccatcgtgccgtccgagtgcagcagcaggaagctgagtcgagctcagggggagatcgacttcggcgtcgtcgttgacaagaggcggaggctctcgccagaggaggacggcagcgccggttgcagcaattctggggtagcagatggagacaacaatcatgtggtgcctgctcagagagggcggagcagcgaggaggagacacccaggaaaggtgccagttcgagcaccactccgtcctgccaggttgacggctgccatgccgatctcagcggtgccagggactaccataagaggcacaaggtgtgtgaagcacataccaggacgactgtggtctgcatcaagaatgtagagcatcggttctgtcagcagtgtagcaggtttcagcttcttcaagaatttgatgaagggaagaagagctgccgctcgcgtctagcacaacataatggaaggagaaggaaagttcaaccacaaactgttgtgaatgggaattccatgagtgaaaatcaatctctaagtaacacctcaatccttctgttaaaacaactttccaggctagagtgtacagacatagtcattctaaatgtgtgcttgtatgggtggcagctggtagctcctctgagccaatcaatcatcctaattctttggttaaccttttgaagaaccttgctgctattgctagcacacagtcatatcaagatattctaaagaatgcaaattcaaattcaatattgtcaaatgctggtaataatgctgcaaatggatctactgtgcatgagcaaactatacggtcaattccaatcagaggagaatcattagcagaagagcctccagtgaaaaggcgggtacatgattttgatttgaatgatgcttgctttgaagaagttgagagccgaacagataaaattgtgttcaagctgtttggaaaagagccaaaagattttcctgtagatctacgggaacagatccaacactggttatcgcattatccaactgatatggaaagctatattaggcctggttgtgttattctaactatttacctccgcctccctaattggatgtgggatgagcttgatgatgatccagcttcgtggatagaaaagcttattagcatatccaatgatggactttggagaaaaggatggttgtatgctagggtacaggactgcctaacactgagttacaatgtcttatgtttgcatctccctggcaactggtaattggcgacaagcatcagagactgtgtgtaactcctattgcagttgcttgttcttcgtctgtaaaattctctgtgaaaggtttcaatatagttcagccaactacaaaattactttgtgtgtttggtgacaaatatttaattcaagaagagacacaaatgctacttgaagattcaactgtgcagcaaggccctcaatgcctgaccttctcatgttccttttcttgtacaagtggaagaggattcatagaggttgaagattatgatcaaagcagcctttgtgttccctttgttgtcgctgacaaagatgagccatgtgcgagctacatctgagcagccacagtattgtccagaccgtttccctgttgaaagatttagatggctgctatcctttgcagttgatcaggaatggtgtgctgttttaaggaagcttctgaacaccatgttccagggtgatattgacctagatgttccgtcaccaattgaattcgccttaggagaaaatgtgttgcttactgctgttaaaaaacgctcaaagcctttagttgagtttctattaagatacacagcaacagattacgccccagtgggcagtggagccggcgctccagttcagttcttgttcactcctgcgatgactggactgtcaaatattacacctctccatattgcagcaacaatcagtgatgctactggtgttttggatgctttaactgatgatcctcggcagttgggaatcaaagcgtggaagaacgctcgtgacgccactggcttcactcctgaggaatatgctcgaaagagaggccacatatcctatatccaattggtacaggacaaaattgacagaagggtgagcagagctcatgtctcggttaccatccccagcacaattgatactgccggaaagcatgctagccgattgaagcctgccgaccaaatcacatttggtgtggagaaaaaacagcgagggatgaaccaaacattgagctgcagacaatgtgtccagcaggtccagcagcttgcattccactcccggacaaataggttcttgtctaataggccggcgatgctttccttggtcgccattgctgccgtttgtgtctgcgtaggattgatcatgaagagcctgccacaagttggtggtatgaggcctttcctctgggacaagatacgttggggccccaattgatagactgcacaagacccaacccaattgtatcagtgtatgatgaagatgtttgcgccgagcgaagctagattcttgtaatgtacatgtttcttagactaaatgcctaaattgaaatttctgttccatagtaaaacctgtgaaatgctctaatttgcctagcttgtagctccattgcatttgcatcctgactgaggtaaagcttttacttgtttttattgagaggaaaaaaaactcagtcttagcttgaaaaaatactcgaagtctcaccctttatcactggcgggccgttactatctactctgcaacgatcacaaggtatagtgagaagatttttttaatcagaaatttgtcctcgaggaatcgaacccgagacctagagaaagaaacccttttacttctgcattttgtttattgttattgcttttttttggtc

SEQ ID NO: 29816 - DNA, 3342 bp, Zea Mays
agagagctctgcctccccaggatacttcgcccctcgttccaccgcgagcccttccgcgttccgcctctgttccgccgctcgggacccgggagacgagaagtagtagccccatccccaactggtcctaacccacgggcgttgcttgcctggataaccacggcatcgttctacccgccgggcccgagctaagtcatacgtgcaaacaaagagcagcaaaagaagaacaagtggggcgacagggacagggaggaggggaaggcagaggaaatggaagcctctttcttgaggaaagatggcggtgatcaagccagtgcggcgacaatgtccggcgagcacaggaacaagggccttgactgggatttgaacgactggaggtgggacgccaacctgttcctggccacgccggcggccatcgtgccgtccgagtgcagcagcaggaagctgagtcgagctcagggggagatcgacttcggcgtcgtcgttgacaagaggcggaggctctcgccagaggaggacggcagcgccggttgcagcaattctggggtagcagatggagacaacaatcatgtggtgcctgctcagagagggcggagcagcgaggaggagacacccaggaaaggtgccagttcgagcaccactccgtcctgccaggttgacggctgccatgccgatctcagcggtgccagggactaccataagaggcacaaggtgtgtgaagcacataccaggacgactgtggtctgcatcaagaatgtagagcatcggttctgtcagcagtgtagcaggtttcagcttcttcaagaatttgatgaagggaagaagagctgccgctcgcgtctagcacaacataatggaaggagaaggaaagttcaaccacaaactgttgtgaatgggaattccatgagtgaaaatcaatctctaagtaacacctcaatccttctgttaaaacaactttccaggctagagtctggtagctcctctgagccaatcaatcatcctaattctttggttaaccttttgaagaaccttgctgctattgctagcacacagtcatatcaagatattctaaagaatgcaaattcaaattcaatattgtcaaatgctggtaataatgctgcaaatggatctactgtgcatgagcaaactatacggtcaattccaatcagaggagaatcattagcagaagagcctccagtgaaaaggcgggtacatgattttgatttgaatgatgcttgctttgaagaagttgagagccgaacagataaaattgtgttcaagctgtttggaaaagagccaaaagattttcctgtagatctacgggaacagatccaacactggttatcgcattatccaactgatatggaaagctatattaggcctggttgtgttattctaactatttacctccgcctccctaattggatgtgggatgagcttgatgatgatccagcttcgtggatagaaaagcttattagcatatccaatgatggactttggagaaaaggatggttgtatgctagggtacaggactgcctaacactgagttacaatgtcttatgtttgcatctccctggcaactggtaattggcgacaagcatcagagactgtgtgtaactcctattgcagttgcttgttcttcgtctgtaaaattctctgtgaaaggtttcaatatagttcagccaactacaaaattactttgtgtgtttggtgacaaatatttaattcaagaagagacacaaatgctacttgaagattcaactgtgcagcaaggccctcaatgcctgaccttctcatgttccttttcttgtacaagtggaagaggattcatagaggttgaagattatgatcaaagcagcctttgtgttccctttgttgtcgctgacaaagatgtatgttctgaaattcggatgttggagcatggattgaatttaatttcatttgatgaaacctcggaaagaatagatgatctgatggcttatcgcaatcggtcgttacattttttgcatgaaatcggatggctccttcaaaggagccatgtgcgagctacatctgagcagccacagtattgtccagaccgtttccctgttgaaagatttagatggctgctatcctttgcagttgatcaggaatggtgtgctgttttaaggaagcttctgaacaccatgttccagggtgatattgacctagatgttccgtcaccaattgaattcgccttaggagaaaatgtgttgcttactgctgttaaaaaacgctcaaagcctttagttgagtttctattaagatacacagcaacagattacgccccagtgggcagtggagccggcgctccagttcagttcttgttcactcctgcgatgactggactgtcaaatattacacctctccatattgcagcaacaatcagtgatgctactggtgttttggatgctttaactgatgatcctcggcagttgggaatcaaagcgtggaagaacgctcgtgacgccactggcttcactcctgaggaatatgctcgaaagagaggccacatatcctatatccaattggtacaggacaaaattgacagaagggtgagcagagctcatgtctcggttaccatccccagcacaattgatactgccggaaagcatgctagccgattgaagcctgccgaccaaatcacatttggtgtggagaaaaaacagcgagggatgaaccaaacattgagctgcagacaatgtgtccagcaggtccagcagcttgcattccactcccggacaaataggttcttgtctaataggccggcgatgctttccttggtcgccattgctgccgtttgtgtctgcgtaggattgatcatgaagagcctgccacaagttggtggtatgaggcctttcctctgggacaagatacgttggggccccaattgatagactgcacaagacccaacccaattgtatcagtgtatgatgaagatgtttgcgccgagcgaagctagattcttgtaatgtacatgtttcttagactaaatgcctaaattgaaatttctgttccatagtaaaacctgtgaaatgctctaatttgcctagcttgtagctccattgcatttgcatcctgactgaggtaaagcttttacttgtttttattgagaggaaaaaaaactcagtcttagcttgaaaaaatactcgaagtctcaccctttatcactggcgggccgttactatctactctgcaacgatcacaaggtatagtgagaagatttttttaatcagaaatttgtcctcgaggaatcgaacccgagacctagagaaagaaacccttttacttctgcattttgtttattgttattgcttttttttggtc

SEQ ID NO: 29817 - DNA, 3375 bp, Zea Mays
cttcgcccctcgttccaccgcgagcccttccgcgttccgcctctgttccgccgctcgggacccgggagacgagaagtagtagccccatccccaactggtcctaacccacggtacccaatccttgactcggttctctccatgagcttactgccccatctccatttcttcaatcattactcgcctttccgttcaagggcgttgcttgcctggataaccacggcatcgttctacccgccgggcccgagctaagtcatacgtgcaaacaaagagcagcaaaagaagaacaagtggggcgacagggacagggaggaggggaaggcagaggaaatggaagcctctttcttgaggaaagatggcggtgatcaagccagtgcggcgacaatgtccggcgagcacaggaacaagggccttgactgggatttgaacgactggaggtgggacgccaacctgttcctggccacgccggcggccatcgtgccgtccgagtgcagcagcaggaagctgagtcgagctcagggggagatcgacttcggcgtcgtcgttgacaagaggcggaggctctcgccagaggaggacggcagcgccggttgcagcaattctggggtagcagatggagacaacaatcatgtggtgcctgctcagagagggcggagcagcgaggaggagacacccaggaaaggtgccagttcgagcaccactccgtcctgccaggttgacggctgccatgccgatctcagcggtgccagggactaccataagaggcacaaggtgtgtgaagcacataccaggacgactgtggtctgcatcaagaatgtagagcatcggttctgtcagcagtgtagcaggtttcagcttcttcaagaatttgatgaagggaagaagagctgccgctcgcgtctagcacaacataatggaaggagaaggaaagttcaaccacaaactgttgtgaatgggaattccatgagtgaaaatcaatctctaagtaacacctcaatccttctgttaaaacaactttccaggctagagtctggtagctcctctgagccaatcaatcatcctaattctttggttaaccttttgaagaaccttgctgctattgctagcacacagtcatatcaagatattctaaagaatgcaaattcaaattcaatattgtcaaatgctggtaataatgctgcaaatggatctactgtgcatgagcaaactatacggtcaattccaatcagaggagaatcattagcagaagagcctccagtgaaaaggcgggtacatgattttgatttgaatgatgcttgctttgaagaagttgagagccgaacagataaaattgtgttcaagctgtttggaaaagagccaaaagattttcctgtagatctacgggaacagatccaacactggttatcgcattatccaactgatatggaaagctatattaggcctggttgtgttattctaactatttacctccgcctccctaattggatgtgggatgagcttgatgatgatccagcttcgtggatagaaaagcttattagcatatccaatgatggactttggagaaaaggatggttgtatgctagggtagtcttatgtttgcatctccctggcaactggtaattggcgacaagcatcagagactgtgtgtaactcctattgcagttgcttgttcttcgtctgtaaaattctctgtgaaaggtttcaatatagttcagccaactacaaaattactttgtgtgtttggtgacaaatatttaattcaagaagagacacaaatgctacttgaagattcaactgtgcagcaaggccctcaatgcctgaccttctcatgttccttttcttgtacaagtggaagaggattcatagaggttgaagattatgatcaaagcagcctttgtgttccctttgttgtcgctgacaaagatgtatgttctgaaattcggatgttggagcatggattgaatttaatttcatttgatgaaacctcggaaagaatagatgatctgatggcttatcgcaatcggtcgttacattttttgcatgaaatcggatggctccttcaaaggagccatgtgcgagctacatctgagcagccacagtattgtccagaccgtttccctgttgaaagatttagatggctgctatcctttgcagttgatcaggaatggtgtgctgttttaaggaagcttctgaacaccatgttccagggtgatattgacctagatgttccgtcaccaattgaattcgccttaggagaaaatgtgttgcttactgctgttaaaaaacgctcaaagcctttagttgagtttctattaagatacacagcaacagattacgccccagtgggcagtggagccggcgctccagttcagttcttgttcactcctgcgatgactggactgtcaaatattacacctctccatattgcagcaacaatcagtgatgctactggtgttttggatgctttaactgatgatcctcggcagttgggaatcaaagcgtggaagaacgctcgtgacgccactggcttcactcctgaggaatatgctcgaaagagaggccacatatcctatatccaattggtacaggacaaaattgacagaagggtgagcagagctcatgtctcggttaccatccccagcacaattgatactgccggaaagcatgctagccgattgaagcctgccgaccaaatcacatttggtgtggagaaaaaacagcgagggatgaaccaaacattgagctgcagacaatgtgtccagcaggtccagcagcttgcattccactcccggacaaataggttcttgtctaataggccggcgatgctttccttggtcgccattgctgccgtttgtgtctgcgtaggattgatcatgaagagcctgccacaagttggtggtatgaggcctttcctctgggacaagatacgttggggccccaattgatagactgcacaagacccaacccaattgtatcagtgtatgatgaagatgtttgcgccgagcgaagctagattcttgtaatgtacatgtttcttagactaaatgcctaaattgaaatttctgttccatagtaaaacctgtgaaatgctctaatttgcctagcttgtagctccattgcatttgcatcctgactgaggtaaagcttttacttgtttttattgagaggaaaaaaaactcagtcttagcttgaaaaaatactcgaagtctcaccctttatcactggcgggccgttactatctactctgcaacgatcacaaggtatagtgagaagatttttttaatcagaaatttgtcctcgaggaatcgaacccgagacctagagaaagaaacccttttacttctgcattttgtttattgttattgcttttttttggtc

SEQ ID NO: 29818 - DNA, 3392 bp, Zea Mays
cctcgttccaccgcgagcccttccgcgttccgcctctgttccgccgctcgggacccgggagacgagaagtagtagccccatccccaactggtcctaacccacggtacccaatccttgactcggttctctccatgagcttactgccccatctccatttcttcaatcattactcgcctttccgttcaagggcgttgcttgcctggataaccacggcatcgttctacccgccgggcccgagctaagtcatacgtgcaaacaaagagcagcaaaagaagaacaagtggggcgacagggacagggaggaggggaaggcagaggaaatggaagcctctttcttgaggaaagatggcggtgatcaagccagtgcggcgacaatgtccggcgagcacaggaacaagggccttgactgggatttgaacgactggaggtgggacgccaacctgttcctggccacgccggcggccatcgtgccgtccgagtgcagcagcaggaagctgagtcgagctcagggggagatcgacttcggcgtcgtcgttgacaagaggcggaggctctcgccagaggaggacggcagcgccggttgcagcaattctggggtagcagatggagacaacaatcatgtggtgcctgctcagagagggcggagcagcgaggaggagacacccaggaaaggtgccagttcgagcaccactccgtcctgccaggttgacggctgccatgccgatctcagcggtgccagggactaccataagaggcacaaggtgtgtgaagcacataccaggacgactgtggtctgcatcaagaatgtagagcatcggttctgtcagcagtgtagcagcttcttcaagaatttgatgaagggaagaagagctgccgctcgcgtctagcacaacataatggaaggagaaggaaagttcaaccacaaactgttgtgaatgggaattccatgagtgaaaatcaatctctaagtaacacctcaatccttctgttaaaacaactttccaggctagagtctggtagctcctctgagccaatcaatcatcctaattctttggttaaccttttgaagaaccttgctgctattgctagcacacagtcatatcaagatattctaaagaatgcaaattcaaattcaatattgtcaaatgctggtaataatgctgcaaatggatctactgtgcatgagcaaactatacggtcaattccaatcagaggagaatcattagcagaagagcctccagtgaaaaggcgggtacatgattttgatttgaatgatgcttgctttgaagaagttgagagccgaacagataaaattgtgttcaagctgtttggaaaagagccaaaagattttcctgtagatctacgggaacagatccaacactggttatcgcattatccaactgatatggaaagctatattaggcctggttgtgttattctaactatttacctccgcctccctaattggatgtgggatgagcttgatgatgatccagcttcgtggatagaaaagcttattagcatatccaatgatggactttggagaaaaggatggttgtatgctagggtacaggactgcctaacactgagttacaatggtagtcttatgtttgcatctccctggcaactggtaattggcgacaagcatcagagactgtgtgtaactcctattgcagttgcttgttcttcgtctgtaaaattctctgtgaaaggtttcaatatagttcagccaactacaaaattactttgtgtgtttggtgacaaatatttaattcaagaagagacacaaatgctacttgaagattcaactgtgcagcaaggccctcaatgcctgaccttctcatgttccttttcttgtacaagtggaagaggattcatagaggttgaagattatgatcaaagcagcctttgtgttccctttgttgtcgctgacaaagatgtatgttctgaaattcggatgttggagcatggattgaatttaatttcatttgatgaaacctcggaaagaatagatgatctgatggcttatcgcaatcggtcgttacattttttgcatgaaatcggatggctccttcaaaggagccatgtgcgagctacatctgagcagccacagtattgtccagaccgtttccctgttgaaagatttagatggctgctatcctttgcagttgatcaggaatggtgtgctgttttaaggaagcttctgaacaccatgttccagggtgatattgacctagatgttccgtcaccaattgaattcgccttaggagaaaatgtgttgcttactgctgttaaaaaacgctcaaagcctttagttgagtttctattaagatacacagcaacagattacgccccagtgggcagtggagccggcgctccagttcagttcttgttcactcctgcgatgactggactgtcaaatattacacctctccatattgcagcaacaatcagtgatgctactggtgttttggatgctttaactgatgatcctcggcagttgggaatcaaagcgtggaagaacgctcgtgacgccactggcttcactcctgaggaatatgctcgaaagagaggccacatatcctatatccaattggtacaggacaaaattgacagaagggtgagcagagctcatgtctcggttaccatccccagcacaattgatactgccggaaagcatgctagccgattgaagcctgccgaccaaatcacatttggtgtggagaaaaaacagcgagggatgaaccaaacattgagctgcagacaatgtgtccagcaggtccagcagcttgcattccactcccggacaaataggttcttgtctaataggccggcgatgctttccttggtcgccattgctgccgtttgtgtctgcgtaggattgatcatgaagagcctgccacaagttggtggtatgaggcctttcctctgggacaagatacgttggggccccaattgatagactgcacaagacccaacccaattgtatcagtgtatgatgaagatgtttgcgccgagcgaagctagattcttgtaatgtacatgtttcttagactaaatgcctaaattgaaatttctgttccatagtaaaacctgtgaaatgctctaatttgcctagcttgtagctccattgcatttgcatcctgactgaggtaaagcttttacttgtttttattgagaggaaaaaaaactcagtcttagcttgaaaaaatactcgaagtctcaccctttatcactggcgggccgttactatctactctgcaacgatcacaaggtatagtgagaagatttttttaatcagaaatttgtcctcgaggaatcgaacccgagacctagagaaagaaacccttttacttctgcattttgtttattgttattgcttttttttggtc

SEQ ID NO: 29819 - DNA, 3374 bp, Zea Mays
cgggagacgagaagtagtagccccatccccaactggtcctaacccacggtacccaatccttgactcggttctctccatgagcttactgccccatctccatttcttcaatcattactcgcctttccgttcaagggcgttgcttgcctggataaccacggcatcgttctacccgccgggcccgagctaagtcatacgtgcaaacaaagagcagcaaaagaagaacaagtggggcgacagggacagggaggaggggaaggcagaggaaatggaagcctctttcttgaggaaagatggcggtgatcaagccagtgcggcgacaatgtccggcgagcacaggaacaagggccttgactgggatttgaacgactggaggtgggacgccaacctgttcctggccacgccggcggccatcgtgccgtccgagtgcagcagcaggaagctgagtcgagctcagggggagatcgacttcggcgtcgtcgttgacaagaggcggaggctctcgccagaggaggacggcagcgccggttgcagcaattctggggtagcagatggagacaacaatcatgtggtgcctgctcagagagggcggagcagcgaggaggagacacccaggaaaggtgccagttcgagcaccactccgtcctgccaggttgacggctgccatgccgatctcagcggtgccagggactaccataagaggcacaaggtgtgtgaagcacataccaggacgactgtggtctgcatcaagaatgtagagcatcggttctgtcagcagtgtagcaggtttcagcttcttcaagaatttgatgaagggaagaagagctgccgctcgcgtctagcacaacataatggaaggagaaggaaagttcaaccacaaactgttgtgaatgggaattccatgagtgaaaatcaatctctaagtaacacctcaatccttctgttaaaacaactttccaggctagagtctggtagctcctctgagccaatcaatcatcctaattctttggttaaccttttgaagaaccttgctgctattgctagcacacagtcatatcaagatattctaaagaatgcaaattcaaattcaatattgtcaaatgctggtaataatgctgcaaatggatctactgtgcatgagcaaactatacggtcaattccaatcagaggagaatcattagcagaagagcctccagtgaaaaggcgggtacatgattttgatttgaatgatgcttgctttgaagaagttgagagccgaacagataaaattgtgttcaagctgtttggaaaagagccaaaagattttcctgtagatctacgggaacagatccaacactggttatcgcattatccaactgatatggaaagctatattaggcctggttgtgttattctaactatttacctccgcctccctaattggatgtgggatgagcttgatgatgatccagcttcgtggatagaaaagcttattagcatatccaatgatggactttggagaaaaggatggttgtatgctagggtacaggactgcctaacactgagttacaatggtagtcttatgtttgcatctccctggcaactggtaattggcgacaagcatcagagactgtgtgtaactcctattgcagttgcttgttcttcgtctgtaaaattctctgtgaaaggtttcaatatagttcagccaactacaaaagacacaaatgctacttgaagattcaactgtgcagcaaggccctcaatgcctgaccttctcatgttccttttcttgtacaagtggaagaggattcatagaggtgcatggttcgtgtgttttttttaatgtcctcattttttgttcatattacagacttgactcccttttcaggttgaagattatgatcaaagcagcctttgtgttccctttgttgtcgctgacaaagatgtatgttctgaaattcggatgttggagcatggattgaatttaatttcatttgatgaaacctcggaaagaatagatgatctgatggcttatcgcaatcggtcgttacattttttgcatgaaatcggatggctccttcaaaggagccatgtgcgagctacatctgagcagccacagtattgtccagaccgtttccctgttgaaagatttagatggctgctatcctttgcagttgatcaggaatggtgtgctgttttaaggaagcttctgaacaccatgttccagggtgatattgacctagatgttccgtcaccaattgaattcgccttaggagaaaatgtgttgcttactgctgttaaaaaacgctcaaagcctttagttgagtttctattaagatacacagcaacagattacgccccagtgggcagtggagccggcgctccagttcagttcttgttcactcctgcgatgactggactgtcaaatattacacctctccatattgcagcaacaatcagtgatgctactggtgttttggatgctttaactgatgatcctcggcagttgggaatcaaagcgtggaagaacgctcgtgacgccactggcttcactcctgaggaatatgctcgaaagagaggccacatatcctatatccaattggtacaggacaaaattgacagaagggtgagcagagctcatgtctcggttaccatccccagcacaattgatactgccggaaagcatgctagccgattgaagcctgccgaccaaatcacatttggtgtggagaaaaaacagcgagggatgaaccaaacattgagctgcagacaatgtgtccagcaggtccagcagcttgcattccactcccggacaaataggttcttgtctaataggccggcgatgctttccttggtcgccattgctgccgtttgtgtctgcgtaggattgatcatgaagagcctgccacaagttggtggtatgaggcctttcctctgggacaagatacgttggggccccaattgatagactgcacaagacccaacccaattgtatcagtgtatgatgaagatgtttgcgccgagcgaagctagattcttgtaatgtacatgtttcttagactaaatgcctaaattgaaatttctgttccatagtaaaacctgtgaaatgctctaatttgcctagcttgtagctccattgcatttgcatcctgactgaggtaaagcttttacttgtttttattgagaggaaaaaaaactcagtcttagcttgaaaaaatactcgaagtctcaccctttatcactggcgggccgttactatctactctgcaacgatcacaaggtatagtgagaagatttttttaatcagaaatttgtcctcgaggaatcgaacccgagacctagagaaagaaacccttttacttctgcattttgtttattgttattgcttttttttggtc

SEQ ID NO: 29820 - DNA, 3255 bp, Zea Mays
cccatccccaactggtcctaacccacggtacccaatccttgactcggttctctccatgagcttactgccccatctccatttcttcaatcattactcgcctttccgttcaagggcgttgcttgcctggataaccacggcatcgttctacccgccgggcccgagctaagtcatacgtgcaaacaaagagcagcaaaagaagaacaagtggggcgacagggacagggaggaggggaaggcagaggaaatggaagcctctttcttgaggaaagatggcggtgatcaagccagtgcggcgacaatgtccggcgagcacaggaacaagggccttgactgggatttgaacgactggaggtgggacgccaacctgttcctggccacgccggcggccatcgtgccgtccgagtgcagcagcaggaagctgagtcgagctcagggggagatcgacttcggcgtcgtcgttgacaagaggcggaggctctcgccagaggaggacggcagcgccggttgcagcaattctggggtagcagatggagacaacaatcatgtggtgcctgctcagagagggcggagcagcgaggaggagacacccaggaaaggtgccagttcgagcaccactccgtcctgccaggttgacggctgccatgccgatctcagcggtgccagggactaccataagaggcacaaggtgtgtgaagcacataccaggacgactgtggtctgcatcaagaatgtagagcatcggttctgtcagcagtgtagcaggtttcagcttcttcaagaatttgatgaagggaagaagagctgccgctcgcgtctagcacaacataatggaaggagaaggaaagttcaaccacaaactgttgtgaatgggaattccatgagtgaaaatcaatctctaagtaacacctcaatccttctgttaaaacaactttccaggctagagtctggtagctcctctgagccaatcaatcatcctaattctttggttaaccttttgaagaaccttgctgctattgctagcacacagtcatatcaagatattctaaagaatgcaaattcaaattcaatattgtcaaatgctggtaataatgctgcaaatggatctactgtgcatgagcaaactatacggtcaattccaatcagaggagaatcattagcagagccgaacagataaaattgtgttcaagctgtttggaaaagagccaaaagattttcctgtagatctacgggaacagatccaacactggttatcgcattatccaactgatatggaaagctatattaggcctggttgtgttattctaactatttacctccgcctccctaattggatgtgggatgagcttgatgatgatccagcttcgtggatagaaaagcttattagcatatccaatgatggactttggagaaaaggatggttgtatgctagggtacaggactgcctaacactgagttacaatggtagtcttatgtttgcatctccctggcaactggtaattggcgacaagcatcagagactgtgtgtaactcctattgcagttgcttgttcttcgtctgtaaaattctctgtgaaaggtttcaatatagttcagccaactacaaaattactttgtgtgtttggtgacaaatatttaattcaagaagagacacaaatgctacttgaagattcaactgtgcagcaaggccctcaatgcctgaccttctcatgttccttttcttgtacaagtggaagaggattcatagaggttgaagattatgatcaaagcagcctttgtgttccctttgttgtcgctgacaaagatgtatgttctgaaattcggatgttggagcatggattgaatttaatttcatttgatgaaacctcggaaagaatagatgatctgatggcttatcgcaatcggtcgttacattttttgcatgaaatcggatggctccttcaaaggagccatgtgcgagctacatctgagcagccacagtattgtccagaccgtttccctgttgaaagatttagatggctgctatcctttgcagttgatcaggaatggtgtgctgttttaaggaagcttctgaacaccatgttccagggtgatattgacctagatgttccgtcaccaattgaattcgccttaggagaaaatgtgttgcttactgctgttaaaaaacgctcaaagcctttagttgagtttctattaagatacacagcaacagattacgccccagtgggcagtggagccggcgctccagttcagttcttgttcactcctgcgatgactggactgtcaaatattacacctctccatattgcagcaacaatcagtgatgctactggtgttttggatgctttaactgatgatcctcggcagttgggaatcaaagcgtggaagaacgctcgtgacgccactggcttcactcctgaggaatatgctcgaaagagaggccacatatcctatatccaattggtacaggacaaaattgacagaagggtgagcagagctcatgtctcggttaccatccccagcacaattgatactgccggaaagcatgctagccgattgaagcctgccgaccaaatcacatttggtgtggagaaaaaacagcgagggatgaaccaaacattgagctgcagacaatgtgtccagcaggtccagcagcttgcattccactcccggacaaataggttcttgtctaataggccggcgatgctttccttggtcgccattgctgccgtttgtgtctgcgtaggattgatcatgaagagcctgccacaagttggtggtatgaggcctttcctctgggacaagatacgttggggccccaattgatagactgcacaagacccaacccaattgtatcagtgtatgatgaagatgtttgcgccgagcgaagctagattcttgtaatgtacatgtttcttagactaaatgcctaaattgaaatttctgttccatagtaaaacctgtgaaatgctctaatttgcctagcttgtagctccattgcatttgcatcctgactgaggtaaagcttttacttgtttttattgagaggaaaaaaaactcagtcttagcttgaaaaaatactcgaagtctcaccctttatcactggcgggccgttactatctactctgcaacgatcacaaggtatagtgagaagatttttttaatcagaaatttgtcctcgaggaatcgaacccgagacctagagaaagaaacccttttacttctgcattttgtttattgttattgcttttttttggtc

SEQ ID NO: 29821 - DNA, 3141 bp, Zea Mays
acaaagagcagcaaaagaagaacaagtggggcgacagggacagggaggaggggaaggcagaggaaatggaagcctctttcttgaggaaagatggcggtgatcaagccagtgcggcgacaatgtccggcgagcacaggaacaagggccttgactgggatttgaacgactggaggtgggacgccaacctgttcctggccacgccggcggccatcgtgccgtccgagtgcagcagcaggaagctgagtcgagctcagggggagatcgacttcggcgtcgtcgttgacaagaggcggaggctctcgccagaggaggacggcagcgccggttgcagcaattctggggtagcagatggagacaacaatcatgtggtgcctgctcagagagggcggagcagcgaggaggagacacccaggaaaggtgccagttcgagcaccactccgtcctgccaggttgacggctgccatgccgatctcagcggtgccagggactaccataagaggcacaaggtgtgtgaagcacataccaggacgactgtggtctgcatcaagaatgtagagcatcggttctgtcagcagtgtagcaggtttcagcttcttcaagaatttgatgaagggaagaagagctgccgctcgcgtctagcacaacataatggaaggagaaggaaagttcaaccacaaactgttgtgaatgggaattccatgagtgaaaatcaatctctaagtaacacctcaatccttctgttaaaacaactttccaggctagagtctggtagctcctctgagccaatcaatcatcctaattctttggttaaccttttgaagaaccttgctgctattgctagcacacagtcatatcaagatattctaaagaatgcaaattcaaattcaatattgtcaaatgctggtaataatgctgcaaatggatctactgtgcatgagcaaactatacggtcaattccaatcagaggagaatcattagcagagcctccagtgaaaaggcgggtacatgattttgatttgaatgatgcttgctttgaagaagttgagagccgaacagataaaattgtgttcaagctgtttggaaaagagccaaaagattttcctgtagatctacgggaacagatccaacactggttatcgcattatccaactgatatggaaagctatattaggcctggttgtgttattctaactatttacctccgcctccctaattggatgtgggatgagcttgatgatgatccagcttcgtggatagaaaagcttattagcatatccaatgatggactttggagaaaaggatggttgtatgctagggtacaggactgcctaacactgagttacaatggtagtcttatgtttgcatctccctggcaactggtaattggcgacaagcatcagagactgtgtgtaactcctattgcagttgcttgttcttcgtctgtaaaattctctgtgaaaggtttcaatatagttcagccaactacaaaattactttgtgtgtttggtgacaaatatttaattcaagaagagacacaaatgctacttgaagattcaactgtgcagcaaggccctcaatgcctgaccttctcatgttccttttcttgtacaagtggaagaggattcatagaggttgaagattatgatcaaagcagcctttgtgttccctttgttgtcgctgacaaagatgtatgttctgaaattcggatgttggagcatggattgaatttaatttcatttgatgaaacctcggaaagaatagatgatctgatggcttatcgcaatcggtcgttacattttttgcatgaaatcggatggctccttcaaaggagccatgtgcgagctacatctgagcagccacagtattgtccagaccgtttccctgttgaaagatttagatggctgctatcctttgcagttgatcaggaatggtgtgctgttttaaggaagcttctgaacaccatgttccagggtgatattgacctagatgttccgtcaccaattgaattcgccttaggagaaaatgtgttgcttactgctgttaaaaaacgctcaaagcctttagttgagtttctattaagatacacagcaacagattacgccccagtgggcagtggagccggcgctccagttcagttcttgttcactcctgcgatgactggactgtcaaatattacacctctccatattgcagcaacaatcagtgatgctactggtgttttggatgctttaactgatgatcctcggcagttgggaatcaaagcgtggaagaacgctcgtgacgccactggcttcactcctgaggaatatgctcgaaagagaggccacatatcctatatccaattggtacaggacaaaattgacagaagggtgagcagagctcatgtctcggttaccatccccagcacaattgatactgccggaaagcatgctagccgattgaagcctgccgaccaaatcacatttggtgtggagaaaaaacagcgagggatgaaccaaacattgagctgcagacaatgtgtccagcaggtccagcagcttgcattccactcccggacaaataggttcttgtctaataggccggcgatgctttccttggtcgccattgctgccgtttgtgtctgcgtaggattgatcatgaagagcctgccacaagttggtggtatgaggcctttcctctgggacaagatacgttggggccccaattgatagactgcacaagacccaacccaattgtatcagtgtatgatgaagatgtttgcgccgagcgaagctagattcttgtaatgtacatgtttcttagactaaatgcctaaattgaaatttctgttccatagtaaaacctgtgaaatgctctaatttgcctagcttgtagctccattgcatttgcatcctgactgaggtaaagcttttacttgtttttattgagaggaaaaaaaactcagtcttagcttgaaaaaatactcgaagtctcaccctttatcactggcgggccgttactatctactctgcaacgatcacaaggtatagtgagaagatttttttaatcagaaatttgtcctcgaggaatcgaacccgagacctagagaaagaaacccttttacttctgcattttgtttattgttattgcttttttttggtc

SEQ ID NO: 29822 - DNA, 1146 bp, Zea Mays
taaaaacctgtgcaagtgatcgattgttcgttgccaatgaaaaatgaagaaatcactggttttcgtacatagccagatgaaaaagttcactttccagacctggtttttacccattttacgagcgaaatgaaaaaaccgtacttttggcggcatgaaagtttctgaaaaacaagctcgaaaaagaggcatttatgagggaaacgagaaaaaagtgtcactttgccacaggcgagacggaacagatctgaaaagatgtacagaggatattcccgtttcggctgcatcggaggaggacagacaatcaagggcgaacattgctgcctcttttcagcgagttgctgtgttacatttggaagaaaggtgtgagcgagcagttgaatgggcattgaatatggaaccttccatcaaatactttgttgtttcaggaggtgtcgcatcaaacaagtatgttacgactcgcttgaatcatgttgctgggaataatggcctacaacttgtatctcctcctccaagcctttgtactgacaatggtgtcatgattgcttggactgggattgagcattttgttgccgggaggtttgaggacccacctgctgctgatgagtctgatgatatgcagtatgagctgcggccaagatggcctcttggtgaggaatattcaaaaggaagaagtgttgcacgatcattgaagactgctcgagtccatccatcactaacgtccatgatacagggctcccttcaaaagtagttgagttggaagttggaaactaattattggtctcagctgctttatgcagttgagtttcccgtcttctagttttgggttcacaaatcagctgatttatctgtattcgctgaattgaagtaacaaacctgcaaaagggccgaactagtttaatagtagatgaggctatatacaaattcagttcataccagtgtttttaaggcgttgcctaggtgatgtctaggcgtctaggcgctcgaataattctagtcgccttgcttgcctacgcgtccaggcggtggtctaacgtctcgccttaccgtattaagaacattggttcatacataccagaagatgcttatactccatttgtgtttaccatggaggctggctgtatcaggccccacgcattttgaatgtag

SEQ ID NO: 29823 - DNA, 1007 bp, Zea Mays
taaaaacctgtgcaagtgatcgattgttcgttgccaatgaaaaatgaagaaatcactggttttcgtacatagccagatgaaaaagttcactttccagacctggtttttacccattttacgagcgaaatgaaaaaaccgtacttttggcggcatgaaagtttctgaaaaacaagctcgaaaaagaggcatttatgagggaaacgagaaaaaagtgtcactttgccacaggcgagacggaacagatctgaaaagatgtacagaggatattcccgtttcggctgcatcggaggaggacagacaatcaagggcgaacattgctgcctcttttcagcgagttgctgtgttacatttggaagaaaggtgtgagcgagcagttgaatgggcattgaatatggaaccttccatcaaatactttgttgtttcaggaggtgtcgcatcaaacaagtatgttacgactcgcttgaatcatgttgctgggaataatggcctacaacttgtatctcctcctccaagcctttgtactgacaatggtgtcatgattgcttggactgggattgagcattttgttgccgggaggtttgaggacccacctgctgctgatgagtctgatgatatgcaggggataggtcataaatgggcaaattgagttaggtcacaaataactcacgggtttgagagttggcagatctcttggggtggtctggtctgtacgttgaggcatggatctgagagttctacgcctcctttggatgcagctgaaccacaatttctttagttctttagagcatctataatagttatgtaaacaacttcctaaatatgaatttaggaagttttcggaaaaactcttcttcaacaattatgtaaagtagatccttaaatttacaaactccctacaaaacccaatttcactcctacatttaagaacctcgttggaactatctaaatcaatgttggttctaaatccatcgctgaaaccatatttcggccaccgttttgcgttgtca

SEQ ID NO: 29824 - DNA, 1017 bp, Zea Mays
gaacagatctgaaaagaggatattcccgtttcggctgcatcggaggaggacagacaatcaagggcgaacattgctgcctcttttcagcgagttgctgtgttacatttggaagaaaggtgtgagcgagcagttgaatgggcattgaatatggaaccttccatcaaatactttgtaactcagatatcttgacgatggttaatttcaaatcggtttactcatccagtgttgacttatccaattataaaaaggttgtttcaggaggtgtcgcatcaaacaagtatgttacgactcgcttgaatcatgttgctgggaataatggcctacaacttgtatctcctcctccaagcctttgtactgacaatggtgtcatgattgcttggactgggattgagcattttgttgccgggaggtttgaggacccacctgctgctgatgagtctgatgatatgcagtatgagctgcggccaagatggcctcttggtgaggaatattcaaaaggaagaagtgttgcacgatcattgaagactgctcgagtccatccatcactaacgtccatgatacagggctcccttcaaaagtagttgagttggaagttggaaactaattattggtctcagctgctttatgcagggataggtcataaatgggcaaattgagttaggtcacaaataactcacgggtttgagagttggcagatctcttggggtggtctggtctgtacgttgaggcatggatctgagagttctacgcctcctttggatgcagctgaaccacaatttctttagttctttagagcatctataatagttatgtaaacaacttcctaaatatgaatttaggaagttttcggaaaaactcttcttcaacaattatgtaaagtagatccttaaatttacaaactccctacaaaacccaatttcactcctacatttaagaacctcgttggaactatctaaatcaatgttggttctaaatccatcgctgaaaccatatttcggccaccgttttgcgttgtca

SEQ ID NO: 29825 - DNA, 1398 bp, Zea Mays
ttttcatccttaggtggcgggcgggcgcgtgatccgcgggcgggaggggaaccgcggcgggggcagtctacactttactcttaatagttagtagagatttgaaactaggtctaaaaatatatttgaaaagataataataaaaataaaaaataagaaaatgaaccctaaaacctcagccccggcgcacccgaaccggcaattaggcccgcaaacaacaccgctagccatgtggcgccgcgcctcccacctcctcatccgcaccgccgccgccgccgccgccccgacccgccgcctcccacttcctcacccgccgctacccatcgccccaagagtggcctccgcatcctcatcctatgccacagcggtcgcggcgagggcaccgcggacggtagggaccctgctgcggctcaacgacctgtgtgacaacccgggcgcgcggaagcagaagacgcgcaagggacgcgggatcggctccggcaaggggaagacggcgggacgcggccacaaggggcagaaagcgcgaggcaccgctaggttcggcttcgagggtggccagaccccgctccgccgccgcctgccccgccgtggattcaagaaccccttctcactcacatttcagccctgtggactggggaaaattgcaaaactcataaatgctgggaaaattgattcctctgaattgattaccatgaagacactaaaggtgccattgggaagcaaataaaagatggaattcgtttaatgggccgtggagcagaagaaatcaaatggcctattcaccttgaggtgtcaagggcaactgcaagggccaaagctgccgtggaagctgctggtgggacagtaaggctggtgtactacaacaaacttggattccgggcactcctgaaacctgagtggtttgagaagaagggccgcctgttaccaaaagcagcaaggcctccacccaagcagcgagataaggtcgatagcattggccgcctgcccgcgccgacaaagccactccccttcacggtagaggagctggagtttgcagcccagcgtgaggctgcccgcgtgactgcataagatgggagcacgttggcagcacctttttttctgaaagcatgcgccactggatgtgtatcacattagctttagcaggacatgcataagaatggaccgttttgtcttttttttttcttttccctcaaggaatggactgttataaattaaatatccattcatttgaatcagatgttgctgtaatttctgaacttaccttgggttttgattgataaatgccattttttctgaataggctcatgtatgatgtcattttacctgccaccttttgatcctgtaatgacaattgagaaatgccgtttatttctgtgaaataggtgaaaagcatgtgactta

SEQ ID NO: 29826 - DNA, 636 bp, Zea Mays
ggcaaaatgatgatttttctctcagtgtcaagggcaactgcaagggccaaagctgccgtggaagctgctggtgggacagtaaggctggtgtactacaacaaacttggattccgggcactcctgaaacctgagtggtttgagaagaagggccgcctgttaccaaaagcagcaaggcctccacccaagcagcgagataaggtcgatagcattggccgcctgcccgcgccgacaaagccactccccttcacggtagaggagctggagtttgcagcccagcgtgaggctgcccgcgtgactgcataagatgggagcacgttggcagcacctttttttctgaaagcatgcgccactggatgtgtatcacattagctttagcaggacatgcataagaatggaccgttttgtcttttttttttcttttccctcaaggaatggactgttataaattaaatatccattcatttgaatcagatgttgctgtaatttctgaacttaccttgggttttgattgataaatgccattttttctgaataggctcatgtatgatgtcattttacctgccaccttttgatcctgtaatgacaattgagaaatgccgtttatttctgtgaaataggtgaaaagcatgtgactta

SEQ ID NO: 29827 - DNA, 1052 bp, Zea Mays
gcctgcgccgccgccaactctctctgcagtccgcactcactctcactcccgcatgcatgatccctcgtagcaacagctagcacaccgagcaagcatatcgcacgcgcgcgatcgatcggtcattcggtcgacgacgctgcccagccaaatcaaagtcttgatgccaggccacagttgcgcagtgccgcgcgcgcgcgcgcgcgtgcatgtgccattgctttccttccgtcgtctcgtctctctctgcggcgtgcgtctgcaatgcaaatagccggtgagtgagtgtcgatcaagcgttgattgctcagtctttgttcggattcggactagagagctaagatcacgcatgcgtatcgatggattctcttctatcatctgcttctttatttccaccctctcagtgtcgtgacgatgcacgtacgtacgagccgcgcggtttgcatcaactgtgccggccggcgtctcttgatctgctctgcagcatgcatatgatgactcaattattgctcaacgtccttcgtcactgacatactagtagtgtgtcagtgtgtgcgtgtcagcgtgtgcaggcgtctcttgcatgcccgccctgcagatatgtacacgcaatatatattaagtagtataacaagctacacgtgcttcgcagctgccaggaggccttgtttgcttcgagcgcgcgcgcttaccgcttagcttccagctatctgcgctgctgcatgcatgcatgtcgaattctagctctactgggtggtttccgttttttttcttccttcttccctctcgcttttgcatttttctaaaaaaattagtttattttctctttgtaaaatgaaaatcctttgaaaaaataggcttgtcagactagcccttaacatcacactttttcctcatatttcttttgggtgtggccgaattgcactagatgactaaagataatatttaaatgctgcaccccggccggagaaccttttaacctgtcagtctgctctcgtctgaccgccagcagtatgtatgtctagatgagcttgttcatgaaaattctcctccac

SEQ ID NO: 29828 - DNA, 1033 bp, Zea Mays
gcctgcgccgccgccaactctctctgcagtccgcactcactctcactcccgcatgcatgatccctcgtagcaacagctagcacaccgagcaagcatatcgcacgcgcgcgatcgatcggtcattcggtcgacgacgctgcccagccaaatcaaagtcttgatgccaggccacagttgcgcagtgccgcgcgcgcgcgcgcgcgtgcatgtgccattgctttccttccgtcgtctcgtctctctctgcggcgtgcgtctgcaatgcaaatagccgcgaactcaggcattgaaggccgcccagatttgtttttgtacaaatttcagagccaattaagctagtttggcgcttcaggctggtacatgcacgttgttgggttgaattctagccgggtacacgtccagtgcaaggcggtgttacgtaatttatgccattgatttgccaacaggactgtgaagactggatcgtacgcatgcatgcagatgggtttgatgatgacgacaccgagccgagccgccgtcagtacagtaatcgtaaatcacgttctcttctgtaatttctcgggatatggatcatgcacatggccgcatctctccaatttgtatacaaagccaccaaactgtaacggggcgtttggctcgtcccataagctaaaacaaaaataactagtcactttatgagttaaagatctaaacataaaagctagcttataaagtgactaaaatgataaaaagatatattttttagccagccatgtttggattgatccatgagataaaacgaagtggctaaagtttagtaaaatgagataaaggtcattacaatgtagttaagtacaactcggactgatataccatcaatcgtatcctgcgctggggcttacacgtggggtcccgcttcaataacatgcgcgggtggtgactgcagccttcgtcttagggtgtcgggtcttcgggagacggcaagacgaccttcgcctgtcctggaagatccctccgttccagggccttagcttggttgaggtagcgagaaggg

SEQ ID NO: 29829 - DNA, 1132 bp, Zea Mays
tcgtaatgcaatgcccactataaaccacgcatgcacaaacacaaaagtaaaatagctacgacgaccggacgacggcaatcagcttgtgctgctggactccattaattaataataagcttgttctgttactccatcactctcctagctatgtgcggcggcaagatggcaattttaaactggtttgtaccgtatatatcgtactatgcatctttgttttttttaaaaaagtgatccatcagtgcatgctgccactttacttatatatagtctcaagcaggttctcgtacgccatctggtaataaagactagtattatctatgccttgacagctgatcgtacatagcataatacaatccacacagaacatttgatccatgctctttcggtgaaggtgaaacataacttgtgcagtactacaactccctcttccagtattgatcggtatgtttggttaaacttgcagcgaactcaggcattgaaggccgcccagatttgtttttgtacaaatttcagagccaattaagctagtttggcgcttcaggctggactgtgaagactggatcgtacgcatgcatgcagatgggtttgatgatgacgacaccgagccgagccgccgtcagtacagtaatcgtaaatcacgttctcttctgtaatttctcgggatatggatcatgcacatggccgcatctctccaatttgtatacaaagccaccaaactgtaacggggcgtttggctcgtcccataagctaaaacaaaaataactagtcactttatgagttaaagatctaaacataaaagctagcttataaagtgactaaaatgataaaaagatatattttttagccagccatgtttggattgatccatgagataaaacgaagtggctaaagtttagtaaaatgagataaaggtcattacaatgtagttaagtacaactcggactgatataccatcaatcgtatcctgcgctggggcttacacgtggggtcccgcttcaataacatgcgcgggtggtgactgcagccttcgtcttagggtgtcgggtcttcgggagacggcaagacgaccttcgcctgtcctggaagatccctccgttccagggccttagcttggttgaggtagcgagaaggg

SEQ ID NO: 29830 - DNA, 4674 bp, Zea Mays
gtgacgtccgcctcaagctgtcagactgccgctcgacgctcgttacgcacgccgccagcccgctagtgtaaggatcagaaagtaagctttcttctcattttatcatatcaaacaattatttgtctttactctttgtattatggtatgttctagaattttaaattatgataactagttattgaatcagttatatctatattgtttatgcttaattatatattatatatataaataattatctatgtatgccagtagaaaaacttcagtctttaaaaataatcattctagaaaattttcgaatatccacactctaaatcctgggcccgccgctgcctgggtgcagccaaacacaccaaagcccattggtcggacaggatctgggtcgctcggcacgccaggtcttgcgaggagaacgaaacaagccgcttgacgaaccgggtcattatctgccaatctggtactctgtgtgcctgtctgtgagtctgtcagctctccccctctgctgtcctcctctgtctcttgtctctgatcctgcttgggagacagtatcgatggatttcgtggagcgtctcccatgttctgtcaacgctgattgcatcttaatttaattgttgtggacaagtttactcagtatgcacactttttgcccccgtcccacccctatactgcaagttccgcgactcactgttttatgttttacaagctccatgggttgtcatctacactcatttccgaccatgaccttgtctttactaataagttctggcaccatctctttaggttggctggtaaagaattatgtttgagttcctcttatcacccacatacgaatggacaaaccgagcgcgtgaatcgtctccgtcggtgattggatgtacatgaagttacatccaaaagtccaatcgtctatgatgccccgtgctcatcacaggcttaacttcaaatatttcggtccatatcagggcttgttcggttagtttccaatccatatggattgagtagaattgaatgagtttaaatcccaagaaagtctatcttattcttaattttttccaatctcatccaatccatgtgtaacggattaaccgaacaaggcctcaggtgacagattgtgtggcacaagtggcttatcgtctacaattgcttgcgtctagccatatccaccttgtggttcacgtgtctcaactgaagctgcctactggttttcaaggcgaattatgaattgacgaatgataggttgtgttaatttgatattgtattggtgtggtatgtgaaactatgagtataataactattttttttgttgttaaattagttcagaattaattgaaattaattattatgtatatcaatcttaacgtaaacggtagacaaatggtggggctatgtttagtgtttagatgtgtttaaacatgtttaaacagaattaaacggtttttctaatgtagcagcatttcagcgagattaaattagctttcaacaagaataaatgagtaaatacacatatatttagttcaacgatactgtgatatacttatatattatatataatttcaacaatatatatatatataatttaagctagcatatatataatttgcaccaaccacatgtcaatagtatatatataatttaagctagcaaacagcaagacaaccttgcagccagcacctgccaaccttactgccagcggccaaccttgcttccagcacctgccaagagccccaacacacgcaggacgggccatgcttggaccaggctaaaaacgagtcggcccgagtttcaaatgtcggcccatactatttagacatctatagctctggatacacgtagggagatatgcagacatgcaactcaatatttataatatcaaatagatataatcaattaatacagaatataatgttggtttgactaaattaaagcggcaagacacaagcttgtgcttgtcgcttcccggtctgcttgccggaacaatctggagatccgatggcggcagagttgcttcgatgtattgtcgagccacggcaaggggggcaggcaggcagcacacctgaaaagcaggggagattctccttcactccgcgcgcaggcatcaggcactcgtacgtacgtcaccacgctcccccgttcgcatcccgcgaaactcgcgtggttcgtttcatctcatatatcctgccggtgtccgccgctgcagtccgttgcagacgccggccccgggtccgttggcgttgcccgcccgcccgcctgcagcttcgtcatctgatcattgcccacgctcttttggttgacgccggccgatgtcacatcaacgaggatacacgtacgtcgccgcgtcagatgatgagacgagtcgtctggtacatgctttgccggaacggagatgtgcacggcaggcagttcttcggcctgaccctggggtctgccacaggcaacaagtgaggaacctagcctagctacgaggattcaaggaacatgggagaaaatgggtactctctctatccacataatttagttattttgagtttgtcctaagtcaattattattaattttgatcagttatataggatgtttcataagattttacaacaaaaaagtaagttactagattcttcgtgatttgaactatcataatttcaaaatgatttaatcttatatatatattatattgatcaaagttaaaatagtttgatttaggacaattttaaaacaactaaattatgtgaacggagagagtattcactaattaatgaccgaggccgacacgctgcgtataaataggatattattaccttttgacacgtacgatctgctgactactactagtaatcttacggtactgaggacggtgtgatcgcagtgttttctctacttttctcaacaatacaccgggcatgttttttgtgtgtgcatgcatcatttcacgcgcaaatacattctactctaaactcaaagtaggcagtgttcacaagaatacaccatgtaggatagaacgtatgttgcaatttattaagggccatgtttgttcatcagaatcgacttctagcagtcaaaggtacgtttcgtttttcagcttacttctgtaaaagtcgtttctacgaaaatcgttcaaatcaacatgaatataaagtctatcgagccatcacagcgggtggaatcaatccaccactcttaaaccctaaaccgtggagacttattcatctttctccgcatgtaagtcttatggaatctagattctagtgacatatagattatctagaaattctggttcttagaaaaagctctctgaaaaaaattgttccaagcatgcggaagcctcgggctataacaaccttagcgaatcaaaaaatacattttcaaaactttcagaacctagatggtaccttcaaacaactttaagcattactaatatataaattttacttttatatttttagcttcttggaagttatttctggaattttttaaaaaccaattaatagctggactgtttattttagcttctcggcacatcaaaaatggaatatctgttagaagtcaactttctagtctttcaaaatccaactcaacagtccaaccgtttatttcagcttctagtttatcagcgcgcgcttaaaatcaacaaaatgtaaaacaagcaggccctaaaagcagcgcacgccaatagtaatttgtttcacatttcgttcggactctacaaacaattacaagtaacgtgataataatgaaatgatgggtacaattttcattggtgagaaaatggtctcaattcggaacaaactaatttatcgcctacactcttacacgagctagaattttttataagacaagtattcaaaatttgtgaataaatttagtacttacatctaatcaaaatcactcatctttattgttgggagctttctccttccaaaagtcttcaaaaacataattaatcaatgtttttagcataagtcattacaggaagcttcgtttttagaatgcaagcctctttctcatgatgaagacacgaaatgaagatcagatctaaaaaggataagaataaacgccgacctattaacagatggacaacttcggctcataacggagatgaagtataatgatgatgctgacccgaaagaggaaaaaactacttagtccttaatgatttgtattttgatcatatataaatattgaggacataaatatactttcacccgggttgcgtcccgtgcctttaaatagatgaacagtagcaccgtactgttcacgctgaatgataatcactctctcgcgtcttcaccttcgaacaagtcgaaagtatcaatgtaatatgaattctgttgatattcatacatgttttatagaatacgaacgtgaaggaattaatgagatgcaattactgtcttcatcctctcacattcatatttacatactaaatgttaaaggtctgtccttcttgaccttcgtctgatgatcattatacccatggggagataatgcttcggaaggcgaaggtccctaataattaacaattgtgtttcctttttttgattcaaagtatttgagaacgagtgaccaacattggcgcccacctccggtgaactcacttccaccaccttcggcaaaagtttgccttcgtcatgtcgccgaagaagacaatagcgccaggggctgctctgcagccactggat

SEQ ID NO: 29831 - DNA, 2438 bp, Zea Mays
tccgcctcaagctgtcagactgccgctcgacgctcgttacgcacgccgccagcccgctagtgtaaggatcagaaaacgaggatacacgtacgtcgccgcgtcagatgatgagacgagtcgtctggtacatgctttgccggaacggagatgtgcacggcaggcagttcttcggcctgaccctggggtctgccacaggcaacaagtgaggaacctagcctagctacgaggattcaaggaacatgggagaaaatgggtactctctctatccacataatttagttattttgagtttgtcctaagtcaattattattaattttgatcagttatataggatgtttcataagattttacaacaaaaaagtaagttactagattcttcgtgatttgaactatcataatttcaaaatgatttaatcttatatatatattatattgatcaaagttaaaatagtttgatttaggacaattttaaaacaactaaattatgtgaacggagagagtattcactaattaatgaccgaggccgacacgctgcgtataaataggatattattaccttttgacacgtacgatctgctgactactactagtaatcttacggtactgaggacggtgtgatcgcagtgttttctctacttttctcaacaatacaccgggcatgttttttgtgtgtgcatgcatcatttcacgcgcaaatacattctactctaaactcaaagtaggcagtgttcacaagaatacaccatgtaggatagaacgtatgttgcaatttattaagggccatgtttgttcatcagaatcgacttctagcagtcaaaggtacgtttcgtttttcagcttacttctgtaaaagtcgtttctacgaaaatcgttcaaatcaacatgaatataaagtctatcgagccatcacagcgggtggaatcaatccaccactcttaaaccctaaaccgtggagacttattcatctttctccgcatgtaagtcttatggaatctagattctagtgacatatagattatctagaaattctggttcttagaaaaagctctctgaaaaaaattgttccaagcatgcggaagcctcgggctataacaaccttagcgaatcaaaaaatacattttcaaaactttcagaacctagatggtaccttcaaacaactttaagcattactaatatataaattttacttttatatttttagcttcttggaagttatttctggaattttttaaaaaccaattaatagctggactgtttattttagcttctcggcacatcaaaaatggaatatctgttagaagtcaactttctagtctttcaaaatccaactcaacagtccaaccgtttatttcagcttctagtttatcagcgcgcgcttaaaatcaacaaaatgtaaaacaagcaggccctaaaagcagcgcacgccaatagtaatttgtttcacatttcgttcggactctacaaacaattacaagtaacgtgataataatgaaatgatgggtacaattttcattggtgagaaaatggtctcaattcggaacaaactaatttatcgcctacactcttacacgagctagaattttttataagacaagtattcaaaatttgtgaataaatttagtacttacatctaatcaaaatcactcatctttattgttgggagctttctccttccaaaagtcttcaaaaacataattaatcaatgtttttagcataagtcattacaggaagcttcgtttttagaatgcaagcctctttctcatgatgaagacacgaaatgaagatcagatctaaaaaggataagaataaacgccgacctattaacagatggacaacttcggctcataacggagatgaagtataatgatgatgctgacccgaaagaggaaaaaactacttagtccttaatgatttgtattttgatcatatataaatattgaggacataaatatactttcacccgggttgcgtcccgtgcctttaaatagatgaacagtagcaccgtactgttcacgctgaatgataatcactctctcgcgtcttcaccttcgaacaagtcgaaagtatcaatgtaatatgaattctgttgatattcatacatgttttatagaatacgaacgtgaaggaattaatgagatgcaattactgtcttcatcctctcacattcatatttacatactaaatgttaaaggtctgtccttcttgaccttcgtctgatgatcattatacccatggggagataatgcttcggaaggcgaaggtccctaataattaacaattgtgtttcctttttttgattcaaagtatttgagaacgagtgaccaacattggcgcccacctccggtgaactcacttccaccaccttcggcaaaagtttgccttcgtcatgtcgccgaagaagacaatagcgccaggggctgctctgcagccactggat

SEQ ID NO: 29832 - DNA, 2324 bp, Zea Mays
ctcaagctgtcagactgccgctcgacgctcgttacgcacgccgccagcccgctagtgtaaggatcagaaagtctgccacaggcaacaagtgaggaacctagcctagctacgaggattcaaggaacatgggagaaaatgggtactctctctatccacataatttagttattttgagtttgtcctaagtcaattattattaattttgatcagttatataggatgtttcataagattttacaacaaaaaagtaagttactagattcttcgtgatttgaactatcataatttcaaaatgatttaatcttatatatatattatattgatcaaagttaaaatagtttgatttaggacaattttaaaacaactaaattatgtgaacggagagagtattcactaattaatgaccgaggccgacacgctgcgtataaataggatattattaccttttgacacgtacgatctgctgactactactagtaatcttacggtactgaggacggtgtgatcgcagtgttttctctacttttctcaacaatacaccgggcatgttttttgtgtgtgcatgcatcatttcacgcgcaaatacattctactctaaactcaaagtaggcagtgttcacaagaatacaccatgtaggatagaacgtatgttgcaatttattaagggccatgtttgttcatcagaatcgacttctagcagtcaaaggtacgtttcgtttttcagcttacttctgtaaaagtcgtttctacgaaaatcgttcaaatcaacatgaatataaagtctatcgagccatcacagcgggtggaatcaatccaccactcttaaaccctaaaccgtggagacttattcatctttctccgcatgtaagtcttatggaatctagattctagtgacatatagattatctagaaattctggttcttagaaaaagctctctgaaaaaaattgttccaagcatgcggaagcctcgggctataacaaccttagcgaatcaaaaaatacattttcaaaactttcagaacctagatggtaccttcaaacaactttaagcattactaatatataaattttacttttatatttttagcttcttggaagttatttctggaattttttaaaaaccaattaatagctggactgtttattttagcttctcggcacatcaaaaatggaatatctgttagaagtcaactttctagtctttcaaaatccaactcaacagtccaaccgtttatttcagcttctagtttatcagcgcgcgcttaaaatcaacaaaatgtaaaacaagcaggccctaaaagcagcgcacgccaatagtaatttgtttcacatttcgttcggactctacaaacaattacaagtaacgtgataataatgaaatgatgggtacaattttcattggtgagaaaatggtctcaattcggaacaaactaatttatcgcctacactcttacacgagctagaattttttataagacaagtattcaaaatttgtgaataaatttagtacttacatctaatcaaaatcactcatctttattgttgggagctttctccttccaaaagtcttcaaaaacataattaatcaatgtttttagcataagtcattacaggaagcttcgtttttagaatgcaagcctctttctcatgatgaagacacgaaatgaagatcagatctaaaaaggataagaataaacgccgacctattaacagatggacaacttcggctcataacggagatgaagtataatgatgatgctgacccgaaagaggaaaaaactacttagtccttaatgatttgtattttgatcatatataaatattgaggacataaatatactttcacccgggttgcgtcccgtgcctttaaatagatgaacagtagcaccgtactgttcacgctgaatgataatcactctctcgcgtcttcaccttcgaacaagtcgaaagtatcaatgtaatatgaattctgttgatattcatacatgttttatagaatacgaacgtgaaggaattaatgagatgcaattactgtcttcatcctctcacattcatatttacatactaaatgttaaaggtctgtccttcttgaccttcgtctgatgatcattatacccatggggagataatgcttcggaaggcgaaggtccctaataattaacaattgtgtttcctttttttgattcaaagtatttgagaacgagtgaccaacattggcgcccacctccggtgaactcacttccaccaccttcggcaaaagtttgccttcgtcatgtcgccgaagaagacaatagcgccaggggctgctctgcagccactggat

SEQ ID NO: 29833 - DNA, 3025 bp, Zea Mays
ctcaagctgtcagactgccgctcgacgctcgttacgcacgccgccagcccgctagtgtaaggatcagaaaccaaacacaccaaagcccattggtcggacaggatctgggtcgctcggcacgccaggtcttgcgaggagaacgaaacaagccgcttgacgaaccgggtcattatctgccaatctggtactctgtgtgcctgtctgtgagtctgtcagctctccccctctgctgtcctcctctgtctcttgtctctgatcctgcttgggagacagtatcgatggatttcgtggagcgtctcccatgttctgtcaacgctgattgcatcttaatttaattgttgtggacaagtttactcagtatgcacactttttgcccccgtcccacccctatactgcaagttccgcgactcactgttttatgttttacaagctccatgggttgtcatctacactcatttccgaccatgaccttgtctttactaataagttctggcaccatctctttaggttggctggtaaagaattatgtttgagttcctcttatcacccacatacgaatggacaaaccgagcgcgtgaatcgtctccgtcggtgattggatgtacatgaagttacatccaaaagtccaatcgtctatgatgccccgtgctcatcacaggcttaacttcaaatatttcggtccatatcagggcttgttcggttagtttccaatccatatggattgagtagaattgaatgagtttaaatcccaagaaagtctatcttattcttaattttttccaatctcatccaatccatgtgtaacggattaaccgaacaaggcctcaggtgacagattgtgtggcacaagtggcttatcgtctacaattgcttgcgtctagccatatccaccttgtggttcacgtgtctcaactgaagctgcctactggttttcaaggcgaattatgaattgacgaatgataggttgtgttaatttgatattgtattggtgtggtatgtgaaactatgagtataataactattttttttgttgttaaattagttcagaattaattgaaattaattattatgtatatcaatcttaacgtaaacggtagacaaatggtggggctatgtttagtgtttagatgtgtttaaacatgtttaaacagaattaaacggtttttctaatgtagcagcatttcagcgagattaaattagctttcaacaagaataaatgagtaaatacacatatatttagttcaacgatactgtgatatacttatatattatatataatttcaacaatatatatatatataatttaagctagcatatatataatttgcaccaaccacatgtcaatagtatatatataatttaagctagcaaacagcaagacaaccttgcagccagcacctgccaaccttactgccagcggccaaccttgcttccagcacctgccaagagccccaacacacgcaggacgggccatgcttggaccaggctaaaaacgagtcggcccgagtttcaaatgtcggcccatactatttagacatctatagctctggatacacgtagggagatatgcagacatgcaactcaatatttataatatcaaatagatataatcaattaatacagaatataatgttggtttgactaaattaaagcggcaagacacaagcttgtgcttgtcgcttcccggtctgcttgccggaacaatctggagatccgatggcggcagagttgcttcgatgtattgtcgagccacggcaaggggggcaggcaggcagcacacctgaaaagcaggggagattctccttcactccgcgcgcaggcatcaggcactcgtacgtacgtcaccacgctcccccgttcgcatcccgcgaaactcgcgtggttcgtttcatctcatatatcctgccggtgtccgccgctgcagtccgttgcagacgccggccccgggtccgttggcgttgcccgcccgcccgcctgcagcttcgtcatctgatcattgcccacgctcttttggttgacgccggccgatgtcacatcagtcagccaccgcctcatctctcacagacagtcacaggttctcagctgccgcattggagactgattatttctatgcatttgcagacgaggatacacgtacgtcgccgcgtcagatgatgagacgagtcgtctggtacatgctttgccggaacggagatgtgcacggcaggcagttcttcggcctgaccctgggggtctgccacaggcaacaagtgaggaacctagcctagctacgaggattcaaggaacatgggagaaaatggcataagtcattacaggaagcttcgtttttagaatgcaagcctctttctcatgatgaagacacgaaatgaagatcagatctaaaaaggataagaataaacgccgacctattaacagatggacaacttcggctcataacggagatgaagtataatgatgatgctgacccgaaagaggaaaaaactacttagtccttaatgatttgtattttgatcatatataaatattgaggacataaatatactttcacccgggttgcgtcccgtgcctttaaatagatgaacagtagcaccgtactgttcacgctgaatgataatcactctctcgcgtcttcaccttcgaacaagtcgaaagtatcaatgtaatatgaattctgttgatattcatacatgttttatagaatacgaacgtgaaggaattaatgagatgcaattactgtcttcatcctctcacattcatatttacatactaaatgttaaaggtctgtccttcttgaccttcgtctgatgatcattatacccatggggagataatgcttcggaaggcgaaggtccctaataattaacaattgtgtttcctttttttgattcaaagtatttgagaacgagtgaccaacattggcgcccacctccggtgaactcacttccaccaccttcggcaaaagtttgccttcgtcatgtcgccgaagaagacaatagcgccaggggctgctctgcagccactggat

SEQ ID NO: 29834 - DNA, 2967 bp, Zea Mays
ctcaagctgtcagactgccgctcgacgctcgttacgcacgccgccagcccgctagtgtaaggatcagaaaacgaggatacacgtacgtcgccgcgtcagatgatgagacgagtcgtctggtacatgctttgccggaacggagatgtgcacggcaggcagttcttcggcctgaccctggggtaccctttatccttgcgatatggtcgaccatctttgttatagctatagcgtggcgtggcgtggcgtgcggcagaagcgtgtaggtttgcagagcgcgccatagcctgcaaggatcggaccaagtaaaggtggctgagctggagcgcacctccatcgtcccctgggccggccggacccggacgcccggtcagccgccgccgccgcgcgccgttgcctgcccggttggccgcttcgtcacgcgttgcggcgcattgccagcgcccaatgcctcgggtctggacggagtagctagtagtggtgtgattggcatctagctaagctagctcagccagccttcaagttcaaggcgcgagtagtccctccctcccatcccagcgcgcggttttccggggacgaacgtaccggccgcattttcgttgccagctccttttcttctgcctgcttttctgatttcttttggtgctcagctcaggtatcggccggtctttgcagtacctaagcaacaagcaggggcggactcagcaccttgtccggtctgccacaggcaacaagtgaggaacctagcctagctacgaggattcaaggaacatgggagaaaatgggtactctctctatccacataatttagttattttgagtttgtcctaagtcaattattattaattttgatcagttatataggatgtttcataagattttacaacaaaaaagtaagttactagattcttcgtgatttgaactatcataatttcaaaatgatttaatcttatatatatattatattgatcaaagttaaaatagtttgatttaggacaattttaaaacaactaaattatgtgaacggagagagtattcactaattaatgaccgaggccgacacgctgcgtataaataggatattattaccttttgacacgtacgatctgctgactactactagtaatcttacggtactgaggacggtgtgatcgcagtgttttctctacttttctcaacaatacaccgggcatgttttttgtgtgtgcatgcatcatttcacgcgcaaatacattctactctaaactcaaagtaggcagtgttcacaagaatacaccatgtaggatagaacgtatgttgcaatttattaagggccatgtttgttcatcagaatcgacttctagcagtcaaaggtacgtttcgtttttcagcttacttctgtaaaagtcgtttctacgaaaatcgttcaaatcaacatgaatataaagtctatcgagccatcacagcgggtggaatcaatccaccactcttaaaccctaaaccgtggagacttattcatctttctccgcatgtaagtcttatggaatctagattctagtgacatatagattatctagaaattctggttcttagaaaaagctctctgaaaaaaattgttccaagcatgcggaagcctcgggctataacaaccttagcgaatcaaaaaatacattttcaaaactttcagaacctagatggtaccttcaaacaactttaagcattactaatatataaattttacttttatatttttagcttcttggaagttatttctggaattttttaaaaaccaattaatagctggactgtttattttagcttctcggcacatcaaaaatggaatatctgttagaagtcaactttctagtctttcaaaatccaactcaacagtccaaccgtttatttcagcttctagtttatcagcgcgcgcttaaaatcaacaaaatgtaaaacaagcaggccctaaaagcagcgcacgccaatagtaatttgtttcacatttcgttcggactctacaaacaattacaagtaacgtgataataatgaaatgatgggtacaattttcattggtgagaaaatggtctcaattcggaacaaactaatttatcgcctacactcttacacgagctagaattttttataagacaagtattcaaaatttgtgaataaatttagtacttacatctaatcaaaatcactcatctttattgttgggagctttctccttccaaaagtcttcaaaaacataattaatcaatgtttttagcataagtcattacaggaagcttcgtttttagaatgcaagcctctttctcatgatgaagacacgaaatgaagatcagatctaaaaaggataagaataaacgccgacctattaacagatggacaacttcggctcataacggagatgaagtataatgatgatgctgacccgaaagaggaaaaaactacttagtccttaatgatttgtattttgatcatatataaatattgaggacataaatatactttcacccgggttgcgtcccgtgcctttaaatagatgaacagtagcaccgtactgttcacgctgaatgataatcactctctcgcgtcttcaccttcgaacaagtcgaaagtatcaatgtaatatgaattctgttgatattcatacatgttttatagaatacgaacgtgaaggaattaatgagatgcaattactgtcttcatcctctcacattcatatttacatactaaatgttaaaggtctgtccttcttgaccttcgtctgatgatcattatacccatggggagataatgcttcggaaggcgaaggtccctaataattaacaattgtgtttcctttttttgattcaaagtatttgagaacgagtgaccaacattggcgcccacctccggtgaactcacttccaccaccttcggcaaaagtttgccttcgtcatgtcgccgaagaagacaatagcgccaggggctgctctgcagccactggat

SEQ ID NO: 29835 - DNA, 690 bp, Zea Mays
aagaactccatctcccgtcaaaataggccacctttccccttccctctgtcacggcatcggcgataaccctctctcccttccgtcgccgtggatttcaacgtttgccgccaccaccgacgacggaaacgacaatgtctcccactcccctttgcagggatgtcgaagagcactgaaatcgccgacaaggcaaccatcttgatgcaggatcatgccaagcatatctttcgtatttgcaaggagaagttaccctttggtaaggggttgactacaattgaggttaaggaacttcgggaagcacttgaattcgctgccaaaggattggaccaggactccctttttgccaagaggatttggatgctactgttaaggaggaatatttggagcacgacgagatggtggctttagagaggattgaaagcccactaccttctcctagttcagactgcttcctatcccttgaagagcacattgagaagtttgggcgtcgattacaactcagaccagatgcctagctactccgactaggttgtagtccatgatatttgggacaatgtgaacgagatatatggtgtaatggtttgtgtcaatgtgaactgaatgtatgatgtaatggtatgtctttttagtctatgtaaactgaacctaatggtttgtgagactttcagtctgattatggtatgcaaatttcag

SEQ ID NO: 29836 - DNA, 1280 bp, Zea Mays
ccactctatactacctagaagaatggattttatggcattaagataaaaagcaaagtccatggcaggccagtcctcaagcctccacctcgacctacggcctgctgctgtctgttgggccgaacgggaggcacgaggcggagagcggagaggcgttccgttccatccaagctgatggcaacgagttctccagggcggcggcgcacgggcacctcctgcctaccagaaggcctccgcaccgagctcttctcatcgccaccatcaccagaaggcttccgcccctctctccagtgtctctttctctctccatcgcatggctctcgcgtgcgccactcacgcgcgccgcttcctcctcgctggcccggcgagatctttccacgcccagccctaccaggccaaggtcggcgtggtggagttcttgaacggcgtcgggaagggggtggaagcgcacgccgcgaagctggaggaggctgtgggcggcgacatgcagaggctcctcgaggcccgcacgctgcggctcaagaagcttggcatcccctgcaagcataggaagttgattttgagttttgctcacaagtaccgtcttggtctctggaagcctcaagcagaacccaggaaagttgaataaaattggtttgttcttgaaagctagtctactgttggactgaggcttgtttgggacattttgaatatttccttttgtaatttaggagccacaaatctttgttctctgtctctggccatacttatttgcatccattgtgcaattttttctagaaaatttccaacttcgcgtggaataacaaaccgcaacagacgcaacaaagtgaacactcgagcttggaagtttgtcctggttccagtgcggaaggacaagaaggtcatgtaacagacggctgtaaaacgaaaaatgcagtgcccgtttcattttaaatatgcatcacaagttgccttgtttttcagtgagaatatcttcagtgtaccatggtaaataggggttttacattgtagatgacattatttgcactttgcagtgtttgtagagtgaagattaaggtagtgtttggttgaagagctaagtagaacggaaccgttctgtcccagttttgttgttgtttggttacaaagtaactagaacggaatgactctaattagagaatattctcctcagatccggaaccattccgctccaaaaaatcaatgggacggagccgttccgttccaatcccgctctcacagtcacgctccgttccattcactctgcaaccaaacaaaaaacagaa

SEQ ID NO: 29837 - DNA, 3498 bp, Zea Mays
agtccatggcaggccagtcctcaagcctccacctcgacctacggcctgctgctgtctgttgggccgaacgggaggcacgaggcggagagcggagaggcgttccgttccatccaagctgatggcaacgagttctccagggcggcggcgcacgggcacctcctgcctaccagaaggcctccgcaccgagctcttctcatcgccaccatcaccagaaggcttccgcccctctctccagtgtctctttctctctccatcgcatggctctcgcgtgcgccactcacgcgcgccgcttcctcctcgctggcccggcgagatctttccacgcccagccctaccaggccaaggtcggcgtggtggagttcttgaacggcgtcgggaagggggtggaagcgcacgccgcgaagctggaggaggctgtgggcggcgacatgcagaggctcctcgaggcccgcacgctgcggctcaagaagcttggcatcccctgcaagcatgtaatgccctgatttctcttcatttggtacctgtagtccaactgcggcgactcccgcgtcgtgctcgtatgcgtggatgaggataaggcaggggcaagggcaaatggtctccctgtctcttctatttattttttgattttattaatcgaagaaatggcattataacgtttgtgtcaagtttgataatggtatttaggtgaagcccatccgatcgatggcaaagtagcgaatcccgtttttcataatggcagaattccaaatttctcatttttttgtcaaaggctttgctgctgttgtacatttattaggttgttgcatccactctgagttagtagattctcctcaattgttagtgaggagagccggagaggtgctgcattattttttcgttgctgacatacaaattatttctcgccatatagctaggttgcctaacatgtaggcaatttgcacgtctatagttgaacttgacatgcttttaggacaaattagtcaagtctaatatctagtgactgttttgttccaatggtatccttaggttgtattaaatcctatatctagcgagcagccatgatatctgaaaaactctgatgaaaaaactaagttaatgggatattttgcttctgactgatattttgtccgattggggttaaaaatactaaaactatagaccataattttaattgcatcctatcactttacaagttcaaggggccaacgaggttacaatattaatattggtctcctaacataatctaaactttattaaatacttaatgctgaatgaaaaatgtgataagttattgacattcgttaacgctatgagcaattcttttttgtctttaaattctccagttattttctcgaatattatttttttgctatgatatcttgagagtgcacaggacccaaatttatattcaatatgattgtaaggaatatatggatgccaataatgtgctgtaacgttgcgctgctagcctgctactttgagatgaacttccgctcatgtgtatgttcatgagttcatgaccatgaccaatctgggttttcataatgatgtttttgaagcacatgaaagtcaataacaccagtgtctaagaaatttccatgcatttttgtttcaggcactaggaacttaaacttgaattgaaatccacatcacggcatgaatgttttagaattgaaacactgaggtctaaataacatgctagccattttcattgtttttttctaactccaaggcaataagatgattgctttagtcatttcaattctagcataatgaaatacgtgtggtattccttggattattttggatgtttccaaggaaatgactatctgtactctaaagaaaggaaatgcattactttataattttgtccatgaaatttaacacctccttactgacattgccatcatttgtgagatattttcagttctgaagtaatgtgctgagcaatgtttggagcagtagcttctacagttacatgtgtacctactgaagtttcaaatttactgcacatatttagattgcgttgtttgggccctcaacatttcaattggttttggattgattggtttaggaagacatgttttaccttctaacaaaactatatatatatatatatatcttacttactgaaagtttttaggtttgccacatactgttttttaaatctaaaaatgatactattaagtcttcatctcactgggatattgtttttcatgtatattttttgtatctttaaaaaccagatagaaatgggttagaacaccttattttactacttgtaaaaacacatggtaaacagttggccacctaatgtttagccattattcgggttaaatggttgattaaatgggttaaacagtaaattaaacaggataaatggatgattaaacagaaatggtgtaccatcatgtagcgttagtatagtgttttaagagactagaccatttagactaacaataggaaaaacaggcttttaatgtcaatgtttcttcctatctatgtttaaccaaatcttgttttacttggaccctaggttaaagcaaaatccatttaacatgttgctatgtgctaatttctgtttgcaacatttactggtggattaagacatgttggatctttattgcaaacattggttcttgatttaaatattgtttaccgtttagttatgtaaatattgttttataaagcatcaatgttaagattgagaacgagcatctttactaatctaaattattaattattcccctacaatgcagaggaagttgattttgagttttgctcacaagtaccgtcttggtctctggaagcctcaagcagaacccaggaaagttgaataaaattggtttgttcttgaaagctagtctactgttggactgaggcttgtttgggacattttgaatatttccttttgtaatttaggagccacaaatctttgttctctgtctctggccatacttatttgcatccattgtgcaattttttctagaaaatttccaacttcgcgtggaataacaaaccgcaacagacgcaacaaagtgaacactcgagcttggaagtttgtcctggttccagtgcggaaggacaagaaggtcatgtaacagacggctgtaaaacgaaaaatgcagtgcccgtttcattttaaatatgcatcacaagttgccttgtttttcagtgagaatatcttcagtgtaccatggtaaataggggttttacattgtagatgacattatttgcactttgcagtgtttgtagagtgaagattaaggtagtgtttggttgaagagctaagtagaacggaaccgttctgtcccagttttgttgttgtttggttacaaagtaactagaacggaatgactctaattagagaatattctcctcagatccggaaccattccgctccaaaaaatcaatgggacggagccgttccgttccaatcccgctctcacagtcacgctccgttccattcactctgcaaccaaacaaaaaacagaa

SEQ ID NO: 29838 - DNA, 787 bp, Zea Mays
gaagggggttaacagggaggtacgcaacaagacaatagagctgattcagaattgggttcagattctgttcaagtaactgaagaagatctgtcttccttgttgtgtttatatttgagtgaaggggtagagataaggattaaatgcacagcttagaagtttggggctcactctgtactgaagaatatccagttttggactgtttgaaggcagtgaacagggagactttatctgttagccttggatggattgagctgggcagcaaagtaactctagtggctaccccattagaaatatcaagtcttggacatctttgtgcttagccacaagtggtgttctcagccacacgcctgcctgtctgtgttcactgaataaggttgatattttgggctgttagagcatatccacaagggatatttgtgtgctagctgtccagattcagtgtctatattgtgcctgtcagtttgtgagtatttgatgcatgaaagccacgtattggagcccaggttgtgctggcatctctgggaactcttcacctccatgcactgcacaggtttagtgacatctgtccttcatctgtggctataaaacttggtccagggaagttttcctccctatcctcaagctccagccaggttgcagcgtgtgtgagggtggtaaatcttctgtccacaccagtgttcacctctccccttcccaagtttgcccagtccctaggtggtgaccatcgtcagtagttagtccacctcgccgtgaccagaactcccagcacaaggactgaagattcaag

SEQ ID NO: 29839 - DNA, 3045 bp, Zea Mays
ttgaggtgttacaaagggaaagtaggaggctcgcccgtgcgatcactctagttggcacaagggcatgcgggacagaaggcaaagatcatggaacgtgccttcctcacctccctgagaaccctttaccacgactctgacgagtcggtctcttctttgagcgacaaggagctcgagaggtgtgttgaggacaagcgcaatagactctgcttcatcatcgacaccgctagaggcctttgtaccatgtcccttgcagatgatgcggtgggcggcgacggccaggatctcaatgacgactctgcttctaaggatggaagcttggaaaacacgtggctcatggattccgattgttcgcgccacatgatcgagagctccaaatggttttccaacctcgaccccatgattggtaaggaatacgtcacattcgggcataagtcgaggggtaagtgaaaggtgccatagggccatttctacatgttttggtgattaaatgctcaacacgcaatcttggactaactacatccatatgagtatgagcataggttcatcaaaggcgaagtgaagagatcaagtccaaatgagccaaatggaaggccaaaagtgcaactttgtgtaaaactacaaaaacatgaggtttaagtatttgaataagttgcacatacattataccatgtttcttgcaccttggtttggctactaactcatttatgcaagaaaagtgacttttggacttagttttgggcatattgcaagtcctggtgaatctgagaagaaaatgtatgtttcctacacttagtcaattggattaagtgctaattatgttatataaatcgtagggaagctatccaagaaagccaaaagaagttggaggaatttggctaaggaaagccaaatctgggcaagtctcggactcactggacgatccgatggtgcatcggacagaccggttgcccgaacgaacaaagtcttcagtctcaggaattttactaaaaaatcaccgaacggttcggtgtgcaccgtacagcccctccaatggctagtatgacattcgcccaacacttcaacgactagattgggtcactagacagtccggtgccgtcactagacagtatggtgcccctagaaaaggaagggcgccaatcaagctaatctgtcgaacgttattattctctatctagtggctcacaagacagtccattgcgctcggagacaggaaggttttggatcttccaaatggaaaagcaatgactcctaggccccttagggctataaaagggactccttggtgccttcaacggggccccaagcatctcaagagcacaccaacacttcaaaactctgcgaccatgtattctagtgattttagtgagatctgagctccattttttgtttgtaattgtgatactgtgttcttacgctcatttcattagatttcttgtgtgtgttgctgcattgtgcttttgtgtgtgtattctgtatccctcccttactctatgttttgattgtgatcatattgtaaggctgtgagagactccaagttgtggaggttccttagaaatgggaatactgatataaggaagaaactgtgacactcaagtttgatctttggatcacttgagaggggttgattgcaactcttttccaaaggaggacaccacaatgtggagataggctttggacgaaccacaggataaaatcgttgtgcctcatgtctcttttatgttattgtgattttccttcttcctaagttctctattctcacttatggtattgctctaagtttaattcatatcttgatagagcaatcaagtgaagtgaacctctctctctctctttttctcctttcagacttggtttaatttgcactaactctaacttttagaccatgtttgtgttgtttttagctattttttcaggatcacctattcactcccacccctctaagtgctctcaattggcattagagccggtctctttcgttgggtctaacaacccaaagagatggctagcgacgatgctaaagggaagggcaaggtgaccggtgagaaggagacgatcaacaacgagcccaagggagacaagcccattgacttgggttcgaacaacaagaagaaggatatgaagaagaagaagtgcatgaagaagatcgtctactacgacagcgatgcttcttcatcttcaccaaaggacgatgatgactcctcttcttcaaagaaaaaagacggtcaaacaaactatactagaacgtcttttaattactctcgcattccttacaatgccaatgctcatttattatctattcctcatggcaagcttcctcactttgatggggaggatcattcttggtggagtcacaaaatgcgtagtcatttattttctcttcatcctagcatttgggacatagtagaaaatggaatgcatatttttgatagtgatgatgagaattgcaatgttatttatatgcaagaaatgattcacaaaaatgcccaagttactactgtgttgttaacttctctatacagggaggaatataacaaagtgagtggtcttgacaatgctaaatagatttggacactctcaagatcgttcacgagggcaatgatatgacgacgatcaccaagatgtagctcattgaaggtgaatttggaaggttctccatgaagagaggtgaagagccaactaagacgtataataggatcaagacccttctaaaccaaatccgcaactatggaagtacaagatggatggatcacaacattgtgcgcctaatgctatgttcatttaccgttcttgatcctaacattgtaaatttgatccgtgagaatcccaggtacaccaagatgacgcccgaggaaatccttgaaaattttgtgagcggacgcatgatggttgtaacacccgaaatcctattttgagattttaaaagtttctccaaaagattggagataaaatgacttctaaaataaattaattcctttgaaaaatatgtgtctccaaagtaaatagataataacagtaagagattagtattcaaaagacaaaacttag

SEQ ID NO: 29840 - DNA, 1688 bp, Zea Mays
gtcagcgtcgtcctcttcatggcttccaaacaactctagctcttaaccgtcgtagagtttgttgcgatccatgtcatggttgttgggatcctggcaatccctcaaaccatgtcgcacccgagtatttaggctgggcgcttgggcccttgcgcttataatttgttatctggagcccttatcaccggagagagagagagatctggtgaggaagccgtcgccaacgaaccgcgagcagcagtgctaaatggacctcggcatggggtcgaggagggtctcctatgctcgtggatcgcgtgcaagctagtatgtgggcgcaatgttcctcggagtattcagaattgctaaccgaagcaaggccgccgccatggtgccgctgctcaacggaggcaggtagcgaccactaccacataaacccccgctaagcgctggggcaagtgtctccggtgagctgtgccaccacgaggcttctgctctgccgcctggcgacgccggagaaaggtgacgggcttggaccggttgatcccaaagagatggataggattagaatgcaaggtagcagttcggtgatggaatcaggagcgttggatcaaaatgtcgtggccctaattaaatttggcataccccttcacggagtttgatttgggccataggatcggtgatggagggcgtaggttagtgcaagatgtggctgcctctcgaccgttgatctgagatttggcggttgaagttacgtaccagttcataaaaagcactaatctaatctaggccatctatcaaagactaaactattgtgatcgactgataccccttcgccgggagcattttgcataggatacttacaaaatcaacccaccatccatttgtcaattaaagtgaatgaaaacaaatcgggattttgcggtttagcctatagaagttaattttaggcataaaatcaataccaaataaactagaaacttgtataatctatatcttacatattttaactttgatttaatccgttcaagttgccttagcttcataaaaaaaattatctatgcaataacaacactatttgtatcatatcacatacgtgtataattagatatttttaacctatgtttagttgattaatcttacaaaacaaagttaatatgtctatagtaataagcggactaaaatataaacctctaatcaagttataaattatattaccatgaattagttatcatatgggttggggtcttcttctccgctgaaggtcctcaagacgaagatatcgtttgtaaagtgatgttgaggatcttcttccccgccgaaggtcctcgagacgaagacattgtctgaaagcgataacgatgaatgccgaagctacagccgaaggacgacagcttcagcttaaggtggcgacgaaggtcaagcatgatgccgagccgaagaggaaaagactagttaatctctgatgatttatgttacgattatgagtacatgttaaggtcataaatgtatttttactcggactgcgtcctgtgccaataaatagttgaacagtacccccgtactgttcacgctggattgtaattgctgtcgcatcaacaccttcaaacaaaccgaaggtattaatgtaatataaattttattaatgttcatatgtttatcatgaaataaatgtatggatggatgaatgaatagcatatattgtctctatg

SEQ ID NO: 29841 - DNA, 2550 bp, Zea Mays
gataaatatctcggccgaattggtccccagcaaaacgcgcctcgtccctcaggcctcagtgtccgcgcattttacaacacggccacaccaacgccacgacatggacgccgccgccgccgcctcactgttgccccgcgccgccgcctcctcactgttgccccgacgcgttctctctcctctccatgtttcccgaagcggcctccttccccgtcaaagctccttcctcgctgctcgctgtgcccactcccgtgcccctcctccacatccgcctctgccgcgcgccgactgcgatgatgctgccgccaaggcgcacccgcgcctccgtctccgcctgcttgcggaggagttccgcgcactcccatctgacgcagatcgcgcgcgccggctcctctcactcgcggccgcgctgccgcggctcccggagcccgaccgcgcccagggcaaccgcgtcatgggctgcgtcgcgcgggtgtggctcgtcgctcgctgcaacgcgtcaacgggctggcggatgtggttctcggcggactccgactctgacctctcgcgtgggtactgcgcctgcctcgtcgccgcgctggacggggccaaacctgaggacgtcctcgccgtcgaccccgccgatcccgacctcgcgccgctcggggcggggacaacggcggcctggtcgcgggccagcacgtggcataatgtgcttgtcggcatgcagaagcgggcgcgcacggccatcgcggcgcgcgagggtaggcaccccgggaagccgtttccgtcgctcgtcatcgcgcgcgacggcgccgtcagcgcgcagggcagctatgccgaggcccaggcgatgtttttatcccctgatgagtccaaggtttcaggccttgtgaatacccttaaagagaaaaaaatcgggattgttgcacacttttatatggatcctgaggtgcaaggcatactgactgctgcaaagaagcagtggccccacatccaaatatctgattccttgattatggcagatagcgctgttaaaatggctgaagcaggatgtgactatattacagttttaggtgttgacttcatgtcagaaaatgttcgggcagtacttgatcaagcaggatttaataaggttgtcgtttatagaatgtccagtgaaccgattggttgttcattagcagatgctgcttcaagttgtgaatatactcattttttgagggaagcttcgagatgttatccatctttgcatgttatttacattaatacttcgctggaaacaaaagctcatgctcatgaacttgttcctacaataacttgcacctcttctaatgttgttccaactatactacaggcattttcccaaataccaaatgttaatgtctggtatggtcctgattcatatatgggtgcaaacatagcagatttatttcagagaatggctacaatgtcagatgaagaaattgcaaaaattcatccagaccacaacagaaaatctttgagttcattactgccacgtctacactattatcagagtggtaactgtatggtacatgacatgtttggccatgaggttgtggagaaaataaaggaacaatattgtgatgcatttctaacagcacactttgaggtccctggagaaatgttctctttggcaatggaagcaaaacaaagaggaatgggagttgttggatccactcagaatatcttggatttcattaaggatcatgtgatgggagctctggacaaaaatgtagatgaacaccttcagtttgtgttaggaacagaatcagggatgatcacttcaattgttgctgctgttcaggaattacttcatttttattcttctcaagagagagcaaacatcaaagtagaaattgtgtttccggtatcttcggatgcaatttctaagacatcgaatggttctcatcatgttggttcttcaatggctactgatttggataatcttactattgttcctggtgtgagttctggcgaaggctgctccattcatggtggttgtgcctcgtgtccctacatgaagatgaataccctggggtcgctaattaaaatttgccatcagcttcctgataaaaacaacaaattatctgtataccaagctaacagaattaatgtcaggacacctctcggaaaatcagttgcagaggttgggtgtgagcctattctgcatatgcggcatttccagaaaacaaggaggttacccaacaagcttgttcaccaggttgtccatggtaatggtgacaaacccttgcaatagctgttcatcaatacttgtatttattttatcaaggcggctggatgatggagtatatctcaagtgaatgccatgtttagctggcataccgaagaaatctccgggacaagattatttgccctgtacggttgcgcttggtgcaacccatgctcaggcgatgaaggagttgctgatgtcgatccccaagagattcaagacttcatcgagtttgaagattaagctagtgacctcccctagtaagctgctcgtggagggtttatttgcgttggctacgtttctactatatgtactttgat

SEQ ID NO: 29842 - DNA, 2166 bp, Zea Mays
gccacaccaacgccacgacatggacgccgccgccgccgcctcactgttgccccgcgccgccgcctcctcactgttgccccgacgcgttctctctcctctccatgtttcccgaagcggcctccttccccgtcaaagctccttcctcgctgctcgctgtgcccactcccgtgcccctcctccacatccgcctctgccgcgcgccgactgcgatgatgctgccgccaaggcgcacccgcgcctccgtctccgcctgcttgcggaggagttccgcgcactcccatctgacgcagatcgcgcgcgccggctcctctcactcgcggccgcgctgccgcggctcccggagcccgaccgcgcccagggcaaccgcgtcatgggctgcgtcgcgcgggtgtggctcgtcgctcgctgcaacgcgtcaacgggctggcggatgtggttctcggcggactccgactctgacctctcgcgtgggtactgcgcctgcctcgtcgccgcgctggacggggccaaacctgaggacgtcctcgccgtcgaccccgccgatcccgacctcgcgccgctcggggcggggacaacggcggcctggtcgcgggccagcacgtggcataatgtgcttgtcggcatgcagaagcgggcgcgcacggccatcgcggcgcgcgagggtaggcaccccgggaagccgtttccgtcgctcgtcatcgcgcgcgacggcgccgtcagcgcgcagggcagctatgccgaggcccaggttgtcgtttatagaatgtccagtgaaccgattggttgttcattagcagatgctgcttcaagttgtgaatatactcattttttgagggaagcttcgagatgttatccatctttgcatgttatttacattaatacttcgctggaaacaaaagctcatgctcatgaacttgttcctacaataacttgcacctcttctaatgttgttccaactatactacaggcattttcccaaataccaaatgttaatgtctggtatggtcctgattcatatatgggtgcaaacatagcagatttatttcagagaatggctacaatgtcagatgaagaaattgcaaaaattcatccagaccacaacagaaaatctttgagttcattactgccacgtctacactattatcagagtggtaactgtatggtacatgacatgtttggccatgaggttgtggagaaaataaaggaacaatattgtgatgcatttctaacagcacactttgaggtccctggagaaatgttctctttggcaatggaagcaaaacaaagaggaatgggagttgttggatccactcagaatatcttggatttcattaaggatcatgtgatgggagctctggacaaaaatgtagatgaacaccttcagtttgtgttaggaacagaatcagggatgatcacttcaattgttgctgctgttcaggaattacttcatttttattcttctcaagagagagcaaacatcaaagtagaaattgtgtttccggtatcttcggatgcaatttctaagacatcgaatggttctcatcatgttggttcttcaatggctactgatttggataatcttactattgttcctggtgtgagttctggcgaaggctgctccattcatggtggttgtgcctcgtgtccctacatgaagatgaataccctggggtcgctaattaaaatttgccatcagcttcctgataaaaacaacaaattatctgtataccaagctaacagaattaatgtcaggacacctctcggaaaatcagttgcagaggttgggtgtgagcctattctgcatatgcggcatttccagaaaacaaggaggttacccaacaagcttgttcaccaggttgtccatggtaatggtgacaaacccttgcaatagctgttcatcaatacttgtatttattttatcaaggcggctggatgatggagtatatctcaagtgaatgccatgtttagctggcataccgaagaaatctccgggacaagattatttgccctgtacggtagacatctggacttgccctgtacgttagacatgttgacatctgcatgcgaattaatgttgaacaaatggggttggtctaattgtaaaaaataattattctgaataaatcttaattgctttgagcgaaactgataaatcttaaactgaat

SEQ ID NO: 29843 - DNA, 664 bp, Zea Mays
gattattaatgtcttatatgttttcttatcatgatatctatttatactttgttgcttcccccgtttatgcaattttcaaaggagatgctgttgaaattttatatatgaatattagatgtgtagtttagtagcattctggggtgtttgtggatcccggggtgttacacaaagtgaagaagaggttatgttcagatactatattattattacttgagtttttagtttacttcttgtgttcaatttactctttcgactttttcagactcatcaggttatggaagaagctaagaaagccgaggctgcagagctagaaaggcgcaaaacggaactttctccaccaccgaaaccatatgaccccgaagccgatccaacactaaaaggaattctcgatgaattcagggtggtgaacgtagcgatagacgaagctggtaatacattgttgaatgaagctgcagagaaagttctaaaggaggactaggattagtaggaaacttgttcttgactgtggtcttgagagacttgtaaaaacatttgaatatatgtttgctctgtataaaaacaaatacatgatttgtattatatatacacttagtatgtgtataatatttctttatggagtgtgaaattagtatacataccgttttgagccgaaggcgaaaaaaca

SEQ ID NO: 29844 - DNA, 587 bp, Zea Mays
ctaacatttcattaacatcctcagggcggcatgtcaaatgagatgtacagcaccattgccagagtgacagatggtatttatgaaggaattgcaattggaggggatgttttccctggatcaactctgtcagaccacattctgcgttttaataacataccacaggttaaaatgatggttgttcttggggagcttggtggaaaagatgagtattcactagtggaagcattgaaacaaggaaaggttgagaaaccagttgttgcatgggtcagtgggacatgtgcacgtctattcaaatcagaagtgcagtttggtcatgctggtgccaagagtggtggtgagttggaatcagcacaagctaagaatcaggcactaagggaagctggtgcagttgtgcctacatcatatgaagctctagagagtgcaattaaggaggttgaggaaggaaaaatttctcctgtgactgaaattacacctcctcccattcccgaggaccttaaaactgcaattaagagtgggaaggtccgagctcctacccacatcatttccaccatctccgatgacagaggttaggttgctggcggcatgtt

SEQ ID NO: 29845 - DNA, 2247 bp, Zea Mays
aatattatgtataaaaagtttggtgacaaataaaataaacttattaaactccctcacacattcccatacacacgtttccccataagcccacacaccatccagtgcagtccggcctcttctgtatttttataggagcagtaggcagtagatgctgcctcggctctgcgtgcgaaaacatgtaccggtcgagttcatggtgaccccaccccacagagaatcagagagataggatagcatagcagagcagggggcgcctttgcatcgcgaggtcactcctgtcccctcgcctccgtcccctccacgcagcagcagctacacctacacagctgtgtgtgtgtcggtcgccagaatcccagaaattagatagctggggttgggcgggcgacccgccgcgactgcagcgagaaccttggacatgagttgagaggccctatcttttcatgcccatgtccatctcgcgagtgatgagtgagaaaccgattgattgattgattgatgtgtgatgcctcactagctccttcgtggcaaatctcatcagcaacagagacggctggtgtgacagcttgtgaagaaaacgccggctcgctcgctcgctccgtctctctctctcctcctcgctgcatatctttcctttgccgcttgctgtctccctcgcctctctccagtcttcttcaccaccctgcttcctccctcttcctcttttgtttcatcagagagaaaaaaaactagatttagcgagggcggaccgacgacgcagtagaagcaaccgagacatggagcggcggaggaaggcaatgtggctgtaccccaaggtcgtcggcttcaacccgccggagaggtggggccactccgcctgcttcttcgaaggcttcgtctacgtcttcgggtttccggtgaagggtgcatcgcccggcgtcagagcaggtcatgcagctatgagtgttggatctaaggtatatattatcggaggcgttggcgacaagcactactacagcgatgtctgggttcttgatgtcacaaaccgctcgtggagccaacttgaggtgtgcgggcagcgaccgcaggggcggttttctcataccgcagtggccatgaatactgacatcgcaatctacggaggatgtggcgaagatgagcgtcccctgaatgagcttctcattctgcagttgggctctgagcatccaaacggccgctacaacatttccatgtgcaaggttcttagcaaccactggagccaggagaagaggaagtttctcagatcagaagctagagatgcaagtgtgagcaatggggagatggctcagaaaccccgagaagcagaaacggagcaaaggaacccgttcctgcgtggcctagagaatggccgcgtgaagcgaaggagaaccggtgaagctcgcccgaaggaggccgagtcagagcaagaggagcactcgctgtccctttcccaacattcctcgccgtcgcagtcggatcaggagcagaccggagctcacaagcttccggcctcggccaacacgtcgccttcagccctgcagccgttcgctcgtctcaacggcaatggcgctcagctgagggccgccggacccggaggcgtctcctcgaggcctctcaaggcggaccagcttctccgcaccatcgcgccacagcatcggcgggagattggcgcagaggttcatgggacagtcgatggagcctttgattctgggtacctcgtgaccgccgtcgtgaacgggcagctcttcagaggcgttctgtttgctccgggacctggggtcacagctccgaggccggcggtgcatcaccagatcctgacgagctccgccgtgcctccccagcaacggccgctgctggcgcacgccatccccgtccacgcccggccagtgccgctgccgcaggccacgggcttcgtgctgccggactgtgcccaccacgcgcggcaagggttcccggcgaaggccgtcaagtccgagccggagcgaggcagcagcgacctgcacgatgttgtgctcacgctgggagggcctggagggggcaagtgagcccccccatggaaggcctcaagaactgtcgaggtcctggcctgctgctgttggcctcttggattgctttgtaaattagtctggttgaggaaaaaaataagactagcagcttttctataatctttcccgggtgattttagggttctaatatgtgactttacatatataaatatagtgttagcttgatgcagctagttttgttctgagc

SEQ ID NO: 29846 - DNA, 2310 bp, Zea Mays
aatattatgtataaaaagtttggtgacaaataaaataaacttattaaactccctcacacattcccatacacacgtttccccataagcccacacaccatccagtgcagtccggcctcttctgtatttttataggagcagtaggcagtagatgctgcctcggctctgcgtgcgaaaacatgtaccggtcgagttcatggtgaccccaccccacagagaatcagagagataggatagcatagcagagcagggggcgcctttgcatcgcgaggtcactcctgtcccctcgcctccgtcccctccacgcagcagcagctacacctacacagctgtgtgtgtgtcggtcgccagaatcccagaaattagatagctggggttgggcgggcgacccgccgcgactgcagcgagaaccttggacatgagttgagaggccctatcttttcatgcccatgtccatctcgcgagtgatgagtgagaaaccgattgattgattgattgatgtgtgatgcctcactagctccttcgtggcaaatctcatcagcaacagagacggctggtgtgacagcttgtgaagaaaacgccggctcgctcgctcgctccgtctctctctctcctcctcgctgcatatctttcctttgccgcttgctgtctccctcgcctctctccagtcttcttcaccaccctgcttcctccctcttcctcttttgtttcatcagagagaaaaaaaactagatttagcgagggcggaccgacgacgcagtagaagcaaccgagacatggagcggcggaggaaggcaatgtggctgtaccccaaggtcgtcggcttcaacccgccggagaggtggggccactccgcctgcttcttcgaaggcttcgtctacgtcttcgggtttccggtgaagggtgcatcgcccggcgtcagagcaggtcatgcagctatgagtgttggatctaaggtatatattatcggaggcgttggcgacaagcactactacagcgatgtctgggttcttgatgtcacaaaccgctcgtggagccaacttgaggtgtgcgggcagcgaccgcaggggcggttttctcataccgcagtggccatgaatactgacatcgcaatctacggaggatgtggcgaagatgagcgtcccctgaatgagcttctcattctgcagttgggctctgagcatccaaacggccgctacaacatttccatgtgcaaggttcttagcaaccactggagccaggagaagaggaagtttctcagatcagaagctagagatgcaagtgtgagcaatggggagatggctcagaaaccccgagaagcagaaacggagcaaaggaacccgttcctgcgtggcctagagaatggccgcgtgaagcgaaggagaaccggtgaagctcgcccgaaggaggccgagtcagagcaagaggagcactcgctgtccctttcccaacattcctcgccgtcgcagtcggatcaggagcagaccggagctcacaagcttccggcctcggccaacacgtcgccttcagccctgcagccgttcgctcgtctcaacggcaatggcgctcagctgagggccgccggacccggaggcgtctcctcgaggcctctcaaggcggaccagcttctccgcaccatcgcgccacagcatcggcgggaggtgcagttcctttcctccgaccatcagccgcagccccgggggcctcccggcccaccacaccttattggcgcagaggttcatgggacagtcgatggagcctttgattctgggtacctcgtgaccgccgtcgtgaacgggcagctcttcagaggcgttctgtttgctccgggacctggggtcacagctccgaggccggcggtgcatcaccagatcctgacgagctccgccgtgcctccccagcaacggccgctgctggcgcacgccatccccgtccacgcccggccagtgccgctgccgcaggccacgggcttcgtgctgccggactgtgcccaccacgcgcggcaagggttcccggcgaaggccgtcaagtccgagccggagcgaggcagcagcgacctgcacgatgttgtgctcacgctgggagggcctggagggggcaagtgagcccccccatggaaggcctcaagaactgtcgaggtcctggcctgctgctgttggcctcttggattgctttgtaaattagtctggttgaggaaaaaaataagactagcagcttttctataatctttcccgggtgattttagggttctaatatgtgactttacatatataaatatagtgttagcttgatgcagctagttttgttctgagc

SEQ ID NO: 29847 - DNA, 2077 bp, Zea Mays
accccccccccccccctgtcgcggctgaatgattcagggcagagtctttcggaggaaaaagttgtatcttttccggtgttgttcttcatcctctgggtctgggagctgtattttgtcccgttgctcctcctcccactgatgcaggaagccaacaatcaaaatgttccgcagctttcaccaaaaggatgctgcggcggcctgcacttcggcgacgtgctgaagctgaacgtggagaccatggcgtggagccttgtggccacgacggggcagtgcccgggcacgcgggacagccacggcgccgcgctggtgggccaccggatgctcgtcttcgggggcaccaacggcggcaggaaggtgaacgacctgcacgtgctggacctgcgcaccggggagtggacgcgcccgcagtgcaagggcgcgccgccgccgtcgccgcgggagagccacaccgtcaccgtcgtcgggggcgaccgcctcgtcgtcttcggcggcagcggggagggcgagggcaactacctctgcgacgtgcacgtgctggacgtgcccaccatgacgtggtcctcgcccgaggtcaggggcggccacgcgcccgcgcccagggacagccacagcgccgtggccgtcggccgcaggctcttcgtcttcggcggggactgcggcgaccggtaccacggcgacgtggacgtgctcgacgtcgacaccatggcgtggtcaatgtttccggtgaagggtgcatcgcccggcgtcagagcaggtcatgcagctatgagtgttggatctaaggtatatattatcggaggcgttggcgacaagcactactacagcgatgtctgggttcttgatgtcacaaaccgctcgtggagccaacttgaggtgtgcgggcagcgaccgcaggggcggttttctcataccgcagtggccatgaatactgacatcgcaatctacggaggatgtggcgaagatgagcgtcccctgaatgagcttctcattctgcagttgggctctgagcatccaaacggccgctacaacatttccatgtgcaaggttcttagcaaccactggagccaggagaagaggaagtttctcagatcagaagctagagatgcaagtgtgagcaatggggagatggctcagaaaccccgagaagcagaaacggagcaaaggaacccgttcctgcgtggcctagagaatggccgcgtgaagcgaaggagaaccggtgaagctcgcccgaaggaggccgagtcagagcaagaggagcactcgctgtccctttcccaacattcctcgccgtcgcagtcggatcaggagcagaccggagctcacaagcttccggcctcggccaacacgtcgccttcagccctgcagccgttcgctcgtctcaacggcaatggcgctcagctgagggccgccggacccggaggcgtctcctcgaggcctctcaaggcggaccagcttctccgcaccatcgcgccacagcatcggcgggagattggcgcagaggttcatgggacagtcgatggagcctttgattctgggtacctcgtgaccgccgtcgtgaacgggcagctcttcagaggcgttctgtttgctccgggacctggggtcacagctccgaggccggcggtgcatcaccagatcctgacgagctccgccgtgcctccccagcaacggccgctgctggcgcacgccatccccgtccacgcccggccagtgccgctgccgcaggccacgggcttcgtgctgccggactgtgcccaccacgcgcggcaagggttcccggcgaaggccgtcaagtccgagccggagcgaggcagcagcgacctgcacgatgttgtgctcacgctgggagggcctggagggggcaagtgagcccccccatggaaggcctcaagaactgtcgaggtcctggcctgctgctgttggcctcttggattgctttgtaaattagtctggttgaggaaaaaaataagactagcagcttttctataatctttcccgggtgattttagggttctaatatgtgactttacatatataaatatagtgttagcttgatgcagctagttttgttctgagc

SEQ ID NO: 29848 - DNA, 923 bp, Zea Mays
cctacgccgatccacgccgacggtcgaccgacgtctgttgctcgcctgatcatctgatgacatgatgggctcctctgaggatgagcaatgctcaggggacactgatgtgccagacatggggcaagaacatagctctcacttaggtgaccacgagctcaaggagatgcttcttaagaagtacagtggatgcctcagccgtcttcgttcagagttcctgaagaagcggaagaaagggaagctaccgaaggatgctcggacggtgttactagagtggtggaacacgcactaccgctggccttatcctacggaggaagacaaggtgaggctcgcagcaatgaccggtctcgacccgaagcagatcaacaactggttcatcaaccagaggaagaggcattggaagccatctgaggacatgcggttcgcgctcatggagggtgttgccggtgggtcttctgggacgacactctacttcgatacaggcacaattggaccctgaatcatacaccacttgggatgacaactggccagctcatattagtaataagatctggcatgtggagtgacgatctgctcggtgaaaattgaaaataaatctgctgagctgaggttgatcagactagtcagttgccctattattttacaagatcatgtgtatatggtgccgtcgtatcagaacaaactgtatgcatgtatgggcgaattgagacctgcaaaaggagtttaattagtagtttcaagtattggctcatggatttgtaatactcgctacccaatttaattgttagataggctgaagggcttataaaggtaaatttacttctgctcttccattattgtgtttctgttctgatcacatttgatttttttttaattttcgttatgtcctcccgatgtttagcgattatcaaacaaagtggttcgtt

SEQ ID NO: 29849 - DNA, 4487 bp, Zea Mays
ggggaccccctcaatctagaggaactttggaagaaatatataacatgtagggcctgtttggttcgctacctaacttgccacactttgcctaacttttctgcctaaggttagttcttcaattcgaacgactaaccttaggcaaagtgtggcgcagttagccacgaaccaaacaggcccgtaaaccttcatctctttctctctctacctctagagaagtttccaacaatgatttgtgttgaatagaggaattcaaacagatgtccgtcctgatgcttgattttctccaaaattcatatggattcattcataggaaaccatgggagttccatagggttccaagttgcaatcctttgttccaaaggggcatacatggatttttcttattgcggcaaatccctacaaaatggtttgcattaagggaagaatggtttgcaataagattattatgtttcagattggtttttattcaaacttcctagtgtgtgtgttttctagaatactcttccatcatctagaaaactatattgaaaaagtgtaggcagacgagttatgactggaagattacctgggggtcttggttcgtaggaaattaggaaatatggttgacgtttgtgtgatatgaactcagatggtgacttttgggtgcttgagtaatactccctctgttcacaaatatatgacgtcgttgactttttttcaaaactttgaccactcgcttattcaaaatatttattagaaaatgtcaaatttcaagtcacgctcaaacgatgttaagtgataaaataaatcacaacaaaataaatgacaactcacttttttttgaaagatgagtggtcaaagttttagaaaaaaaatcaacggcgtaatatatttgtgaacagaggtagtaaatagtttatatttctcccacttctatcaaataagcatgtttaacttttaccagttatgtccatttttaattgtgattcttgatctgcgcttcgggaaaataagctccagaaatgctaccatcctatttggtcatgccatataataacaataataataacttttatgttattaacaaaaggttaggaccatagggaatattgttctttttgaaaaaaatactaaatattggatttctagataactagtttatttattctagttgagtgggatgcaaagaaaaataaacactgaatgatgaaaatgcatttttttggtggggcagggaaaaagttatttgcattttttgtgctatggtggatcatgtaatgaagtactcaaagtagatctggtaatcgcacaatcagatctgcaagaacttctataattctcctaattgaataagtgcttgatgtttgaaaaaggtcttcccatatttttctttagaagcaagattcgctcttgggatagtgagaacttcgagttggaccattggtggtccaaagttggtattagggcatgtttggatacaaaagtcaattactaagtagctaaaaaatatccctagtgcatccaaacaagagggctactagatggactgtttttagccaagtctccaactacgcagccaaaatcaactagctaaccaaactcgactaatttgagctaattttagcctaaataataacccctagctcatccaaataggccattggtatgtgatagtttgagattaggatgacaaattatgttacatttgttttattcctaccataatatgcatataactatagttctacatattcttatttcagtcattttcagactctaataacttttaaatatggtaagaataattagatcagatcttgctaacgcaagatatttgttgaaaaactgttttgctatccagattggcagttagtttgtgcaggaccatgcgatagtaaccaggttcctggatcgataggattgaggaacgggaatgtggtacatggtacgctactaaaactaggttttaacactacgggaatgagattgttcccacgtccccggaactgaacaaacgttcccggaacgaggaacgtggccacgttcccggttaccatgggcggacccacaggggggtccgggtgggccctggcacaccctaagccaggcccatcggagaccccacacgttcatcccgtttggccaacgcccgacggctgttccaactttcatctctgaatctcctatccttcggcttcccacaaccacaagacgatcgctcctcctgcgcaagacggctgttcctggggctggcttcctgcgcggctgaccggctgttcctggcttccagctctcgtctcgtctcgccaaatccggtcagacaactgatctttatctatggattttgcgaagtaattttgtctgttactctcgacacctccgctgacgggcaaccgccgaccgccattcatccgttgtgcccattggctttagccaggctccccggtccccgctttcggccttgctgttcaacttgaacgacgccacagccggccagataatatatatttttgttgaattttgtctaatgcaaattggtattgcttttgccggtggcgacaacaagtgttgaatgggcattttctacaatgagtttggtaaatactaaattgagaaacaagatgtgtggtacttttttggatgattgtcttgttacatacatcgaaagagatattttcttcgaagtgaatgaagaagatataattgaaacttttatggtgttgaggaagcacagaccagataagtagtattattacaatctttatgttttatgtatgcaattttcatgcttatttgttgagtgtcaaactttatatctatatatcaaattgtttacccaatttactataaaattatatatacattagatagaattctacatgaaaattttgttacggcacaccctatgtaaaaatcctaggtccgccactgccggttactaaggtggaactgtataaatggatttactatctttttctaacgacttaagcttttggttctcaaccagtaacatggaccactccactcattggtaacatgaaccgacgataatgatggactatcaccaacggttattgttaccaaccattggtgataattgcccccattttcatcaatggttcgtaacatgaaccggcggtgatgagcataaccaatgacttggagcaaaccggcagtgatgatgagctatgtagttgtgtacgccataaagaatatcacacatgaattactgaaatgtcaaagatgactttaagggagacattgatttaaaaagaaaatcatttctgaaggtactgattgttgatttgctaatctacatgtcatgatatgtcatgtttatttctagttttctttctttttggcctccaatcatgtttcagagattaggaaactatatgttgactcgtgctatttgtcgtggatttacatcaactgatggatatgatgcccgtccatattttcatatacaatggtgcatgaacaagtaccattagtgttgtaactccaaaaaattataggttgggtaagcaaatgattttcatgttacaaaatgtaactaatcattattacatgggagcatcgttaagatgtgttcgtttcagttcctttctactcggcctgtctgcaaaacatactttcagatgacatgatgggctcctctgaggatgagcaatgctcaggggacactgatgtgccagacatggggcaagaacatagctctcacttaggtgaccacgagctcaaggagatgcttcttaagaagtacagtggatgcctcagccgtcttcgttcagagttcctgaagaagcggaagaaagggaagctaccgaaggatgctcggacggtgttactagagtggtggaacacgcactaccgctggccttatcctacggaggaagacaaggtgaggctcgcagcaatgaccggtctcgacccgaagcagatcaacaactggttcatcaaccagaggaagaggcattggaagccatctgaggacatgcggttcgcgctcatggagggtgttgccggtgggtcttctgggacgacactctacttcgatacaggcacaattggaccctgaatcatacaccacttgggatgacaactggccagctcatattagtaataagatctggcatgtggagtgacgatctgctcggtgaaaattgaaaataaatctgctgagctgaggttgatcagactagtcagttgccctattattttacaagatcatgtgtatatggtgccgtcgtatcagaacaaactgtatgcatgtatgggcgaattgagacctgcaaaaggagtttaattagtagtttcaagtattggctcatggatttgtaatactcgctacccaatttaattgttagataggctgaagggcttataaaggtaaatttacttctgctcttccattattgtgtttctgttctgatcacatttgatttttttttaattttcgttatgtcctcccgatgtttagcgattatcaaacaaagtggttcgtt

SEQ ID NO: 29850 - DNA, 642 bp, Zea Mays
ctagagaccgccaatttgcttccctccccgccgcgctactgtacatactctgcaagccaccgcagtccgcagcgcgccaccgcctggggcacgccacggtgccacggacggtgtcgccgtgctcgaacccgcgtcacggaatagcagcgtcctcacggctcacgctcccggacttcactcgcccgttctccgtgatatcgcgatctgatctcgcccagcgcagcagccagatccgccccatccagccaccagtttcgcggcggagggtggaggtggaggatgtcggcgacggtggaggagcagatggtggtgaaggcgatccgggaggagtgcccctgggagtcgctccccaagcgcctccagtccacgctccagaccaaggacgagtggcaccgcagcattgttggccacacgggtatgcttgtggtgcactctcactgccggccacggtcacgttgctttaccagtatctgccacctgaaagtatccagatatatcatggagaacactgtcaaatttacaacagaccaggtggtagatctctgatgagcaacatgcttgtctatttggtgggagatctccaatgtgccaccggactggccgtggcagggctgcagggtagagattggggcacaatgagcc

SEQ ID NO: 29851 - DNA, 466 bp, Zea Mays
catactctgcaagccaccgcagtccgcagcgcgccaccgcctggggcacgccacggtgccacggacggtgtcgccgtgctcgaacccgcgtcacggaatagcagcgtcctcacggctcacgctcccggacttcactcgcccgttctccgtgatatcgcgatctgatctcgcccagcgcagcagccagatccgccccatccagccaccagtttcgcggcggagggtggaggtggaggatgtcggcgacggtggaggagcagatggtggtgaaggcgatccgggaggagtgcccctgggagtcgctccccaagcgcctccagtccacgctccagaccaaggacgagtggcaccgcaggtggtagatctctgatgagcaacatgcttgtctatttggtgggagatctccaatgtgccaccggactggccgtggcagggctgcagggtagagattggggcacaatgagcc

SEQ ID NO: 29852 - DNA, 3478 bp, Zea Mays
tgcgggatctgcccagttatcgtttttattgaggtttctgtagttacctctgcaatgggtttacttattcacatagcttttctcatctgtttgaattgtttattcaaaagctttcaagattccaacatcatatacattggtttgcagttatacccataccaccttgcagactatatatgccgagtgctgaggatctcgcctttcagatattattgtgacatcctttttgaaactatgaagaatgaacaaccatatgatagtattccgaacttcactgctgctgatgcactaaggctcactggtgttgggagaaacgagtttattgatattatgaacaaatgcagatcaaagaaactaatgtggaaactgaataaatcgattgcaaaagaaatgctgcctacacagcctgttgacttcccagttgagccttggtggggggtttgtcttgttaactttacactggaagagttcaagaaactttcagaagaagagacaacaacaatagacaaaatatgtaaagaggaagccaattcatatgttctttttgatccgaaggttatagatggactttataaaagagggctagtgtacttcgatgtgcctgtttacccagatgaccgcttcaaagtttctaggcttgaaaattttgtttccaataaggatcaatcatatgaagacccaattgaagagctgttgtatgctgtatttgttgtttcaagtgctaatgctactgttgctgaactggctgcaactttacaagctgacctttatcaactccaggcagctgcatcatttgcttgccgattgggctgggctgcgaaagtcatggatgcgaactctgttcttaatgaagaacgtttacctgcgtttcctagtagtattcttagtgatgatgaagaaggttcaaatacaagtatccactcagagaagtctggtcaacaattgaatggcatggattctgatggacccaggaaaatttctggaactgctcatgtgggctttgttgttgatgccaatgttacatcatacttgatgatgggctcactatcgccagggttaaaatctcatgctgtcacactctatgaggctggaaaactgggtgcttcttgcattgcagaactatgtagtgatctggctagcttagagggaaagaaatttgagggtgtgctagaggagtttgcaagtcatgcattcagtttgcgatgcttcttggagtgtttacagtctggcggagtttccgcaaatgaaattactgataatactagtgaagcaaagactccaagaagctctgttcatgatattgacaatgctgctgaccatttgtccaaggtgaacattgagggtgttgctgacaataaccataatgaattttccgagcataaccagtgcgtaggtgagttagataatagtgatgggaatatagtatcaccagctatggttatcttggaaagtgtagaaagcatggtaaaaaatgatgacaagaatgattcaactgtgcagctaaatgtttcaactgaatctcgagttttgaagaacaaaaggaagtacaaagttgatattcttcgatgtgagagcttagcctcacttgccccggctacattagaacggctattccttcgggactatgacattattgtgtcgatggttcctcttccttcttcatcagttcttccaggcccttcaggcccaattcattttggaccaccatcttattcctccatgacaccttggatgaagctagtactgtatacagcaggacattgtggaccagtatctgctgtgttcatgaaagggctacgttttagattgctgcctgaaccattagctggttgtgagaaggcactgctatggtcttgggatggctctgtggtgggtggattagggggaaagtttgaagggaacttactgaagggcaacttattgttacactgcttgaattcgatgctgaaacaatctgctgtactggtgcaaccacttagtatacatgatcttgatacgtcaggaaaccttgtcactgtggatatccctttacccctaaaaaatgatgaccagtcaattgaatctgtggtagcccaaactaatttgccaaaggaacagatattagatttgacttctgtattgaaagacctatctagtaaatttgagctgagcacacttggctacctccgtctactaagacttcacaggatagatgaaccagataaatttgacccagaaaatgtaagctacaagtgggtgcctctgagcttggagttcggggttcctttattcagtccaaagttgtgcgagaagatttgtgaaagggtggttgcatcccatatgcttcagaaagatgatctcattgagcattctgatgtgatgcaaaatgtaagaaggcagctgagagaactttgcagtgaatatcaagcaaccggtccagtagctaagttatttaacaagcgtggaagctcaagggactcaccacgtgccttaatcaatagtattagtggcagatggaatttgtctaatgacccttcaacacctagtggaggagccccaagtgaacacgagaggctgaaatttgttggaaggcagcgaccccgaacagaagttgtgagctttgatgggagcactgtcaggtcatatgcacttgatcctgagcacaatgaagaacaatcatccatacaagacgtaaaaccagatccagaagaaacagacagcaaggatgtagtcttaccaggagtaaatcttatatttgatggagccgaattacacccctttgatattgctgcatgccttcaagcacgtcagcctctgtggcttatatctgaggcatcaactgcttcatcaacattactatgaggggttaattatgctccaatttctacaagttggccgatgaaatttcattagttggggttattcaaaagaattaatcagatgctcctggttaactgggatgcgcgttttgaagcttgtttactgcatcgtatgtttcttggccaatatcttactctacttttcacttgtgtgaaatttccaagtgcgtgctcctacttcaatattgtgaatctttgaggctcgttcagttgagaggctacaggctcgttcagggtgtcaattttacgtttacacatgtaggtctagtttggatattttgggattagagtgttttggagggattggagagggtgtaaatccctaatagatcaaatactctctcaatacatctcaatccattccaatcccactcattactagagtacctaaattaagccgtagtagtttcaatgtagttttggcataaatagcacagctttcttgtttgcggtgaccccgttcccgtggttagtataaaagtgttttcgttctttcttcaaaaggtgaaattcaagtttacatttatattaccttgaagaagcatgtacatacacttcagtacctgtaatggtagtattgcaatgatgcagatatacatcagaaattcttaaagcacgaa

SEQ ID NO: 29853 - DNA, 3227 bp, Zea Mays
tgaattgtttattcaaaagctttcaagattccaacatcatatacattggtttgcagttatacccataccaccttgcagactatatatgccgagtgctgaggatctcgcctttcagatattattgtgacatcctttttgaaactatgaagaatgaacaaccatatgatagtattccgaacttcactgctgctgatgcactaaggctcactggtgttgggagaaacgagtttattgatattatgaacaaatgcagatcaaagaaactaatgtggaaactgaataaatcgattgcaaaagaaatgctgcctacacagcctgttgacttcccagttgagccttggtggggggtttgtcttgttaactttacactggaagagttcaagaaactttcagaagaagagacaacaacaatagacaaaatatgtaaagaggaagccaattcatatgttctttttgatccgaaggttatagatggactttataaaagagggctagtgtacttcgatgtgcctgtttacccagatgaccgcttcaaagtttctaggcttgaaaattttgtttccaataaggatcaatcatatgaagacccaattgaagagcagctgcatcatttgcttgccgattgggctgggctgcgaaagtcatggatgcgaactctgttcttaatgaagaacgtttacctgcgtttcctagtagtattcttagtgatgatgaagaaggttcaaatacaagtatccactcagagaagtctggtcaacaattgaatggcatggattctgatggacccaggaaaatttctggaactgctcatgtgggctttgttgttgatgccaatgttacatcatacttgatgatgggctcactatcgccagggttaaaatctcatgctgtcacactctatgaggctggaaaactgggtgcttcttgcattgcagaactatgtagtgatctggctagcttagagggaaagaaatttgagggtgtgctagaggagtttgcaagtcatgcattcagtttgcgatgcttcttggagtgtttacagtctggcggagtttccgcaaatgaaattactgataatactagtgaagcaaagactccaagaagctctgttcatgatattgacaatgctgctgaccatttgtccaaggtgaacattgagggtgttgctgacaataaccataatgaattttccgagcataaccagtgcgtaggtgagttagataatagtgatgggaatatagtatcaccagctatggttatcttggaaagtgtagaaagcatggtaaaaaatgatgacaagaatgattcaactgtgcagctaaatgtttcaactgaatctcgagttttgaagaacaaaaggaagtacaaagttgatattcttcgatgtgagagcttagcctcacttgccccggctacattagaacggctattccttcgggactatgacattattgtgtcgatggttcctcttccttcttcatcagttcttccaggcccttcaggcccaattcattttggaccaccatcttattcctccatgacaccttggatgaagctagtactgtatacagcaggacattgtggaccagtatctgctgtgttcatgaaagggctacgttttagattgctgcctgaaccattagctggttgtgagaaggcactgctatggtcttgggatggctctgtggtgggtggattagggggaaagtttgaagggaacttactgaagggcaacttattgttacactgcttgaattcgatgctgaaacaatctgctgtactggtgcaaccacttagtatacatgatcttgatacgtcaggaaaccttgtcactgtggatatccctttacccctaaaaaatgatgaccagtcaattgaatctgtggtagcccaaactaatttgccaaaggaacagatattagatttgacttctgtattgaaagacctatctagtaaatttgagctgagcacacttggctacctccgtctactaagacttcacaggatagatgaaccagataaatttgacccagaaaatgtaagctacaagtgggtgcctctgagcttggagttcggggttcctttattcagtccaaagttgtgcgagaagatttgtgaaagggtggttgcatcccatatgcttcagaaagatgatctcattgagcattctgatgtgatgcaaaatgtaagaaggcagctgagagaactttgcagtgaatatcaagcaaccggtccagtagctaagttatttaacaagcgtggaagctcaagggactcaccacgtgccttaatcaatagtattagtggcagatggaatttgtctaatgacccttcaacacctagtggaggagccccaagtgaacacgagaggctgaaatttgttggaaggcagcgaccccgaacagaagttgtgagctttgatgggagcactgtcaggtcatatgcacttgatcctgagcacaatgaagaacaatcatccatacaagacgtaaaaccagatccagaagaaacagacagcaaggatgtagtcttaccaggagtaaatcttatatttgatggagccgaattacacccctttgatattgctgcatgccttcaagcacgtcagcctctgtggcttatatctgaggcatcaactgcttcatcaacattactatgaggggttaattatgctccaatttctacaagttggccgatgaaatttcattagttggggttattcaaaagtattgtctgattcttagaagaacacaatagcgggctgatgctttgttcactataactgagttctttcacaggaattaatcagatgctcctggttaactgggatgcgcgttttgaagcttgtttactgcatcgtatgtttcttggccaatatcttactctacttttcacttgtgtgaaatttccaagtgcgtgctcctacttcaatattgtgaatctttgaggctcgttcagttgagaggctacaggctcgttcagggtgtcaattttacgtttacacatgtagtagtttcaatgtagttttggcataaatagcacagctttcttgtttgcggtgaccccgttcccgtggttagtataaaagtgttttcgttctttcttcaaaaggtgaaattcaagtttacatttatattaccttgaagaagcatgtacatacacttcagtacctgtaatggtagtattgcaatgatgcagatatacatcagaaattcttaaagcacgaa

SEQ ID NO: 29854 - DNA, 3135 bp, Zea Mays
ggtttgcagttatacccataccaccttgcagactatatatgccgagtgctgaggatctcgcctttcagatattattgtgacatcctttttgaaactatgaagaatgaacaaccatatgatagtattccgaacttcactgctgctgatgcactaaggctcactggtgttgggagaaacgagtttattgatattatgaacaaatgcagatcaaagaaactaatgtggaaactgaataaatcgattgcaaaagaaatgctgcctacacagcctgttgacttcccagttgagccttggtggggggtttgtcttgttaactttacactggaagagttcaagaaactttcagaagaagagacaacaacaatagacaaaatatgtaaagaggaagccaattcatatgttctttttgatccgaaggttatagatggactttataaaagagggctagtgtacttcgatgtgcctgtttacccagatgaccgcttcaaagtttctaggcttgaaaattttgtttccaataaggatcaatcatatgaagacccaattgaagagctgttgtatgctgtatttgttgtttcaagtgctaatgctactgttgctgaactggctgcaactttacaagctgacctttatcaactccaggcagctgcatcatttgcttgccgattgggctgggctgcgaaagtcatggatgcgaactctgttcttaatgaagaacgtttacctgcgtttcctagtagtattcttagtgatgatgaagaaggttcaaatacaagtatccactcagagaagtctggtcaacaattgaatggcatggattctgatggacccaggaaaatttctggaactgctcatgtgggctttgttgttgatgccaatgttacatcatacttgatgatgggctcactatcgccagggttaaaatctcatgctgtcacactctatgaggctggaaaactgggtgcttcttgcattgcagaactatgtagtgatctggctagcttagagggaaagaaatttgagggtgtgctagaggagtttgcaagtcatgcattcagtttgcgatgcttcttggagtgtttacagtctggcggagtttccgcaaatgaaattactgataatactagtgaagcaaagactccaagaagctctgttcatgatattgacaatgctgctgaccatttgtccaaggtgaacattgagggtgttgctgacaataaccataatgaattttccgagcataaccagtgcgtaggtgagttagataatagtgatgggaatatagtatcaccagctatggttatcttggaaagtgtagaaagcatggtaaaaaatgatgacaagaatgattcaactgtgcagctaaatgtttcaactgaatctcgagttttgaagaacaaaaggaagtacaaagttgatattcttcgatgtgagagcttagcctcacttgccccggctacattagaacggctattccttcgggactatgacattattgtgtcgatggttcctcttccttcttcatcagttcttccaggcccttcaggcccaattcattttggaccaccatcttattcctccatgacaccttggatgaagctagtactgtatacagcaggacattgtggaccagtatctgctgtgttcatgaaagggctacgttttagattgctgcctgaaccattagctggttgtgagaaggcactgctatggtcttgggatggctctgtggtgggtggattagggggaaagtttgaagggaacttactgaagggcaacttattgttacactgcttgaattcgatgctgaaacaatctgctgtactggtgcaaccacttagtatacatgatcttgatacgtcaggaaaccttgtcactgtggatatccctttacccctaaaaaatgatgaccagtcaattgaatctgtggtagcccaaactaatttgccaaaggaacagatattagatttgacttctgtattgaaagacctatctagtaaatttgagctgagcacacttggctacctccgtctactaagacttcacaggatagatgaaccagataaatttgacccagaaaatgtaagctacaagtgggtgcctctgagcttggagttcggggttcctttattcagtccaaagttgtgcgagaagatttgtgaaagggtggttgcatcccatatgcttcagaaagatgatctcattgagcattctgatgtgatgcaaaatgtaagaaggcagctgagagaactttgcagtgaatatcaagcaaccggtccagtagctaagttatttaacaagcgtggaagctcaagggactcaccacgtgccttaatcaatagtattagtggcagatggaatttgtctaatgacccttcaacacctagtggaggagccccaagtgaacacgagaggctgaaatttgttggaaggcagcgaccccgaacagaagttgtgagctttgatgggagcactgtcaggtcatatgcacttgatcctgagcacaatgaagaacaatcatccatacaagacgtaaaaccagatccagaagaaacagacagcaaggatgtagtcttaccaggagtaaatcttatatttgatggagccgaattacacccctttgatattgctgcatgccttcaagcacgtcagcctctgtggcttatatctgaggcatcaactgcttcatcaacattactatgaggggaattaatcagatgctcctggttaactgggatgcgcgttttgaagcttgtttactgcatcgtatgtttcttggccaatatcttactctacttttcacttgtgtgaaatttccaagtgcgtgctcctacttcaatattgtgaatctttgaggctcgttcagttgagaggctacaggctcgttcagggtgtcaattttacgtttacacatgtagtagtttcaatgtagttttggcataaatagcacagctttcttgtttgcggtgaccccgttcccgtggttagtataaaagtgttttcgttctttcttcaaaaggtgaaattcaagtttacatttatattaccttgaagaagcatgtacatacacttcagtacctgtaatggtagtattgcaatgatgcagatatacatcagaaattcttaaagcacgaa

SEQ ID NO: 29855 - DNA, 3411 bp, Zea Mays
ggtttgcagttatacccataccaccttgcagactatatatgccgagtgctgaggatctcgcctttcagatattattgtgacatcctttttgaaactatgaagaatgaacaaccatatgatagtattccgaacttcactgctgctgatgcactaaggctcactggtgttgggagaaacgagtttattgatattatgaacaaatgcagatcaaagaaactaatgtggaaactgaataaatcgattgcaaaagaaatgctgcctacacagcctgttgacttcccagttgagccttggtggggggtttgtcttgttaactttacactggaagagttcaagaactttcagaagaagagacaacaacaatagacaaaatatgtaaagaggaagccaattcatatgttctttttgatccgaaggttatagatggactttataaaagagggctagtgtacttcgatgtgcctgtttacccagatgaccgcttcaaagtttctaggcttgaaaattttgtttccaataaggatcaatcatatgaagacccaattgaagagctgttgtatgctgtatttgttgtttcaagtgctaatgctactgttgctgaactggctgcaactttacaagctgacctttatcaactccaggcagctgcatcatttgcttgccgattgggctgggctgcgaaagtcatggatgcgaactctgttcttaatgaagaacgtttacctgcgtttcctagtagtattcttagtgatgatgaagaaggttcaaatacaagtatccactcagagaagtctggtcaacaattgaatggcatggattctgatggacccaggaaaatttctggaactgctcatgtgggctttgttgttgatgccaatgttacatcatacttgatgatgggctcactatcgccagggttaaaatctcatgctgtcacactctatgaggctggaaaactgggtgcttcttgcattgcagaactatgtagtgatctggctagcttagagggaaagaaatttgagggtgtgctagaggagtttgcaagtcatgcattcagtttgcgatgcttcttggagtgtttacagtctggcggagtttccgcaaatgaaattactgataatactagtgaagcaaagactccaagaagctctgttcatgatattgacaatgctgctgaccatttgtccaaggtgaacattgagggtgttgctgacaataaccataatgaattttccgagcataaccagtgcgtaggtgagttagataatagtgatgggaatatagtatcaccagctatggttatcttggaaagtgtagaaagcatggtaaaaaatgatgacaagaatgattcaactgtgcagctaaatgtttcaactgaatctcgagttttgaagaacaaaaggaagtacaaagttgatattcttcgatgtgagagcttagcctcacttgccccggctacattagaacggctattccttcgggactatgacattattgtgtcgatggttcctcttccttcttcatcagttcttccaggcccttcaggcccaattcattttggaccaccatcttattcctccatgacaccttggatgaagctagtactgtatacagcaggacattgtggaccagtatctgctgtgttcatgaaagggctacgttttagattgctgcctgaaccattagctggttgtgagaaggcactgctatggtcttgggatggctctgtggtgggtggattagggggaaagtttgaagggaacttactgaagggcaacttattgttacactgcttgaattcgatgctgaaacaatctgctgtactggtgcaaccacttagtatacatgatcttgatacgtcaggaaaccttgtcactgtggatatccctttacccctaaaaaatgatgaccagtcaattgaatctgtggtagcccaaactaatttgccaaaggaacagatattagatttgacttctgtattgaaagacctatctagtaaatttgagctgagcacacttggctacctccgtctactaagacttcacaggatagatgaaccagataaatttgacccagaaaatgtaagctacaagtgggtgcctctgagcttggagttcggggttcctttattcagtccaaagttgtgcgagaagatttgtgaaagggtggttgcatcccatatgcttcagaaagatgatctcattgagcattctgatgtgatgcaaaatgtaagaaggcagctgagagaactttgcagtgaatatcaagcaaccggtccagtagctaagttatttaacaagcgtggaagctcaagggactcaccacgtgccttaatcaatagtattagtggcagatggaatttgtctaatgacccttcaacacctagtggaggagccccaagtgaacacgagaggctgaaatttgttggaaggcagcgaccccgaacagaagttgtgagctttgatgggagcactgtcaggtcatatgcacttgatcctgagcacaatgaagaacaatcatccatacaagacgtaaaaccagatccagaagaaacagacagcaaggatgtagtcttaccaggagtaaatcttatatttgatggagccgaattacacccctttgatattgctgcatgccttcaagcacgtcagcctctgtggcttatatctgaggcatcaactgcttcatcaacattactatgaggggttaattatgctccaatttctacaagttggccgatgaaatttcattagttggggttattcaaaagtattgtctgattcttagaagaacacaatagcgggctgatgctttgttcactataactgagttctttcacaggaattaatcagatgctcctggttaactgggatgcgcgttttgaagcttgtttactgcatcgtatgtttcttggccaatatcttactctacttttcacttgtgtgaaatttccaagtgcgtgctcctacttcaatattgtgaatctttgaggctcgttcagttgagaggctacaggctcgttcagggtgtcaattttacgtttacacatgtaggtctagtttggatattttgggattagagtgttttggagggattggagagggtgtaaatccctaatagatcaaatactctctcaatacatctcaatccattccaatcccactcattactagagtacctaaattaagccgtagtagtttcaatgtagttttggcataaatagcacagctttcttgtttgcggtgaccccgttcccgtggttagtataaaagtgttttcgttctttcttcaaaaggtgaaattcaagtttacatttatattaccttgaagaagcatgtacatacacttcagtacctgtaatggtagtattgcaatgatgcagatatacatcagaaattcttaaagcacgaa

SEQ ID NO: 29856 - DNA, 3699 bp, Zea Mays
ggtttgcagttatacccataccaccttgcagactatatatgccgagtgctgaggatctcgcctttcagatattattgtgacatcctttttgaaactatgaagaatggtaatccgtttttaactgaaaattttcttgtgggtagtaagtttatgtttctttagcatctacatagtgccatggtagtatcctgctgttaagatttaattcaaccagagttttggacaaccctggtctaaactgctcgaccatgttggtaaaatgattcctcgatgattctccttctttttatttgtagaataaggtgacatactgacatgtcattgcaaggctgaagcactgttccactaatttttgataaatgtttatgtttctaacatgtttttttggggcagaacaaccatatgatagtattccgaacttcactgctgctgatgcactaaggctcactggtgttgggagaaacgagtttattgatattatgaacaaatgcagatcaaagaaactaatgtggaaactgaataaatcgattgcaaaagaaatgctgcctacacagcctgttgacttcccagttgagccttggtggggggtttgtcttgttaactttacactggaagagttcaagaaactttcagaagaagagacaacaacaatagacaaaatatgtaaagaggaagccaattcatatgttctttttgatccgaaggttatagatggactttataaaagagggctagtgtacttcgatgtgcctgtttacccagatgaccgcttcaaagtttctaggcttgaaaattttgtttccaataaggatcaatcatatgaagacccaattgaagagctgttgtatgctgtatttgttgtttcaagtgctaatgctactgttgctgaactggctgcaactttacaagctgacctttatcaactccaggcagctgcatcatttgcttgccgattgggctgggctgcgaaagtcatggatgcgaactctgttcttaatgaagaacgtttacctgcgtttcctagtagtattcttagtgatgatgaagaaggttcaaatacaagtatccactcagagaagtctggtcaacaattgaatggcatggattctgatggacccaggaaaatttctggaactgctcatgtgggctttgttgttgatgccaatgttacatcatacttgatgatgggctcactatcgccagggttaaaatctcatgctgtcacactctatgaggctggaaaactgggtgcttcttgcattgcagaactatgtagtgatctggctagcttagagggaaagaaatttgagggtgtgctagaggagtttgcaagtcatgcattcagtttgcgatgcttcttggagtgtttacagtctggcggagtttccgcaaatgaaattactgataatactagtgaagcaaagactccaagaagctctgttcatgatattgacaatgctgctgaccatttgtccaaggtgaacattgagggtgttgctgacaataaccataatgaattttccgagcataaccagtgcgtaggtgagttagataatagtgatgggaatatagtatcaccagctatggttatcttggaaagtgtagaaagcatggtaaaaaatgatgacaagaatgattcaactgtgcagctaaatgtttcaactgaatctcgagttttgaagaacaaaaggaagtacaaagttgatattcttcgatgtgagagcttagcctcacttgccccggctacattagaacggctattccttcgggactatgacattattgtgtcgatggttcctcttccttcttcatcagttcttccaggcccttcaggcccaattcattttggaccaccatcttattcctccatgacaccttggatgaagctagtactgtatacagcaggacattgtggaccagtatctgctgtgttcatgaaagggctacgttttagattgctgcctgaaccattagctggttgtgagaaggcactgctatggtcttgggatggctctgtggtgggtggattagggggaaagtttgaagggaacttactgaagggcaacttattgttacactgcttgaattcgatgctgaaacaatctgctgtactggtgcaaccacttagtatacatgatcttgatacgtcaggaaaccttgtcactgtggatatccctttacccctaaaaaatgatgaccagtcaattgaatctgtggtagcccaaactaatttgccaaaggaacagatattagatttgacttctgtattgaaagacctatctagtaaatttgagctgagcacacttggctacctccgtctactaagacttcacaggatagatgaaccagataaatttgacccagaaaatgtaagctacaagtgggtgcctctgagcttggagttcggggttcctttattcagtccaaagttgtgcgagaagatttgtgaaagggtggttgcatcccatatgcttcagaaagatgatctcattgagcattctgatgtgatgcaaaatgtaagaaggcagctgagagaactttgcagtgaatatcaagcaaccggtccagtagctaagttatttaacaagcgtggaagctcaagggactcaccacgtgccttaatcaatagtattagtggcagatggaatttgtctaatgacccttcaacacctagtggaggagccccaagtgaacacgagaggctgaaatttgttggaaggcagcgaccccgaacagaagttgtgagctttgatgggagcactgtcaggtcatatgcacttgatcctgagcacaatgaagaacaatcatccatacaagacgtaaaaccagatccagaagaaacagacagcaaggatgtagtcttaccaggagtaaatcttatatttgatggagccgaattacacccctttgatattgctgcatgccttcaagcacgtcagcctctgtggcttatatctgaggcatcaactgcttcatcaacattactatgaggggttaattatgctccaatttctacaagttggccgatgaaatttcattagttggggttattcaaaagtattgtctgattcttagaagaacacaatagcgggctgatgctttgttcactataactgagttctttcacaggaattaatcagatgctcctggttaactgggatgcgcgttttgaagcttgtttactgcatcgtatgtttcttggccaatatcttactctacttttcacttgtgtgaaatttccaagtgcgtgctcctacttcaatattgtgaatctttgaggctcgttcagttgagaggctacaggctcgttcagggtgtcaattttacgtttacacatgtaggtctagtttggatattttgggattagagtgttttggagggattggagagggtgtaaatccctaatagatcaaatactctctcaatacatctcaatccattccaatcccactcattactagagtacctaaattaagccgtagtagtttcaatgtagttttggcataaatagcacagctttcttgtttgcggtgaccccgttcccgtggttagtataaaagtgttttcgttctttcttcaaaaggtgaaattcaagtttacatttatattaccttgaagaagcatgtacatacacttcagtacctgtaatggtagtattgcaatgatgcagatatacatcagaaattcttaaagcacgaa

SEQ ID NO: 29857 - DNA, 400 bp, Zea Mays
gagaaatcgagaagagaaggacaaaagaagagccaccgaagccgacctctactcatgccgccgattaagccttgttgaccgatccatgatgaaggcagagctcgaggaaggtagtcgatggtcgtcgcgaccgctgtatcagccggtccgacaacaatttctcgttggcgttaaaacaccacgcggatctgcagagcatcgtggaccgaagcctcctcgccatcattctcggtcaaggacatgtaccacaagatagggagcatgaaggatgtcacgatgagttcgtgagaggtctaggccatcatcttccagtcaaatatggttgttggatcattgtcttcttatgatataattatttaactattttgtacagaactctattatatagtaaagatgtgac

SEQ ID NO: 29858 - DNA, 1565 bp, Zea Mays
cacggacgacaccagcagcagagccccgagcaatcccttctcgcccttttcacttttcagatccagccagccagccagccatcccactccgcaccgcattcctcgcagtggcagagcttgcagcggtggtctcttccccttcctcctgtctcctcctcgctcgatctcctctcccaagcagcgagaagcggatggggagggcgccgtgctgcgagaaggtggggctgaagaaggggaggtggaccaaggaggaggacgaggtcctggcgaggtacatcaaggagcacggggaaggatcgtggaggtcactgcccaagaatgccgggctgctgcggtgcgggaagagctgcaggctgcggtggatcaactacctgcgggcgggtctcaagagggggaacatctcggaggaggaggaggacatgatcatcaagctccacgccacgcttggcaacagtttcattcttctttcttctccccgcaggtggtccctgatcgccggtcacttgcccggtcgaacagacaacgagatcaaaaactactggaactcgcacctgagcaggcgggcggccgacttccgcgacggcgtcgtcgtcgacatcgacctcagcaagctgcccggcggcgggaaacggcgcggcggccgggccagccggggcgccgtcgtggccgcggccaaggagaagaaggccaaggagaaggacgacaggggcaatagcaaggtcgcagaagcggagcagcagctcagggacacggaggacgacgacggcggcagcgtctccacgccgaggcctcagtctgatgactgcggcaccgcccagagcgaagaggagcaagcgcaggccagcgccagcggcctgacatccgatgggcatgggcccgaggaggaggaggaggaggacccgctggctctgagcgaggagatggtgagtgcgcttctggccccggaaagcccaaagctggaggtgggccccgatggctcgtgcatggacagctacagtggccctccgtcaggggaaagcggctgtgggtccagtgggccttctggcgacgtggcccaggacctggacctagacgacgacaaggccatcatggactgggacttgatggggctggacatctcgaccgccggtgacatgtgggaccagctggtgtgggactacgacgaaacgttggtcacggaaccggaaggaggggaggaagggcaccagcagcaggacgatgtcatgtcagacctcttcttcctggacaatctctaggaggtgcgaggatagcatgggcatggctgccgtgatgctttatgctttttaatttgatccggtacttgtaggtttttgggtgtgttcagttcagagatgagtggcggtgtcagagacgagataaggggagtgctccagtgacatctttgtttgctggccggatctcacgaacccgtagaatggcaagaatgtagaaaaataagcacgcaatatcacttggaaacctttcatcagtagagcctgtctaacatctacagacggagaaatgcaaaaaaaaaaaaaaaaggttgctgggattgccatagtctg

SEQ ID NO: 29859 - DNA, 1130 bp, Zea Mays
cgcgctacgtgttatttggacgcctggaacctctctcgtttctcacgtggtccctgatcgccggtcacttgcccggtcgaacagacaacgagatcaaaaactactggaactcgcacctgagcaggcgggcggccgacttccgcgacggcgtcgtcgtcgacatcgacctcagcaagctgcccggcggcgggaaacggcgcggcggccgggccagccggggcgccgtcgtggccgcggccaaggagaagaaggccaaggagaaggacgacaggggcaatagcaaggtcgcagaagcggagcagcagctcagggacacggaggacgacgacggcggcagcgtctccacgccgaggcctcagtctgatgactgcggcaccgcccagagcgaagaggagcaagcgcaggccagcgccagcggcctgacatccgatgggcatgggcccgaggaggaggaggaggaggacccgctggctctgagcgaggagatggtgagtgcgcttctggccccggaaagcccaaagctggaggtgggccccgatggctcgtgcatggacagctacagtggccctccgtcaggggaaagcggctgtgggtccagtgggccttctggcgacgtggcccaggacctggacctagacgacgacaaggccatcatggactgggacttgatggggctggacatctcgaccgccggtgacatgtgggaccagctggtgtgggactacgacgaaacgttggtcacggaaccggaaggaggggaggaagggcaccagcagcaggacgatgtcatgtcagacctcttcttcctggacaatctctaggaggtgcgaggatagcatgggcatggctgccgtgatgctttatgctttttaatttgatccggtacttgtaggtttttgggtgtgttcagttcagagatgagtggcggtgtcagagacgagataaggggagtgctccagtgacatctttgtttgctggccggatctcacgaacccgtagaatggcaagaatgtagaaaaataagcacgcaatatcacttggaaacctttcatcagtagagcctgtctaacatctacagacggagaaatgcaaaaaaaaaaaaaaaaggttgctgggattgccatagtctg

SEQ ID NO: 29860 - DNA, 1375 bp, Zea Mays
tcttttcactttttttccggtgattccttgggtaacccacacaaaccgaccaccaaatattccatcccagcaccaccgcccgccacaaagcaaatgcgatataaaaatgcaactcgttgcatggccggtggcctgcgctaaggtttctccgttagctacaactctttgcattgcgggcagagaagcccgaaaccaactctaatcgtcagagcttcgataatgactgcaaaatcggagacaccacgaataacggagctgcatgtaagggtggactgcaacggctgcgagaacaagatcaggaaggccctgcgtgccatcgatggtaaataaaacccaattctaacctgaaacctaacagctacatgtgacgagcatgatatgatcttaattacaagttattaatggaataatggacctgcaccgtacgtgcaggtgttagcgaagtgtatatagatcaagcaagccacaagatcactgtggtcgggatggccgacccatggaggatggtcaaggccatcaggaaggccaagagggtccccaccatcttctcccacaccgacccggccgccgcagccgaggctgatcagccgccgcctcccgctgccgaagccgaagaagccgaagccaaaggggaggcccaggcgccagcgccagcgccaccacctcccgccgacccgccagcagccggcgacagagcagaggagaccgcgccagctgatacgtccgcgccggaggagcacaaggaggccaaaccggcagaaaccccggcggctgtggacgccaccgtggtggtgcgcacagtacgtgaccacccgtacgggtacggcgctggcggccatggccaccgcatgtgcagtgaggcgaaccaccccgtagacagcttttacagccaccatcgcccgacgagcccttacgtggccgagtacggcgccggcggcggctatgctggctttccggtgcaagaaggcaggggcaaagaggatgccatcaatatcacttgtatgttcagcgatgagaacccaaacgcatgcagcatagcgtaagatccatgtgtttgcaatctgctcaaggaattcctttctgcatgattgatgccaaagaaggttgcatagctgctggctagtgccgagggggacagatcatcatgtaggctttagcctacgtacagcggctagtgtgtagctgctgtaataaggcttgggttgatgtaattaaaagggtgagaaaggtaacagaatgggaacaataagatgcttaacttgtgcacatagtcactgtgggagacgattttcctggcaatcgccacggttttcactacgcccttcatgcttctctagtcctgtctcagagaatctataaagttgtggtcctttgt

SEQ ID NO: 29861 - DNA, 1118 bp, Zea Mays
tttctccgttagctacaactctttgcattgcgggcagagaagcccgaaaccaactctaatcgtcagagcttcgataatgactgcaaaatcggagcagacaccacgaataacggagctgcatgtaagggtggactgcaacggctgcgagaacaagatcaggaaggccctgcgtgccatcgatgcgaagtgtatatagatcaagcaagccacaagatcactgtggtcgggatggccgacccatggaggatggtcaaggccatcaggaaggccaagagggtccccaccatcttctcccacaccgacccggccgccgcagccgaggctgatcagccgccgcctcccgctgccgaagccgaagaagccgaagccaaaggggaggcccaggcgccagcgccagcgccaccacctcccgccgacccgccagcagccggcgacagagcagaggagaccgcgccagctgatacgtccgcgccggaggagcacaaggaggccaaaccggcagaaaccccggcggctgtggacgccaccgtggtggtgcgcacagtacgtgaccacccgtacgggtacggcgctggcggccatggccaccgcatgtgcagtgaggcgaaccaccccgtagacagcttttacagccaccatcgcccgacgagcccttacgtggccgagtacggcgccggcggcggctatgctggctttccggtgcaagaaggcaggggcaaagaggatgccatcaatatcacttgtatgttcagcgatgagaacccaaacgcatgcagcatagcgtaagatccatgtgtttgcaatctgctcaaggaattcctttctgcatgattgatgccaaagaaggttgcatagctgctggctagtgccgagggggacagatcatcatgtaggctttagcctacgtacagcggctagtgtgtagctgctgtaataaggcttgggttgatgtaattaaaagggtgagaaaggtaacagaatgggaacaataagatgcttaacttgtgcacatagtcactgtgggagacgattttcctggcaatcgccacggttttcactacgcccttcatgcttctctagtcctgtctcagagaatctataaagttgtggtcctttgt

SEQ ID NO: 29862 - DNA, 3261 bp, Zea Mays
cccaaaaaaaaagtcagtaaccaccccacagtactactgagtactgacccactccacactttcgtcttcccgtgcttttgtttctcggactagggacgctctctcccctcctgcaggcagtcaccattacgaaaaaagccaacacccggacggaaaggttggagcggggaggaaaactcgcgcaagatcccgccttttccgtcggggtctgacggccccgctcccccaccggaagccaggcggccgcaaagcagaggccgtaggcggcggttgctgaaacctatatcacgccaagcgcctgcgtagtcaagggctactcgagccttgcccctcccatggaacagcgggacgcgacgcagccagaggcggcggcggaggagcgcgaccaggagcggccctccattattcctcctcccaaggaaaacgaggataaagatctgaagctaccttctcgtgtggtttctttattatttggtggtgatatatcgacgtcagcacaaacatttgagaaatggctctcattagtacgtaagaggagtggggctttccggccatctgggttcccacatcgaggttcaaggattgaagtcatgccaagtgggagcttctcactatttggtagcggggacttaagtgaacacttgattagagaagcaccaacaagaaaagatccattggactgcgatcaatctcctgaaataagcttgtgggagagacttgggaactcttctgcactggacattgagtcatctgaattttcatgggacgtgttgttgtctctgcatcatacagaacatagtagtagttccgaacaaactgaagacgaaatgaataaagctcttgaggtgactgtgaactctggtggcgtagtgttctttgctctatttagttctccaggtaacattggagttccagaagcggcagctgttataaagttttcgtcatcaaagatggcaacacaggcagagcgtttgggttatgagtttgcaagattgctcggagtccatacaccacaagctagagtagtatataattctagctcagagtggctggcgattaggcatgctgcagaaaatgcacgtacagtagcagtttcaaataatgatgaggttggtgagatgacgtgctcagagttgttagaagctcttgagctaagccgctgccttcttctaatgagttatattcatggctccccactgcttgagagttcaaaggctttccattcacgagaagctgcttgtgttactgcttcatcactgggaagggttttgatgcttgatctgatactgcggaatgaggacagactcccatgccgtcagcttggttggcgtggtaatcctgcaaacctgatgatttcagataaatcatccttacccaatttggacaggttggatgatttcaagagctctacagatagttccaaccaactaattacacattttttgcatagagagaagcggtcacactctttgaatggaaaatttggttcaccagggttggatcccatgtcaccaaaactagaaccattgataaatgaaaaggaaaatgctgaaagaacaaatggcgattttcgcattgtagcaatcgatactggtgtgccccgccgcccccctgtggggcgacgtgtcaaagatcatgagaggtaccccaaagttgtggaactcattttgaatagttcggactactcagcaagcatcctatatgaaatttctggttgtaagcttggacatccacgacctgatgaggttacttccagtgattcttgttgctccctttctgatgaagataatgctggagtgattcatgaattccgaggatcattccgtgcagctcttagggacctggaggggttccatctatttcttctccagctttaccaaaaactggatggtgttttgcgagttttcttgtccataattactaaaacctctgaagaatctgacaataatgatgctgccctttccgattttccttcacctggagccagctatagtactcctcgccttcctaggagagttggaacaacaagtccttcaagggaagtgcagaggctccccgtagtttaagaatgacaatgaaacttcgtgatttttacaaaaccccaaaggttgatcctgaattgctcaaagagattgagcagtggaacgaagcacttaagaatgatgtgatcaaattttgccaagagaacaattttcattctggtttctttgatggaactgaaaacaacatggtagctgatgcctatgaattgaaggtggggctctggctgcaaggtctaagtacaccctacagcatttgggcattacccatgtactctgtttgtgttcaaatgagattggtcaatccgattcccaatttcccgatctttttgaatacaagaacttttcaattagcgatgatgatgatgcaaacatcagtgatctttttgaggaagcatcagacttcattgatcatgtggatcatgttgggggcaaggttctagttcattgctttgaagggaaaagtcggagtgccacagtcgtacttgcctatcttatgcttagagaggctttactcttgcaaaagcctggaacttactgaagaaagtacaccgtcgagcgcagccaaacgacggcttcgcaaaggctctcctggcccttgacaagaggctgcatggcaaggtatctatggactggcaacacaagcggccagaaatgaaggtgtgtccaatctgcagcaagaatgttggtctaagtacgagttcactcaagctgcacctgcagaaggcacacaagcgtctatctgcaggcagtgtcgacagcgccatgaccatggagatccaaaaatcgatcgagtcactccagatcagccgaggaggaagcctgagcccgtcccagaagctgaccaaggtgttcagcaatgagctgagcttctgatctgttttcctgtactatagatgaggcaatgtacttggctcacattgtaataacttgtactatcagactgaacttgtgactgtaggtttagttcacacgcctatatgattagcacacgaatgttcaggtgtgaagggtgcaacactaaagaatgttcaggtcttgtatttgttgcctgcagtatgcagttttcttctaaagggatctactctcaatctttgtatagagttactaattttatgggtacttttctagtgtacattcctgtttggtcacctagggctggtaagatatgagctctgttttcagcaagcaccgtagaaaagtttggaggttttgctgggtc

SEQ ID NO: 29863 - DNA, 3356 bp, Zea Mays
cccaaaaaaaaagtcagtaaccaccccacagtactactgagtactgacccactccacactttcgtcttcccgtgcttttgtttctcggactagggacgctctctcccctcctgcaggcagtcaccattacgaaaaaagccaacacccggacggaaaggttggagcggggaggaaaactcgcgcaagatcccgccttttccgtcggggtctgacggccccgctcccccaccggaagccaggcggccgcaaagcagaggccgtaggcggcggttgctgaaacctatatcacgccaagcgcctgcgtagtcaagggctactcgagccttgcccctcccatggaacagcgggacgcgacgcagccagaggcggcggcggaggagcgcgaccaggagcggccctccattattcctcctcccaaggaaaacgaggataaagatctgaagctaccttctcgtgtggtttctttattatttggtggtgatatatcgacgtcagcacaaacatttgagaaatggctctcattagtacgtaagaggagtggggctttccggccatctgggttcccacatcgaggttcaaggattgaagtcatgccaagtgggagcttctcactatttggtagcggggacttaagtgaacacttgattagagaagcaccaacaagaaaagatccattggactgcgatcaatctcctgaaataagcttgtgggagagacttgggaactcttctgcactggacattgagtcatctgaattttcatgggacgtgttgttgtctctgcatcatacagaacatagtagtagttccgaacaaactgaagacgaaatgaataaagctcttgaggtgactgtgaactctggtggcgtagtgttctttgctctatttagttctccaggtaacattggagttccagaagcggcagctgttataaagttttcgtcatcaaagatggcaacacaggcagagcgtttgggttatgagtttgcaagattgctcggagtccatacaccacaagctagagtagtatataattctagctcagagtggctggcgattaggcatgctgcagaaaatgcacgtacagtagcagtttcaaataatgatgaggttggtgagatgacgtgctcagagttgttagaagctcttgagctaagccgctgccttcttctaatgagttatattcatggctccccactgcttgagagttcaaaggctttccattcacgagaagctgcttgtgttactgcttcatcactgggaagggttttgatgcttgatctgatactgcggaatgaggacagactcccatgccgtcagcttggttggcgtggtaatcctgcaaacctgatgatttcagataaatcatccttacccaatttggacaggttggatgatttcaagagctctacagatagttccaaccaactaattacacattttttgcatagagagaagcggtcacactctttgaatggaaaatttggttcaccagggttggatcccatgtcaccaaaactagaaccattgataaatgaaaaggaaaatgctgaaagaacaaatggcgattttcgcattgtagcaatcgatactggtgtgccccgccgcccccctgtggggcgacgtgtcaaagatcatgagaggtaccccaaagttgtggaactcattttgaatagttcggactactcagcaagcatcctatatgaaatttctggttgtaagcttggacatccacgacctgatgaggttacttccagtgattcttgttgctccctttctgatgaagataatgctggagtgattcatgaattccgaggatcattccgtgcagctcttagggacctggaggggttccatctatttcttctccagctttaccaaaaactggatggtgttttgcgagttttcttgtccataattactaaaacctctgaagaatctgacaataatgatgctgccctttccgattttccttcacctggagccagctatagtactcctcgccttcctaggagagttggaacaacaagtccttcaagggaagtgcagaggctccccgtagtttaagaatgacaatgaaacttcgtgatttttacaaaaccccaaaggttgatcctgaattgctcaaagagattgagcagtggaacgaagcacttaagaatgatgtgatcaaattttgccaagagaacaattttcattctggtttctttgatggaactgaaaacaacatggtagctgatgcctatgaattgaaggtgcgtcttgaacacatcattgaaaggatagccttgatttctgatgctgcaaatacagaacgaccttctcttgttgtcaacaacttgttcataggtggggctctggctgcaaggtctaagtacaccctacagcatttgggcattacccatgtactctgtttgtgttcaaatgagattggtcaatccgattcccaatttcccgatctttttgaatacaagaacttttcaattagcgatgatgatgatgcaaacatcagtgatctttttgaggaagcatcagacttcattgatcatgtggatcatgttgggggcaaggttctagttcattgctttgaagggaaaagtcggagtgccacagtcgtacttgcctatcttatgcttagagagggctttactcttgcaaaagcctggaacttactgaagaaagtacaccgtcgagcgcagccaaacgacggcttcgcaaaggctctcctggcccttgacaagaggctgcatggcaaggtatctatggactggcaacacaagcggccagaaatgaaggtgtgtccaatctgcagcaagaatgttggtctaagtacgagttcactcaagctgcacctgcagaaggcacacaagcgtctatctgcaggcagtgtcgacagcgccatgaccatggagatccaaaaatcgatcgagtcactccagatcagccgaggaggaagcctgagcccgtcccagaagctgaccaaggtgttcagcaatgagctgagcttctgatctgttttcctgtactatagatgaggcaatgtacttggctcacattgtaataacttgtactatcagactgaacttgtgactgtaggtttagttcacacgcctatatgattagcacacgaatgttcaggtgtgaagggtgcaacactaaagaatgttcaggtcttgtatttgttgcctgcagtatgcagttttcttctaaagggatctactctcaatctttgtatagagttactaattttatgggtacttttctagtgtacattcctgtttggtcacctagggctggtaagatatgagctctgttttcagcaagcaccgtagaaaagtttggaggttttgctgggtc

SEQ ID NO: 29864 - DNA, 2611 bp, Zea Mays
atgcagcaggagttggcccttctgaggcaagccattcctgtcgcccctgcaggtgctgctcagggagctggaggtggagaagtgcccgggggcgctgtccctgcgggtgctgttcctggtggcggggccggggtgcctcttcctgtcagtggtctttctctgatgcagtggatgggcatgaagttggattcttttgatggcagtggtactccggtcgaggcggcagattggctgacttatgtggaagataagatgaatgtcttcgagattgcttatgaagatcgggttcgctttggcactcagctgctgaagggtgaggcgcagatttggtggagaggcgtgcaggcagcgcactcctcctcaccaggagtcctatcatgggatgttttcatcaggcagttcgaaaggagattctacccggtcacctttctggagaaaatgaagattgacttgcagtccttcaagcaggagaagaagtctgtcacagagtatgaggtgggcttcaacaaaatggtccgctttgtccctcatgtggcttataatgagatggagaaggcgagccaattccgtcagggtctgaagccttctatcaggcatgctctgggggcctttccgttggtggacttccgtaccacagtggagcaggcgctgggtgtggagatgcaacaccagtacaccatggagtcgcagaagtcttcgggtgttgatcaacctcgcagccaggacacgaggaggggcaacactggaggtccagctcacaagaggggcaagtctcagcatcagcgccaccatccttaccgtggcaaatcttctgactcaggtacttcaggaggaagtactcaaaggtttcgggccgttcctaagcccgggttggggctggtgtgtttccgctgtggagatgcgcatcgccgtgcagagtgtcagtggagtggcaggtgttctatctgcagtcaggaccacaaggatgtggtgtgtaggaggaatcccaatgggaagctcagatgggagccgatagcttcctcctcttctcagggcactatcaatatgatgtcaagtgctgagcagcagttttcagttcctcttcctccacagcagctttatgtgcccgggacttctcagttcgtgccgatgcaaggttttccgcagtatcaggttgtgcctactcctgcgccgtctacccctatgctgtctcagtttggagctccgcgccagcctcctccggtggctcagtggggttcttctgttaatgtcactccgggagcttcctcttctgcgggaagggtcaagtctagggaattattacattctaatctttcatggtagttgaactgtttagtttggtgggctgagatgtctatcttttgtctggtcatgaatgttttttttctaccgttgcattttgattatactatggcaattatctttcttttatatcctgtataaactatatgcttcccttgttatgctactttcaagggaggtgctgccggattttgcagtactttctttctctatgtgttgcatgagtcttgtagaaaggtttttttttggtatcatccattgtgtgggatcagtggggtgttacatttggttgcgttgtcatcaatcaccaaaaagggggagattgtaaggaaaatggaccccgggccatttagctcaaaaggttttaatgtttgattgtcaacataacctgtggactaatatgtttgctagtgtttatgtttatagttaacaggatgcgaagaggattggactaagacactaaggatgcaacacctcaaaagaagacataaaaggtgcatagaagtccaagactcaagaggaaaaggagcccaaaagaaacagcgaagacatccatgaagtgggcagtcagccagcgcactagtggtgcaccggacagtgaacagtaacctgttcgatgtacacgggactgtcccgtgggacaccgggcagtctgtgctgagaggcccacaccgagcactctcgggctgtagcaccggactgtccggtgtgaccggacagtctaggtaacggtcgactgctacagaccccaacggtcggctgacgtggccagtgcaccggacagtgaacagtgcatgtccggtgtgcaccagattgtccggtgtgcccatcgacagaaagctgctgcttctgtccaatggctacaattgtggggggaggctataaataacccccccaaccggcaatttcaaagtgtaggagaccaagcaacataccaaggcatattgtagacatttccaagtgctcaaacacccaagtgcttaataaaatcactcgatgattagcataggtgctttgcaaagtgcttaggatagttagaccacattagcgcttgctctaggtgagtcctagttagttgagtgagtttagaaaaaccacacaacccctcagctcttgcgcgagtcattataattgtacgagtggggcgagagtcttgcgagaccatgacaaccgtgtttgtgtcatggccgccaccgtgtaccggagaaaacgaggcccgcaacgttttagtcggaagctcgatagtggagatggcggggagcgtccgagaggatccggaagcggagcaccacttgcgcgtggagaaggc

SEQ ID NO: 29865 - DNA, 3513 bp, Zea Mays
cttatgtgtatagatgagatgaatatgaagtacataaataaggtctggagacatccccctctgcatgacagaatatccagtccttgaatcaatttgagcatatcccctagtacagtgaatatcagttttgtttgctagctacaagactggacaaaactgatatttcagttgagttgtgctgagccaacaaggtattggtgcatggttgccatgtgtgtttgagctcacatcgtgctggcaccctgagaattcttcatcgcaatgagataaacaagtcaagtgaacctgccctagccctatccttttatttcagtgctgttctagtgatccagctctagttgttcctctggtgtctctgtggtctgtgttgcaagccaaagctcttctccccagccaccaagttagctctctccaattcatcaagtgccactccattatctggtgaccaaagcagccatccttccacctcaccgtggccaaggatcttcgagaggtgtttcggccatgttgtgcctgttctctactcctcacaggtcagtgaagttcacatgatttgttgcttgaactctaccgcggttaatttccttaaacgtgctcacgacatcgtggtttggcgtcagggatagcctcaccgccgacaggttaaaccatgtcgttctcggccggtttcgtgtgagcaccgtagttgtggtagatccttgttgctccctgcgtcgaaatttgaaactctattgtgcggtggccatagaattgagcttatcggattccctgttccgccgccgtcgtcggtggcgttgttctagggtccccgtggtcgaattgagcatgtgcctaggttcgtcgagggtcaggagtcgcgtgggtatgatcgccgtcatggccgatcaagcgccaggtcgctagagttgtgcgcggcggcatcggggctaagaatttgtaaaacgaaggaagccagaggacctaagcaaaactgtcagtgacaccaaccaaaagtggctcaggctcgttttagtttgttcagcgcggcggggttctttgtgcaaaagcgcgcacgggggcgcgctgtccgccagcagtgggccagatcaacccagagttgggccggctggactagtcctgacctaggactgttcattgtttttatttttcttttatctgagagcttgtcaattgtgccaaaaataattgagaaaattttgtagggtgtctaaaatagtgagctctccggtaaaaatattattaagatttttgtggtagttagaaaatattaagtgaattaaaggtgttcttggaaggcctatttggattttagaaataaaagtacagtgccaaaaatgatgaaaatttgtgggtaaccttgttttggtcagtggaacacttggtaaaagtttgggactgtttggaagcattttgattagaaagacttgcaaggtccagaatagattagataaaatcttaatgcaaagtggattagtgatttggaaagggaataagtttagtgaagcctggtctttggatgaaggaacaagagtgcctagtgggatctagatttttagtgtagttagaagtgcctgaaatgtgtttatgtgaatttagtaacaagagcagagcactacaaattgtaggaaaatgtgtgtaagcttaacttgggaatatgatagccgttcaacatgtccgctacaccggcatcagcatcataatcctcgactcgttgtctcaccacctcttctttcgtacgatgcgcttcaccaagaaatatccaccgagtatagtctcgcgtaaatccattcttccaaatatgttctaccgtgacctttattattttcttttcctattggcacatttgctgcacggacatgggactagactcgctcctttagcagcttcgccaaatgctcgttccatgaaagcatcggtcttcctaatccatttaggggtgacatcctttcatcctacacagctcgtgtacatccactcacggtcctccatactctaacatatataactgagtatagtttaatataaacatgtaatgtatgtacactacgttcctaccatataataggtgaggataggtcctaatcccacctaaggttgcatacatggggttagtttacatgctttacttcgatcctagacataatttcggcaacacctccccgttgttctccggatacacgtcctggcagcgagagtgtgtatccggagaacaaccgggaggtgacaccgaaaatctatctcgaaccggagtagagcatggaaactaaccctatctacgcaaccgcgggctgtccaaaaaacgtggataattcaaaatagatacagttatagatatgcaaagatctgcatatctacaccataactctttcgaacgggagacgcctaattgagttacatgatctatgaccatgatacggaaaatcgaggttatacctagggtggcggtgaagtcgggctagtggtgctgtggcgggtcagtgtagtggcaacgcgacgcggtgcaggcagactcgcagcagcgaggaagacctctgcaaaaaaaataaacataagcctatcaacaaaaaatcggcaacacctcccccatacagggaagtttccaaaacctgtaaataaaagtaacaacatgatgacgaacgttcacatatgtttcaacggcacgatagccaaaaatcacatatatattttcaatccatgtcgcagaatatcaaaccacatctaatcaacatttctatccacacaaacattggtctcacacaaaaaggcacatgtcacaaatctatacatcaaatatatgagaacacctgaatattgcccacaaaagttttataattttcatgtgaaggccttcatagaagttttatgattttcatgtgaaggccggctagatttctatacaaagtgcgtgataattttcataaaacagtgtcaaatttttatcatattttgtatatatgatatcatgacatgtcgacaagtttcacgatttctgattttgtttgtgttttatacaattttaaaacatctggatcgcaagttcgcgatcatgtttcatgagcatggttttcgaaaattccaatctatttctgaaataggtcgtaacttgtgctaaataacatgaataccatttttcattcgcagttttccatttttcaagtgacttacagttcaaatctgaattatccgaagaaattcaattaaatgaactaaatctattagttatagcaaacactttgataattatgccaaaatcgaacatgtaggtctatatactataggaacacaccaaaaaaggtttggggaaaaaagaaaaaaaaattatacattgctgagtgtcaagcaaagagggcttaaagtggacaatctgtatgtaatcttgtcataggagaatatcttaggtcacactaatgcatgttgtcatttttataacaggataggctacatcaaaatgagggctcaatttttttgtgtggggctcatataaaacagatcttttgtgattaaggggtgttt

SEQ ID NO: 29866 - DNA, 1285 bp, Zea Mays
cttatgtgtatagatgagatgaatatgaagtacataaataaggtctggagacatccccctctgcatgacagaatatccagtccttgaatcaatttgagcatatcccctagtacagtgaatatcagttttgtttgctagctacaagactggacaaaactgatatttcagttgagttgtgctgagccaacaaggtattggtgcatggttgccatgtgtgtttgagctcacatcgtgctggcaccctgagaattcttcatcgcaatgagataaacaagtcaagtgaacctgccctagccctatccttttatttcagtgctgttctagtgatccagctctagttgttcctctggtgtctctgtggtctgtgttgcaagccaaagctcttctccccagccaccaagttagctctctccaattcatcaagtgccactccattatctggtgaccaaagcagccatccttccacctcaccgtggccaaggatcttcgagaggtgtttcggccatgttgtgcctgttctctactcctcacaggttgtctccattgcaacaagtgcttaggagaagatgaagacaacattgaggactttcaggagtttcaggacttcgacgagttttagaatagattagtgacaaattcccagtcagctgcctgtaaaggccttatcgtactgtgtttcgtttagcactttgattatgacttaataactttgtggatgtttcagacatcatgatgtaataaagtacttatttcctctattattttgagcaatgtgtgtgttgggggccttcatcttccgaatgtcctaaaaaacacggctaaccatttgttatcatcatgttgtcaagcattacaggagcttcggaactagaatagcttcgatacggaacaatggaagagcaacgaaggtagcttcgtcataataacgcaagaagatgatgcaaggagaatgtgtcatcttaaacactgagagcaaaagatagtattgtccttgtattatttgtaaacccagtgtgtaatctctaagggcataaatataataccgtacgaagttgtacgactccctataaatagacgaacagtgccctgcataaagtacctttttggaggcccgaaaaattgttgtgtgtaatcttctctttgcctcaccttcgctctaaaccatttttctagagacgaatgtatgtttataaacttaatatatgaaggaggagaaatatcctattgatatgtaagatgaatcatcatgcttaaacgcaatatctttcatatatgttcatttatt

SEQ ID NO: 29867 - DNA, 962 bp, Zea Mays
cttatgtgtatagatgagatgaatatgaagtacataaataaggtctggagacatccccctctgcatgacagaatatccagtccttgaatcaatttgagcatatcccctagtacagtgaatatcagttttgtttgctagctacaagactggacaaaactgatatttcagttgagttgtgctgagccaacaaggtattggtgcatggttgccatgtgtgtttgagctcacatcgtgctggcaccctgagaattcttcatcgcaatgagataaacaagtcaagtgaacctgccctagccctatccttttatttcagtgctgttctagtgatccagctctagttgttcctctggtgtctctgtggtctgtgttgcaagccaaagctcttctccccagccaccaagttagctctctccaattcatcaagtgccactccattatctggtgaccaaagcagccatccttccacctcaccgtggccaaggatcttcgagaggtgtttcggccatgttgtgcctgttctctactcctcacaggagcttcggaactagaatagcttcgatacggaacaatggaagagcaacgaaggtagcttcgtcataataacgcaagaagatgatgcaaggagaatgtgtcatcttaaacactgagagcaaaagatagtattgtccttgtattatttgtaaacccagtgtgtaatctctaagggcataaatataataccgtacgaagttgtacgactccctataaatagacgaacagtgccctgcataaagtacctttttggaggcccgaaaaattgttgtgtgtaatcttctctttgcctcaccttcgctctaaaccatttttctagagacgaatgtatgtttataaacttaatatatgaaggaggagaaatatcctattgatatgtaagatgaatcatcatgcttaaacgcaatatctttcatatatgttcatttatt

SEQ ID NO: 29868 - DNA, 883 bp, Zea Mays
atcaatttgagcatatcccctagtacagtgaatatcagttttgtttgctagctacaagactggacaaaactgatatttcagttgagttgtgctgagccaacaaggtattggtgcatggttgccatgtgtgtttgagctcacatcgtgctggcaccctgagaattcttcatcgcaatgagataaacaagtcaagtgaacctgccctagccctatccttttatttcagtgctgttctagtgatccagctctagttgttcctctggtgtctctgtggtctgtgttgcaagccaaagctcttctccccagccaccaagttagctctctccaattcatcaagtgccactccattatctggtgaccaaagcagccatccttccacctcaccgtggccaaggatcttcgagaggtgtttcggccatgttgtgcctgttctctactcctcacagcattacaggagcttcggaactagaatagcttcgatacggaacaatggaagagcaacgaaggtagcttcgtcataataacgcaagaagatgatgcaaggagaatgtgtcatcttaaacactgagagcaaaagatagtattgtccttgtattatttgtaaacccagtgtgtaatctctaagggcataaatataataccgtacgaagttgtacgactccctataaatagacgaacagtgccctgcataaagtacctttttggaggcccgaaaaattgttgtgtgtaatcttctctttgcctcaccttcgctctaaaccatttttctagagacgaatgtatgtttataaacttaatatatgaaggaggagaaatatcctattgatatgtaagatgaatcatcatgcttaaacgcaatatctttcatatatgttcatttatt

SEQ ID NO: 29869 - DNA, 459 bp, Zea Mays
ttaaaccatgtcgttctcggccggtttcgtgagcttcggaactagaatagcttcgatacggaacaatggaagagcaacgaaggtagcttcgtcataataacgcaagaagatgatgcaaggagaatgtgtcatcttaaacactgagagcaaaagatagtattgtccttgtattatttgtaaacccagtgtgtaatctctaagggcataaatataataccgtacgaagttgtacgactccctataaatagacgaacagtgccctgcataaagtacctttttggaggcccgaaaaattgttgtgtgtaatcttctctttgcctcaccttcgctctaaaccatttttctagagacgaatgtatgtttataaacttaatatatgaaggaggagaaatatcctattgatatgtaagatgaatcatcatgcttaaacgcaatatctttcatatatgttcatttatt

SEQ ID NO: 29870 - DNA, 1432 bp, Zea Mays
ctccaaaagtccatgtattatcgtcttatcaatgatggtataaagactacacaagcaatatgcaatatgaattaattcctctcaagataattatcttcatgcattttttaaaatgaagtaatttcgctaacaaggaatgatagtgtttaatgaatgtcagggatatattggctttggttttaagctaacgggcaactacacaccaggagaatcttagtaaaggatacgtagtgataccctgccagatcacctagatagtgatcaatggggagtagcgctcctcgggcataaagggaatcacggctcgtgggtgaagtgtgcaacctttacagagtgttagaaaatggtatattagtcgtgctcacgattatgagtagccttgggagctccttttattagagttactccagatacttttatgatgatgcttgatgttgatggttataattatggtttatggtatttcctcttggagggagtgccattcgggtaataactcgggattattattaaaacttgctttctactagtaataaatacctgaccaactaaaagcaatctctttaagcttaaccccacatacaactagcccactttagtcaaacgagacatttgctaagtacattgatgtgtactcacccttgcttaaaaacaccaaatcccaggttgtctccattgcaacaagtgcttaggagaagatgaagacaacattgaggactttcaggagtttcaggacttcgacgagttttagaatagattagtgacaaattcccagtcagctgcctgtaaaggccttatcgtactgtgtttcgtttagcactttgattatgacttaataactttgtggatgtttcagacatcatgatgtaataaagtacttatttcctctattattttgagcaatgtgtgtgttgggggccttcatcttccgaatgtcctaaaaaacacggctaaccatttgttatcatcatgttgtcaagcattacaggagcttcggaactagaatagcttcgatacggaacaatggaagagcaacgaaggtagcttcgtcataataacgcaagaagatgatgcaaggagaatgtgtcatcttaaacactgagagcaaaagatagtattgtccttgtattatttgtaaacccagtgtgtaatctctaagggcataaatataataccgtacgaagttgtacgactccctataaatagacgaacagtgccctgcataaagtacctttttggaggcccgaaaaattgttgtgtgtaatcttctctttgcctcaccttcgctctaaaccatttttctagagacgaatgtatgtttataaacttaatatatgaaggaggagaaatatcctattgatatgtaagatgaatcatcatgcttaaacgcaatatctttcatatatgttcatttattcatttataataataa

SEQ ID NO: 29871 - DNA, 2267 bp, Zea Mays
caattgtgccctggccttatccactaacgtttctgatcgaaacgaagcattcccccgttcctgtctctgcttactcacctctcccatgagacgaagcataaaatcaaataggatatgtgggttggaaataggtcgtgaaattgattgaaatacctggggcttgagcgtgatatatagagggtggtagagaccaagcgacgttgggcgagcggcgccgccggggctgcgttggtcccttcaccggtgatgagcatccaccagatacaggaatgaacaacattgtgtaggcacctcgtccagacatctaaggcgaaaaatgctgcgcctgcaccaccatagtgcacctgtctctccgcacgctgcgatttgtccaccgagtaggcttgcttgttcttgcatatgtaacaagccaaacagcagaatcaccgcttcccaggggtggtcttccataaggcggcgaatcaccactgttgccagtggccagtcagtaccaggatacacacctgatgatggcgatcaatgccttgaaacaggcaacaagctctcttttgctactgtgaaggaggctttcatcagcctgaactctgtgggtgtcagaagtgagctaattcttctagctctaccagcagtcttgggtcaagctattgatccaatagcgcaacttatggagactgcatacatcggtagattaggtgcactggaattggcatcggctggtattggtatatcgatttttaatattgtgtcaaagatcttcaacataccactgttgagcattgcaacctcatttgtggcagaggatatttctaggagtgctaccaagcatcctagttcaggcaaattggagctgacatctgtatcatctgccctgatcttagctgctggaattggtatctccaatgcacagacctgctaaactctttctttcattgagagctctcggagcacctgcaaatgtgattatgttggcagtccaaggtatctttcggggattcaaggatacaaagactccggtgttttatataggtttgggcaatctttctgctgtagcccttcttcctctacttatatatggctttaagcttggcataactggtgctgcaatttctacagttgtgtcacagtacattattacagttcttcttctttggtctctaagtaaaagagctgttttgcttcctccgcgaatagatcaattagagtttggtggatatctaaaatctggtggaatgctgttgggaagaactctttcgattctgctaactatgaccattggtacatcaatggctgctcggcaaggcccaacagcgatggctgctcatcagatttgtttgcaagtatggcttgctgtatccttgcttgcagatgcattagctgtttctgcccaggcgctgatagcaagctcttatgcaatattggactacaaaaaagttcaaaagacagcaatgtttgcgttgcagataggagtgtttagtgggttagctttggccattggattgtatgcctcatttggcaatatagctagactgtttaccagtgacccagaggtcctaacggttgtcaaatcttgtgcactgtttgtctgtgccagtcagccaattaatgccctggccttcatctttgacggtctacattatggtgtatcagattttgaatatgtggctcaagctactatcgtggtgggtgttacgtcttcactcgtcctgttatgggctccgtctgtattcggcctggctggagtttgggctggtttgactacactcatggggttgcgtatggctgcaggcatcctgaggttgctacagaaagcgggcccttggtcgtttctgcacgaggagccataagctgaggtgtatcaactaccagcctgcgcagtttggagctgctaacttactgctgggagtttacatcactgcaaagattatccgagtgtcatggaggactcgctgaagatgttacccctgttactcctccggctcagaacaaaatctgacttcattgcatttcttaaaatcagtctgctagatggcatggtttggtttggattggtttggtgaaggcgtgaggcccatctgaacatcggtgcggcctctatttttttttggcgaactcctttgtatgctatagcagctgtgcagtttctgtagaagaaaagatacaaggatcatttatagcatcgatatatgatgtatgcaactcctctgaattgtactcggtgtaaattattttagaaccgttttgttgattaggtactacgtgcatcttcc

SEQ ID NO: 29872 - DNA, 2357 bp, Zea Mays
aattgtgccctggccttatccactaacgtttctgatcgaaacgaagcattcccccgttcctgtctctgcttactcacctctcccatgagacgaagcataaaatcaaataggatatgtgggttggaaataggtcgtgaaattgattgaaatacctggggcttgagcgtgatatatagagggtggtagagaccaagcgacgttgggcgagcggcgccgccggggctgcgttggtcccttcaccggtgatgagcatccaccagatacaggaatgaacaacattgtgtaggcacctcgtccagacatctaaggcgaaaaatgctgcgcctgcaccaccatagtgcacctgtctctccgcacgctgcgatttgtccaccgagtaggcttgcttgttcttgcatatgtaacaagccaaacagcagaatcaccgcttcccaggggtggtcttccataaggcggcgaatcaccactgttgccagtggccagtcagtaccaggatacacacctgatgatggcgatcaatgccttgaaacaggcaacaagctctcttttgctactgtgaaggaggctttcatcagcctgaactctgtgggtgtcagaagtgagctaattcttctagctctaccagcagtcttgggtcaagctattgatccaatagcgcaacttatggagactgcatacatcggtagattaggtgcactggaattggcatcggctggtattggtatatcgatttttaatattgtgtcaaagatcttcaacataccactgttgagcattgcaacctcatttgtggcagaggatatttctaggagtgctaccaagcatcctagttcaggcaaattggagctgacatctgtatcatctgccctgatcttagctgctggaattggtataatggaagcattagcattgttcctaggatcaggattgtttcttaaactaatgggcgtgtcacctgtatctccaatgcacagacctgctaaactctttctttcattgagagctctcggagcacctgcaaatgtgattatgttggcagtccaaggtatctttcggggattcaaggatacaaagactccggtgttttatataggtttgggcaatctttctgctgtagcccttcttcctctacttatatatggctttaagcttggcataactggtgctgcaatttctacagttgtgtcacagtacattattacagttcttcttctttggtctctaagtaaaagagctgttttgcttcctccgcgaatagatcaattagagtttggtggatatctaaaatctggtggaatgctgttgggaagaactctttcgattctgctaactatgaccattggtacatcaatggctgctcggcaaggcccaacagcgatggctgctcatcagatttgtttgcaagcgctgatagcaagctcttatgcaatattggactacaaaaaagttcaaaagacagcaatgtttgcgttgcagataggagtgtttagtgggttagctttggccattggattgtatgcctcatttggcaatatagctagactgtttaccagtgacccagaggtcctaacggttgtcaaatcttgtgcactggtaaatcctccaacgttatgttaatttctatgtcctctatgtcttttttttcctaatgttaactttcgtttcagtttgtctgtgccagtcagccaattaatgccctggccttcatctttgacggtctacattatggtgtatcagattttgaatatgtggctcaagctactatcgtggtgggtgttacgtcttcactcgtcctgttatgggctccgtctgtattcggcctggctggagtttgggctggtttgactacactcatggggttgcgtatggctgcaggcatcctgaggttgctacagaaagcgggcccttggtcgtttctgcacgaggagccataagctgaggtgtatcaactaccagcctgcgcagtttggagctgctaacttactgctgggagtttacatcactgcaaagattatccgagtgtcatggaggactcgctgaagatgttacccctgttactcctccggctcagaacaaaatctgacttcattgcatttcttaaaatcagtctgctagatggcatggtttggtttggattggtttggtgaaggcgtgaggcccatctgaacatcggtgcggcctctatttttttttggcgaactcctttgtatgctatagcagctgtgcagtttctgtagaagaaaagatacaaggatcatttatagcatcgatatatgatgtatgcaactcctctgaattgtactcggtgtaaattattttagaaccgttttgttgattaggtactacgtgcatcttcc

SEQ ID NO: 29873 - DNA, 2491 bp, Zea Mays
cgtttctgatcgaaacgaagcattcccccgttcctgtctctgcttactcacctctcccatgagacgaagcataaaatcaaataggatatgtgggttggaaataggtcgtgaaattgattgaaatacctggggcttgagcgtgatatatagagggtggtagagaccaagcgacgttgggcgagcggcgccgccggggctgcgttggtcccttcaccggtgatgagcatccaccagatacaggaatgaacaacattgtgtaggcacctcgtccagacatctaaggcgaaaaatgctgcgcctgcaccaccatagtgcacctgtctctccgcacgctgcgatttgtccaccgagtaggcttgcttgttcttgcatatgtaacaagccaaacagcagaatcaccgcttcccaggggtggtcttccataaggcggcgaatcaccactgttgccagtggccagtcagtaccaggatacacacctgatgatggcgatcaatgccttgaaacaggcaacaagctctcttttgctactgtgaaggaggctttcatgcctgaactctgtgggtgtcagaagtgagctaattcttctagctctaccagcagtcttgggtcaagctattgatccaatagcgcaacttatggagactgcatacatcggtagattaggtgcactggaattggcatcggctggtattggtatatcgatttttaatattgtgtcaaagatcttcaacataccactgttgagcattgcaacctcatttgtggcagaggatatttctaggagtgctaccaagcatcctagttcaggcaaattggagctgacatctgtatcatctgccctgatcttagctgctggaattggtataatggaagcattagcattgttcctaggatcaggattgtttcttaaactaatgggcgtgtcacctgtatctccaatgcacagacctgctaaactctttctttcattgagagctctcggagcacctgcaaatgtgattatgttggcagtccaaggtatctttcggggattcaaggatacaaagactccggtgttttatataggtttgggcaatctttctgctgtagcccttcttcctctacttatatatggctttaagcttggcataactggtgctgcaatttctacagttgtgtcacagtacattattacagttcttcttctttggtctctaagtaaaagagctgttttgcttcctccgcgaatagatcaattagagtttggtggatatctaaaatctggtggaatgctgttgggaagaactctttcgattctgctaactatgaccattggtacatcaatggctgctcggcaaggcccaacagcgatggctgctcatcagatttgtttgcaagtatggcttgctgtatccttgcttgcagatgcattagctgtttctgcccaggtatgtatgttgcgttctggaagtcatctggctgttaaaattggtttccctgaactctgctggtcaactatactgcaggcagagcctgcaaacttctagaacgtactattatgtaccctgagattgttcctagctcgttggtctatcagatgttacagtccaactaacttttcttcctcttttaggcgctgatagcaagctcttatgcaatattggactacaaaaaagttcaaaagacagcaatgtttgcgttgcagataggagtgtttagtgggttagctttggccattggattgtatgcctcatttggcaatatagctagactgtttaccagtgacccagaggtcctaacggttgtcaaatcttgtgcactgtttgtctgtgccagtcagccaattaatgccctggccttcatctttgacggtctacattatggtgtatcagattttgaatatgtggctcaagctactatcgtggtgggtgttacgtcttcactcgtcctgttatgggctccgtctgtattcggcctggctggagtttgggctggtttgactacactcatggggttgcgtatggctgcaggcatcctgaggttgctacagaaagcgggcccttggtcgtttctgcacgaggagccataagctgaggtgtatcaactaccagcctgcgcagtttggagctgctaacttactgctgggagtttacatcactgcaaagattatccgagtgtcatggaggactcgctgaagatgttacccctgttactcctccggctcagaacaaaatctgacttcattgcatttcttaaaatcagtctgctagatggcatggtttggtttggattggtttggtgaaggcgtgaggcccatctgaacatcggtgcggcctctatttttttttggcgaactcctttgtatgctatagcagctgtgcagtttctgtagaagaaaagatacaaggatcatttatagcatcgatatatgatgtatgcaactcctctgaattgtactcggtgtaaattattttagaaccgttttgttgattaggtactacgtgcatcttcc

SEQ ID NO: 29874 - DNA, 2486 bp, Zea Mays
cgtttctgatcgaaacgaagcattcccccgttcctgtctctgcttactcacctctcccatgagacgaagcataaaatcaaataggatatgtgggttggaaataggtcgtgaaattgattgaaatacctggggcttgagcgtgatatatagagggtggtagagaccaagcgacgttgggcgagcggcgccgccggggctgcgttggtcccttcaccggtgatgagcatccaccagatacaggaatgaacaacattgtgtaggcacctcgtccagacatctaaggcgaaaaatgctgcgcctgcaccaccatagtgcacctgtctctccgcacgctgcgatttgtccaccgagtaggcttgcttgttcttgcatatgtaacaagccaaacagcagaatcaccgcttcccaggggtggtcttccataaggcggcgaatcaccactgttgccagtggccagtcagtaccaggatacacacctgatgatggcgatcaatgccttgaaacaggcaacaagctctcttttgctactgtgaaggaggctttcatcagcctgaactctgtgggtgtcagaagtgagctaattcttctagctctaccagcagtcttgggtcaagctattgatccaatagcgcaacttatggagactgcatacatcggtagattaggtgcactggaattggcatcggctggtattggtatatcgatttttaatattgtgtcaaagatcttcaacataccactgttgagcattgcaacctcatttgtggcagaggatatttctaggagtgctaccaagcatcctagttcaggcaaattggagctgacatctgtatcatctgccctgatcttagctgctggaattggtataatggaagcattagcattgttcctaggatcaggattgtttcttaaactaatgggcgtgtcacctgtatctccaatgcacagacctgctaaactctttctttcattgagagctctcggagcacctgcaaatgtgattatgttggcagtccaaggtatctttcggggattcaaggatacaaagactccggtgttttatataggtttgggcaatctttctgctgtagcccttcttcctctacttatatatggctttaagcttggcataactggtgctgcaatttctacagttgtgtcacagtacattattacagttcttcttctttggtctctaagtaaaagagctgttttgcttcctccgcgaatagatcaattagagtttggtggatatctaaaatctgctctcttacagcttgaggaaaaaaataagttgtaaaaattcatgactgcagcatattcctttgagatctcatcatgtcaacaccttctgggcactaataaactcatgttgtgtttttcttttccttttttcttgttttccttattgttttggtatctttacttttatcatctatgtatgcttggatttgtaggtggaatgctgttgggaagaactctttcgattctgctaactatgaccattggtacatcaatggctgctcggcaaggcccaacagcgatggctgctcatcagatttgtttgcaagtatggcttgctgtatccttgcttgcagatgcattagctgtttctgcccaggcgctgatagcaagctcttatgcaatattggactacaaaaaagttcaaaagacagcaatgtttgcgttgcagataggagtgtttagtgggttagctttggccattggattgtatgcctcatttggcaatatagctagactgtttaccagtgacccagaggtcctaacggttgtcaaatcttgtgcactgtcagccaattaatgccctggccttcatctttgacggtctacattatggtgtatcagattttgaatatgtggctcaagctactatcgtggtgggtgttacgtcttcactcgtcctgttatgggctccgtctgtattcggcctggctggagtttgggctggtttgactacactcatggggttgcgtatggctgcaggcatcctgaggttgctacagaaagcgggcccttggtcgtttctgcacgaggagccataagctgaggtgtatcaactaccagcctgcgcagtttggagctgctaacttactgctgggagtttacatcactgcaaagattatccgagtgtcatggaggactcgctgaagatgttacccctgttactcctccggctcagaacaaaatctgacttcattgcatttcttaaaatcagtctgctagatggcatggtttggtttggattggtttggtgaaggcgtgaggcccatctgaacatcggtgcggcctctatttttttttggcgaactcctttgtatgctatagcagctgtgcagtttctgtagaagaaaagatacaaggatcatttatagcatcgatatatgatgtatgcaactcctctgaattgtactcggtgtaaattattttagaaccgttttgttgattaggtactacgtgcatcttcc

SEQ ID NO: 29875 - DNA, 2294 bp, Zea Mays
cgtttctgatcgaaacgaagcattcccccgttcctgtctctgcttactcacctctcccatgagacgaagcataaaatcaaataggatatgtgggttggaaataggtcgtgaaattgattgaaatacctggggcttgagcgtgatatatagagggtggtagagaccaagcgacgttgggcgagcggcgccgccggggctgcgttggtcccttcaccggtgatgagcatccaccagatacaggaatgaacaacattgtgtaggcacctcgtccagacatctaaggcgaaaaatgctgcgcctgcaccaccatagtgcacctgtctctccgcacgctgcgatttgtccaccgagtaggcttgcttgttcttgcatatgtaacaagccaaacagcagaatcaccgcttcccaggggtggtcttccataaggcggcgaatcaccactgttgccagtggccagtcagtaccaggatacacacctgatgatggcgatcaatgccttgaaacaggcaacaagctctcttttgctactgtgaaggaggctttcatcagcctgaactctgtgggtgtcagaagtgagctaattcttctagctctaccagcagtcttgggtcaagctattgatccaatagcgcaacttatggagactgcatacatcggtagattaggtgcactggaattggcatcggctggtattggtatatcgatttttaatattgtgtcaaagatcttcaacataccactgttgagcattgcaacctcatttgtggcagaggatatttctaggagtgctaccaagcatcctagttcaggcaaattggagctgacatctgtatcatctgccctgatcttagctgctggaattggtataatggaagcattagcattgttcctaggatcaggattgtttcttaaactaatgggcgtgtcacctgtatctccaatgcacagacctgctaaactctttctttcattgagagctctcggagcacctgcaaatgtgattatgttggcagtccaaggtatctttcggggattcaaggatacaaagactccggtgttttatataggtttgggcaatctttctgctgtagcccttcttcctctacttatatatggctttaagcttggcataactggtgctgcaatttctacagttgtgtcacagtacattattacagttcttcttctttggtctctaagtaaaagagctgttttgcttcctccgcgaatagatcaattagagtttggtggatatctaaaatctggtggaatgctgttgggaagaactctttcgattctgctaactatgaccattggtacatcaatggctgctcggcaaggcccaacagcgatggctgctcatcagatttgtttgcaagtatggcttgctgtatccttgcttgcagatgcattagctgtttctgcccaggcgctgatagcaagctcttatgcaatattggactacaaaaaagttcaaaagacagcaatgtttgcgttgcagataggagtgtttagtgggttagctttggccattggattgtatgcctcatttggcaatatagctagactgtttaccagtgacccagaggtcctaacggttgtcaaatcttgtgcactgtcagccaattaatgccctggccttcatctttgacggtctacattatggtgtatcagattttgaatatgtggctcaagctactatcgtggtgggtgttacgtcttcactcgtcctgttatgggctccgtctgtattcggcctggctggagtttgggctggtttgactacactcatggggttgcgtatggctgcaggcatcctgaggttgctacagaaagcgggcccttggtcgtttctgcacgaggagccataagctgaggtgtatcaactaccagcctgcgcagtttggagctgctaacttactgctgggagtttacatcactgcaaagattatccgagtgtcatggaggactcgctgaagatgttacccctgttactcctccggctcagaacaaaatctgacttcattgcatttcttaaaatcagtctgctagatggcatggtttggtttggattggtttggtgaaggcgtgaggcccatctgaacatcggtgcggcctctatttttttttggcgaactcctttgtatgctatagcagctgtgcagtttctgtagaagaaaagatacaaggatcatttatagcatcgatatatgatgtatgcaactcctctgaattgtactcggtgtaaattattttagaaccgttttgttgattaggtactacgtgcatcttcc

SEQ ID NO: 29876 - DNA, 3333 bp, Zea Mays
cgtttctgatcgaaacgaagcattcccccgttcctgtctctgcttactcacctctcccatgagacgaagcataaaatcaaataggatatgtgggttggaaataggtcgtgaaattgattgaaatacctggggcttgagcgtgatatatagagggtggtagagaccaagcgacgttgggcgagcggcgccgccggggctgcgttggtcccttcaccggtgatgagcatccaccagatacaggaatgaacaacattgtgtaggcacctcgtccagacatctaaggcgaaaaatgctgcgcctgcaccaccatagtgcacctgtctctccgcacgctgcgatttgtccaccgagtaggcttgcttgttcttgcatatgtaacaagccaaacagcagaatcaccgcttcccaggggtggtcttccataaggcggcgaatcaccactgttgccagtggccagtcagtaccaggatacacacctgatgatggcgatcaatgccttgaaacaggcaacaagctctcttttgctactgtgaaggaggctttcatcagcctgaactctgtgggtgtcagaagtgagctaattcttctagctctaccagcagtcttgggtcaagctattgatccaatagcgcaacttatggagactgcatacatcggtagattaggtgcactggaattggcatcggctggtattggtatatcgatttttaatattgtgtcaaagatcttcaacataccactgttgagcattgcaacctcatttgtggcagaggatatttctaggagtgctaccaagcatcctagttcaggcaaattggagctgacatctgtatcatctgccctgatcttagctgctggaattggtataatggaagcattagcattgttcctaggatcaggattgtttcttaaactaatgggcgtgtcacctgtatctccaatgcacagacctgctaaactctttctttcattgagagctctcggagcacctgcaaatgtgattatgttggcagtccaaggtatctttcggggattcaaggatacaaagactccggtgttttatataggtttgggcaatctttctgctgtagcccttcttcctctacttatatatggctttaagcttggcataactggtgctgcaatttctacagttgtgtcacagtacattattacagttcttcttctttggtctctaagtaaaagagctgttttgcttcctccgcgaatagatcaattagagtttggtggatatctaaaatctggtgaacttctgatgcagccactccactagttaatgatatttagtagtagattcatggtgcattctatatgaaacttcttcataatgtgtttttaccggctttcgtagcatcttttggtatactcattgttcggtttgtcggagttttggatctttcttgcttggagctttgagctattttggttaattttagaagtttggcccattaataacttcatttctgccagcatcatgtatttaatttggtccaagcagaaaaagggcactgaatgtctatgttctagatttctagcgaaagaccacatcgatctttatgatgtctttattctctagccacttgtatatcttcaccatcagccaatcagttagctaattgtgtcattttaaaataggtatctgattttaggaggaatatttatggatctgattaatgcaattagggcggtgcatggaggttggacgcttgagctgtcttgtagtggtcgtgtcttgtgtgtggcacatatgtaatctacagtggtgtggagggaggggactttcaagcctccctctcatgttttgttttttttcttctaccttaatgaaatgatacgcagttctcctatttgcaaacactataaaatttgccgtaaatggtaaaaatcatgaggccaatctatagtgtatgggggtgcaaaaggccttagaagcatttggccatgattatgttgttaggccgctcgttgatttttttttttgtttttggcacttttttctctttttttttggagcctgacctaatggccttgtatgagtcttcttatctgattttttttttagtataatgatgtgcagctctcttacagcttgaggaaaaaaataagttgtaaaaattcatgactgcagcatattcctttgagatctcatcatgtcaacaccttctgggcactaataaactcatgttgtgtttttcttttccttttttcttgttttccttattgttttggtatctttacttttatcatctatgtatgcttggatttgtaggtggaatgctgttgggaagaactctttcgattctgctaactatgaccattggtacatcaatggctgctcggcaaggcccaacagcgatggctgctcatcagatttgtttgcaagtatggcttgctgtatccttgcttgcagatgcattagctgtttctgcccaggcgctgatagcaagctcttatgcaatattggactacaaaaaagttcaaaagacagcaatgtttgcgttgcagataggagtgtttagtgggttagctttggccattggattgtatgcctcatttggcaatatagctagactgtttaccagtgacccagaggtcctaacggttgtcaaatcttgtgcactgtttgtctgtgccagtcagccaattaatgccctggccttcatctttgacggtctacattatggtgtatcagattttgaatatgtggctcaagctactatcgtggtgggtgttacgtcttcactcgtcctgttatgggctccgtctgtattcggcctggctggagtttgggctggtttgactacactcatggggttgcgtatggctgcaggcatcctgaggttgctacagaaagcgggcccttggtcgtttctgcacgaggagccataagctgaggtgtatcaactaccagcctgcgcagtttggagctgctaacttactgctgggagtttacatcactgcaaagattatccgagtgtcatggaggactcgctgaagatgttacccctgttactcctccggctcagaacaaaatctgacttcattgcatttcttaaaatcagtctgctagatggcatggtttggtttggattggtttggtgaaggcgtgaggcccatctgaacatcggtgcggcctctatttttttttggcgaactcctttgtatgctatagcagctgtgcagtttctgtagaagaaaagatacaaggatcatttatagcatcgatatatgatgtatgcaactcctctgaattgtactcggtgtaaattattttagaaccgttttgttgattaggtactacgtgcatcttcc

SEQ ID NO: 29877 - DNA, 2320 bp, Zea Mays
cgtttctgatcgaaacgaagcattcccccgttcctgtctctgcttactcacctctcccatgagacgaagcataaaatcaaataggatatgtgggttggaaataggtcgtgaaattgattgaaatacctggggcttgagcgtgatatatagagggtggtagagaccaagcgacgttgggcgagcggcgccgccggggctgcgttggtcccttcaccggtgatgagcatccaccagatacaggaatgaacaacattgtgtaggcacctcgtccagacatctaaggcgaaaaatgctgcgcctgcaccaccatagtgcacctgtctctccgcacgctgcgatttgtccaccgagtaggcttgcttgttcttgcatatgtaacaagccaaacagcagaatcaccgcttcccaggggtggtcttccataaggcggcgaatcaccactgttgccagtggccagtcagtaccaggatacacacctgatgatggcgatcaatgccttgaaacaggcaacaagctctcttttgctactgtgaaggaggctttcatatgaataaacagcagcctgaactctgtgggtgtcagaagtgagctaattcttctagctctaccagcagtcttgggtcaagctattgatccaatagcgcaacttatggagactgcatacatcggtagattaggtgcactggaattggcatcggctggtattggtatatcgatttttaatattgtgtcaaagatcttcaacataccactgttgagcattgcaacctcatttgtggcagaggatatttctaggagtgctaccaagcatcctagttcaggcaaattggagctgacatctgtatcatctgccctgatcttagctgctggaattggtataatggaagcattagcattgttcctaggatcaggattgtttcttaaactaatgggcgtgtcacctgtatctccaatgcacagacctgctaaactctttctttcattgagagctctcggagcacctgcaaatgtgattatgttggcagtccaaggtatctttcggggattcaaggatacaaagactccggtgttttatataggtttgggcaatctttctgctgtagcccttcttcctctacttatatatggctttaagcttggcataactggtgctgcaatttctacagttgtgtcacagtacattattacagttcttcttctttggtctctaagtaaaagagctgttttgcttcctccgcgaatagatcaattagagtttggtggatatctaaaatctggtggaatgctgttgggaagaactctttcgattctgctaactatgaccattggtacatcaatggctgctcggcaaggcccaacagcgatggctgctcatcagatttgtttgcaagtatggcttgctgtatccttgcttgcagatgcattagctgtttctgcccaggcgctgatagcaagctcttatgcaatattggactacaaaaaagttcaaaagacagcaatgtttgcgttgcagataggagtgtttagtgggttagctttggccattggattgtatgcctcatttggcaatatagctagactgtttaccagtgacccagaggtcctaacggttgtcaaatcttgtgcactgtttgtctgtgccagtcagccaattaatgccctggccttcatctttgacggtctacattatggtgtatcagattttgaatatgtggctcaagctactatcgtggtgggtgttacgtcttcactcgtcctgttatgggctccgtctgtattcggcctggctggagtttgggctggtttgactacactcatggggttgcgtatggctgcaggcatcctgaggttgctacagaaagcgggcccttggtcgtttctgcacgaggagccataagctgaggtgtatcaactaccagcctgcgcagtttggagctgctaacttactgctgggagtttacatcactgcaaagattatccgagtgtcatggaggactcgctgaagatgttacccctgttactcctccggctcagaacaaaatctgacttcattgcatttcttaaaatcagtctgctagatggcatggtttggtttggattggtttggtgaaggcgtgaggcccatctgaacatcggtgcggcctctatttttttttggcgaactcctttgtatgctatagcagctgtgcagtttctgtagaagaaaagatacaaggatcatttatagcatcgatatatgatgtatgcaactcctctgaattgtactcggtgtaaattattttagaaccgttttgttgattaggtactacgtgcatcttcc

SEQ ID NO: 29878 - DNA, 3277 bp, Zea Mays
cgtttctgatcgaaacgaagcattcccccgttcctgtctctgcttactcacctctcccatgagacgaagcataaaatcaaataggatatgtgggttggaaataggtcgtgaaattgattgaaatacctggggcttgagcgtgatatatagagggtggtagagaccaagcgacgttgggcgagcggcgccgccggggctgcgttggtcccttcaccggtgatgagcatccaccagatacaggaatgaacaacattgtgtaggcacctcgtccagacatctaaggcgaaaaatgctgcgcctgcaccaccatagtgcacctgtctctccgcacgctgcgatttgtccaccgagtaggcttgcttgttcttgcatatgtaacaagccaaacagcagaatcaccgcttcccaggggtggtcttccataaggcggcgaatcaccactgttgccagtggccagtcagtaccaggatacacacctgatgatggcgatcaatgccttgaaacaggcaacaagctctcttttgctactgtgaaggaggctttcatatgaataaacagcagcctgaactctgtgggtgtcagaagtgagctaattcttctagctctaccagcagtcttgggtcaagctattgatccaatagcgcaacttatggagactgcatacatcggtagattaggtgcactggaattggcatcggctggtattggtatatcgatttttaatattgtgtcaaagatcttcaacataccactgttgagcattgcaacctcatttgtggcagaggatatttctaggagtgctaccaagcatcctagttcaggcaaattggagctgacatctgtatcatctgccctgatcttagctgctggaattggtatctccaatgcacagacctgctaaactctttctttcattgagagctctcggagcacctgcaaatgtgattatgttggcagtccaaggtatctttcggggattcaaggatacaaagactccggtgttttatataggtttgggcaatctttctgctgtagcccttcttcctctacttatatatggctttaagcttggcataactggtgctgcaatttctacagttgtgtcacagtacattattacagttcttcttctttggtctctaagtaaaagagctgttttgcttcctccgcgaatagatcaattagagtttggtggatatctaaaatctggtgaacttctgatgcagccactccactagttaatgatatttagtagtagattcatggtgcattctatatgaaacttcttcataatgtgtttttaccggctttcgtagcatcttttggtatactcattgttcggtttgtcggagttttggatctttcttgcttggagctttgagctattttggttaattttagaagtttggcccattaataacttcatttctgccagcatcatgtatttaatttggtccaagcagaaaaagggcactgaatgtctatgttctagatttctagcgaaagaccacatcgatctttatgatgtctttattctctagccacttgtatatcttcaccatcagccaatcagttagctaattgtgtcattttaaaataggtatctgattttaggaggaatatttatggatctgattaatgcaattagggcggtgcatggaggttggacgcttgagctgtcttgtagtggtcgtgtcttgtgtgtggcacatatgtaatctacagtggtgtggagggaggggactttcaagcctccctctcatgttttgttttttttcttctaccttaatgaaatgatacgcagttctcctatttgcaaacactataaaatttgccgtaaatggtaaaaatcatgaggccaatctatagtgtatgggggtgcaaaaggccttagaagcatttggccatgattatgttgttaggccgctcgttgatttttttttttgtttttggcacttttttctctttttttttggagcctgacctaatggccttgtatgagtcttcttatctgattttttttttagtataatgatgtgcagctctcttacagcttgaggaaaaaaataagttgtaaaaattcatgactgcagcatattcctttgagatctcatcatgtcaacaccttctgggcactaataaactcatgttgtgtttttcttttccttttttcttgttttccttattgttttggtatctttacttttatcatctatgtatgcttggatttgtaggtggaatgctgttgggaagaactctttcgattctgctaactatgaccattggtacatcaatggctgctcggcaaggcccaacagcgatggctgctcatcagatttgtttgcaagtatggcttgctgtatccttgcttgcagatgcattagctgtttctgcccaggcgctgatagcaagctcttatgcaatattggactacaaaaaagttcaaaagacagcaatgtttgcgttgcagataggagtgtttagtgggttagctttggccattggattgtatgcctcatttggcaatatagctagactgtttaccagtgacccagaggtcctaacggttgtcaaatcttgtgcactgtttgtctgtgccagtcagccaattaatgccctggccttcatctttgacggtctacattatggtgtatcagattttgaatatgtggctcaagctactatcgtggtgggtgttacgtcttcactcgtcctgttatgggctccgtctgtattcggcctggctggagtttgggctggtttgactacactcatggggttgcgtatggctgcaggcatcctgaggttgctacagaaagcgggcccttggtcgtttctgcacgaggagccataagctgaggtgtatcaactaccagcctgcgcagtttggagctgctaacttactgctgggagtttacatcactgcaaagattatccgagtgtcatggaggactcgctgaagatgttacccctgttactcctccggctcagaacaaaatctgacttcattgcatttcttaaaatcagtctgctagatggcatggtttggtttggattggtttggtgaaggcgtgaggcccatctgaacatcggtgcggcctctatttttttttggcgaactcctttgtatgctatagcagctgtgcagtttctgtagaagaaaagatacaaggatcatttatagcatcgatatatgatgtatgcaactcctctgaattgtactcggtgtaaattattttagaaccgttttgttgattaggtactacgtgcatcttcc

SEQ ID NO: 29879 - DNA, 2298 bp, Zea Mays
cccctaggtctcgtgcgtgatctcgtctagaagcccggccgctgccgactcccactcccaccccccaggaggccaggacaggaacggaggtgcggccgcgttcccaagtcccaatccaaagcggcggggggtcccgcgctcgttaattcccttgccgtatccccaactatctcgcctcaccgtcgcctctcgccgcctgcctcgcttcttcttcgctcacaccacgtacgatacgagcctcaccagcgccggcgctgtagtgtgcagccctcctcctggatctctgcacccttcggcggccacgcctcgcgcgcgcgcgcggacatggaggtcgaataccacgagcaggagtacgtgcggagctcgagaggcgtgcagctcttcacctgcggctggctgcccgctgccgcatcgcccaaggcgctcgtcttcctctgccacggctacggcatggagtgcagtggcttcatgagagaatgcggcgtgcggctggcggcggccgggtacggcgtgttcgggatggactacgagggccacggcaagtcgatgggcgcgcgctgctacatccgcagtttccgccgcctcgtcgacgactgcggccatttcttcaagtccgtctgcgagcttgaggagtaccggggcaagagccggttcctgtacggcgagtccatgggtggcgcggtggcgctgctgctgcacaccgaggaccccgccttctgggacggcgccgtcctcgtggcgcccatgtgcaagatatcggagaaggtgaagccgcaccctctggtgatcacgctcctgacgcaggtggaggacgtgatccccaggtggaagatcgtgcccaccaagcaggacgtcatcgacgccgccttcaaggaccccgtcaagcgtgaaaagatcaggaggaaccagctgatctaccaggacaagccgcggctcaagactgcgttggagatgctcaggaccagcatgtacatagaagacagcttgtcacaggtgacgctgccgttcttcgtcctgcacggcgaggccgacacggtgacggacccggaggtgagccgcgcgctgtacgagcgttcggccagcgccgacaagaccatcaagctgtacccggggatgtggcacggcctcaccgccggggagcccgacgagaacgtggaggccatcttctccgacatcgtgtcctggctcaaccaccgcagccggagctgggccgtggaggaacgccatatgaccaggaagctggcgccagctccggccaagtccatcgaaggccacggcaccgtggacggcaaagtgcacacacaacaagggcgccctcggcggcgccagggcttcctctgcgggcttgccggccggacgcatcaccacgcggagatgtgaaagatagaatcgccgtctcggtcccggatcagatgggcgcctgctttcttcaaccatggcaaataaaggaatgatgacctgcggtttataatatagaggtcttattatgcttgtcaaagttatgtatgaccaatcattcccagtctggtgcagattcaaactcatgctcagatatatgtaatgtaagattataacgctattagcattctggataacccgttaacaatgacattacaaaatggtacgtcgttacatagtatagcgtgccaggctattttccgtactttaacaaacatttatatccctatataacaactacgtatagagcacagcgccaaaactgtatcaagtcatataccatacaaacgtgtcacttcaacaagttttgagcacttaagaaaggccaccagctgactcggtggacccttcctggtccccgaagatacgtttgcggaagtcagtgaccatgcggggaaggccctcacggaggggaaccttgggctcccagccgaggagctctttcgcgcggctgatgtcaggcttgcgcttgtgcggatcatctgcggtgttcggacggaactcgatgtgcgcctctgggtcgatggtgtcctggaccaccttagccagctccagcatgctgaattctccagggaccatatgtgttaaagatccgggcaatccttacctaagtaaagggaagaaaaaaaaaacgagctaacatagttgtactatagcccacaaaagttaatctgaatgctattgataccaaacatttggatggcacaaaaacctcaaggttggcaccacgatggtagtccatggttaatgtttcagctgtacgctttccctcatcatagcagctcctgacacctatcattaaaacagaagtatttttcatgaataaaaaaacgctttaag

SEQ ID NO: 29880 - DNA, 2812 bp, Zea Mays
aggtctcgtgcgtgatctcgtctagaagcccggccgctgccgactcccactcccaccccccaggaggccaggacaggaacggaggtgcggccgcgttcccaagtcccaatccaaagcggcggggggtcccgcgctcgttaattcccttgccgtatccccaactatctcgcctcaccgtcgcctctcgccgcctgcctcgcttcttcttcgctcacaccacgtacgatacgagcctcaccagcgccggcgctgtagtgtgcagccctcctcctggatctctgcacccttcggcggccacgcctcgcgcgcgcgcgcggacatggaggtcgaataccacgaggagtacgtgcggagctcgagaggcgtgcagctcttcacctgcggctggctgcccgctgccgcatcgcccaaggcgctcgtcttcctctgccacggctacggcatggagtgcagtggcttcatgagagaatgcggcgtgcggctggcggcggccgggtacggcgtgttcgggatggactacgagggccacggcaagtcgatgggcgcgcgctgctacatccgcagtttccgccgcctcgtcgacgactgcggccatttcttcaagtccgtctgcgagcttgaggagtaccggggcaagagccggttcctgtacggcgagtccatgggtggcgcggtggcgctgctgctgcacaccgaggaccccgccttctgggacggcgccgtcctcgtggcgcccatgtgcaagatatcggagaaggtgaagccgcaccctctggtgatcacgctcctgacgcaggtggaggacgtgatccccaggtggaagatcgtgcccaccaagcaggacgtcatcgacgccgccttcaaggaccccgtcaagcgtgaaaagatcaggaggaaccagctgatctaccaggacaagccgcggctcaagactgcgttggagatgctcaggaccagcatgtacatagaagacagcttgtcacaggtgacgctgccgttcttcgtcctgcacggcgaggccgacacggtgacggacccggaggtgagccgcgcgctgtacgagcgttcggccagcgccgacaagaccatcaagctgtacccggggatgtggcacggcctcaccgccggggagcccgacgagaacgtggaggccatcttctccgacatcgtgtcctggctcaaccaccgcagccggagctgggccgtggaggaacgccatatgaccaggaagctggcgccagctccggccaagtccatcgaaggccacggcaccgtggacggcaaagtgcacacacaacaagggcgccctcggcggcgccagggcttcctctgcgggcttgccggccggacgcatcaccacgcggagatgtgaaagatagaatcgccgtctcggtcccggatcagatgggcgcctgctttcttcaaccatggcaaataaaggaatgatgacctgcggtttataatatagaggtcttattatgcttgtcaaagttatgtatgaccaatcattcccagtctggtgcagattcaaactcatgctcagatatatgtaatgtaagattataacgctattagcattctggataacccgttaacaatgacattacaaaatggtacgtcgttacatagtatagcgtgccaggctattttccgtactttaacaaacatttatatccctatataacaactacgtatagagcacagcgccaaaactgtatcaagtcatataccatacaaacgtgtcacttcaacaagttttgagcacttaagaaaggccaccagctgactcggtggacccttcctggtccccgaagatacgtttgcggaagtcagtgaccatgcggggaaggccctcacggaggggaaccttgggctcccagccgaggagctctttcgcgcggctgatgtcaggcttgcgcttgtgcggatcatctgcggtgttcggacggaactcgatgtgcgcctctgggtcgatggtgtcctggaccaccttagccagctccagcatgctgaattctccagggttgccgaggttgaacggcccaatgtgctccccttccatgagcttcatcagcccttccacctgcggaaaaataggtgacaccagtagaaccaaaagaatcgggtagtggaacagaggcgtgactgatactcatcacgaagcatgatttctgaataactacatgtcttggcaagaaatgactgacagacagatctttggtggatcataaatatgcactcatatgacgcaaattgtatatgtcggggaatttggtattggcaggtttgtgcaaatgcccctttagtagtgatagagtgactcaccaaatctgagacatattgaaagctcctagtctgcttgccatcaccatagactgtcaaaggctccttcctcagcgcctgaaaaacataattcataatgaccatcttgttgccaaaatacaaagtgcatatgcgttaagaccttcaaagaggaggctgaagctggtggctacctgagcaacgaaattactgacaacacggccgtcatcaatgcacatgcgaggaccatatgtgttaaagatccgggcaatccttacctaagtaaagggaagaaaaaaaaaacgagctaacatagttgtactatagcccacaaaagttaatctgaatgctattgataccaaacatttggatggcacaaaaacctcaaggttggcaccacgatggtagtccatggttaatgtttcagctgtacgctttccctcatcatagcagctcctgacacctatcattaaaacagaagtatttttcatgaataaaaaaacgctttaag

SEQ ID NO: 29881 - DNA, 2211 bp, Zea Mays
gtagctcttccccaaataaattgattgtgccgttgcaacgtatgtaatttgagaaaccgtatcttatcaagtcgtgtcttataaaaagagagagagagagagagtggaaccagtatttataagcaatatgtgatgcatcatatcgtaaacttcagatcggataggaaagcgccaagacgctcacgctgccagctcagctcgtgttcgacccatgctttccacgaagcatgggcaagaccaagacggcaggagcaggggagcagcagctgatgataagctagctagccagagtcccactccactttacctccttgtcagctgctcgcacttgcagcgtcccgttcccgcacttctcttccttctcgtttcgtcctgcacagcgcacgcaactgccaccggccaccgcgcaaactccattgcgcgcagatcaagaccgccacacccaccaccagcgcttcagcgggagacgtgacgactgacgagacgaagcctctccccacggcgcctccccctccacatggcctgggctcgccttgcctcccgctcccgtctgcgccccgcggcctccgccgccggccgatcccgacacgcctcaacaccggctccgcctccgcctccgtccccacctaccacacgcacgcgctggcgccaggggcacggcaggaggtgctttgcgagcgccgcctacccggcgcaggcgacgccgggggaggcgtctgagctggtggatgtgccactggcgcagactggggaaggcatcgccgagtgcgagcttctgcgctggttcgtcgccgagggtgaccaagtagatgaattccagccactctgtgaagtacagagtgacaaagcaactatcgagataacaagtcgtttcaaggggaaagtacataagattcactttgtccctggtgacatagtgaaggttggtgaaactttactgaaaatggttgtgggtgacagccaaattgtttccccagataatatagttccatccgctggtaagtcccttggagtagagtctgcagttttctcaagtgaaggcaatgttcctggtggaaatctctctacaccagctgttaggcatctagcaaagcacaaaggtgtttgcaaacaacaatcgttagcttcggaagggaacattggtcaagttgagttactagaggaagggaaagcattactcgatgaggacttctatgaagataagaaaatccttctcaggggataccagagatcaatggtcaaatcaatgagcctggcagcaaaagttccacattttcattatctagaggagataaattgtgattctcttgtgcaactaaaaaccacatttcaaaatgagaacaaggatcaaactatcaagcacactttccttccgttcctcataaagtcactttctatggcactgagtaaataccctatgttgaacagttctttcattgaggaaactaacgaagttgtgttcaaggggcctcacaacattggggtggcgatggctacaacacatggattagtcgtgccaaacatcaagaaagtgcagtcgctatcaatattggagatcacgaaggaattggcgcgattgcatgagatggcatcacaaaacaggctaagcgctgcagatattgaaggtggcactataacacttagtaacataggtgccattggtggcaagtttggctctccacttctgaacctacctgaagttgccatcattgcccttgggcggattcaaaagcttcctcgcttcgatgatgacgaaaacgtttacccttcatccataatcaatgttactgttggagccgatcaccgagttgttgacggggccacggttgcaagattctgtaatgaatggaagagcctcgtggagaagccagagctgctcttgttgcatatgcgatgacccagtaatgtaccggtacatactacgacctgaaacggaggcattttggcataaaaaaataaatccatgtattcaaataaataaccaacgtggcttctctgcctggaaacagtggaaataaattgggagttattttcggagtcctaatcttatgttttcctttgctgaaattcatttttagggctatttgggaactccatttcttcaagggattttcattttccaagaaaaattagttcatttttctttggaaaaatagaaatctctttgaaaaatggagttcccaaactagctcttaaaaaatattgctgctt

SEQ ID NO: 29882 - DNA, 1998 bp, Zea Mays
cgcacttctcttccttctcgtttcgtcctgcacagcgcacgcaactgccaccggccaccgcgcaaactccattgcgcgcagatcaagaccgccacacccaccaccagcgcttcagcgggagacgtgacgactgacgagacgaagcctctccccacggcgcctccccctccacatggcctgggctcgccttgcctcccgctcccgtctgcgccccgcggcctccgccgccggccgatcccgacacgcctcaacaccggctccgcctccgcctccgtccccacctaccacacgcacggtacctgcggccacctccgcgccaccgctccggcgtctcctcctgcttccgcggcaccggtttgctgacgccacgccctcagcatcgaccgcgtggctgctcggtgcccgctggcgccaggggcacggcaggaggtgctttgcgagcgccgcctacccggcgcaggcgacgccgggggaggcgtctgagctggtggatgtgccactggcgcagactggggaaggcatcgccgagtgcgagcttctgcgctggttcgtcgccgagggtgaccaagtagatgaattccagccactctgtgaagtacagagtgacaaagcaactatcgagataacaagtcgtttcaaggggaaagtacataagattcactttgtccctggtgacatagtgaaggttggtgaaactttactgaaaatggttgtgggtgacagccaaattgtttccccagataatatagttccatccgctggtaagtcccttggagtagagtctgcagttttctcaagtgaaggcaatgttcctggtggaaatctctctacaccagctgttaggcatctagcaaagcagtatgggatcagcataaatgaaattgttgggacagggaaagatggtagggttttgaaagaagatgtgttgaattatgctgtcagcaaaggtgtttgcaaacaacaatcgttagcttcggaagggaacattggtcaagttgagttactagaggaagggaaagcattactcgatgaggacttctatgaagataagaaaatccttctcaggggataccagagatcaatggtcaaatcaatgagcctggcagcaaaagttccacattttcattatctagaggagataaattgtgattctcttgtgcaactaaaaaccacatttcaaaatgagaacaaggatcaaactatcaagcacactttccttccgttcctcataaagtcactttctatggcactgaggcctcacaacattggggtggcgatggctacaacacatggattagtcgtgccaaacatcaagaaagtgcagtcgctatcaatattggagatcacgaaggaattggcgcgattgcatgagatggcatcacaaaacaggctaagcgctgcagatattgaaggtggcactataacacttagtaacataggtgccattggtggcaagtttggctctccacttctgaacctacctgaagttgccatcattgcccttgggcggattcaaaagcttcctcgcttcgatgatgacgaaaacgtttacccttcatccataatcaatgttactgttggagccgatcaccgagttgttgacggggccacggttgcaagattctgtaatgaatggaagagcctcgtggagaagccagagctgctcttgttgcatatgcgatgacccagtaatgtaccggtacatactacgacctgaaacggaggcattttggcataaaaaaataaatccatgtattcaaataaataaccaacgtggcttctctgcctggaaacagtggaaataaattgggagttattttcggagtcctaatcttatgttttcctttgctgaaattcatttttagggctatttgggaactccatttcttcaagggattttcattttccaagaaaaattagttcatttttctttggaaaaatagaaatctctttgaaaaatggagttcccaaactagctcttaaaaaatattgctgctt

SEQ ID NO: 29883 - DNA, 456 bp, Zea Mays
aaaccactcgatttcaagtagcagcacctaggaaaccgggtgcagctcatcccacttggtcttgtagctagtggcacacctatgcaccgtgtacagcattagctgctgcggctgttgttgcaccgataaggcctgctacaaccccgcccccacaggcaacacttagcatcggaggtcgggtgctcctccaccttggcatgtacctcgcaagtccactctgccgctgaggacatggactgcaatgccacccatctgccattggaggagccttccgccagcagccaccacctccctcatcctctagctatcacagggagcttgcagctgcagatggaggagccttccctaagcgccagctccagctccgtcaggcccgggagcacggccaccctggaggcccggaggttgccagcaccgcggccgcgtcgatggagatggccgcgggaaccggaagtc

SEQ ID NO: 29884 - DNA, 2510 bp, Zea Mays
ttcttatctcctcgccgcacgtcttcttcctccgcccgacgctcctccctgttccctgtttctgcgcgcgcttagttcccatggcagctacgcccttcctctgctcggctgcttgcagcgagctctccaccgccctggatttctctatctccctcacggcaccctccctggcgctcgccctgggtgccgtcgtctagctcggacccgcccccagccgcgcctctctcgtcaagcttcatgacgcacgattttctctgccccagcccgacatttttctcctggtggtcgagctccctcaagcttcttagttcgtccgcccgcgaacgcccatggcgcggtcgcctctctgtgcacgcgccgtcgccctgatttcctgctccctgactccaactcaagttcgcttgaccgcgtgtgcccctacgccgcaccctgaagccccctgctcggcgcccgagacccctcccatggatgctcccagccgagcggctcccatggcgcctgatcccaacgccgctcctttcccccaacgcatcttcttcactagcgtgccgtccctgcttgccctctgctccaccgagcttctgcgtgttccatctccagcttgctcccctgcgccctcctaatactcgcgtccagatttttcctcgcctttggtgctcgtccagcccacccgtccctcctctctcctccccatcttctcccatgggcggtgcgagctttggctcgagctcgcctctgctcttgtgcttggattttgctaggcccgagcagcttcctggtgcgcgcccggatcctctcctccctccgctcggtcttggttccagtcgccgcgcccctctactgcgcgcgctgcttgctcccctgctggcaaccgagtccctcgcgctggccgttctccagctccagctcgctgcgcgccctgctccctgttgccacgtgctccagcccggatttcgccttgtcgcccaacttggctctgccctctgctctagctcgccgtcgcctctttgtgctggccgactagtctgccgtgatcgcgagcagttccctactcggccaggatggtcacgccgtcgatcccgcttgagccccttcgcgttcgtcgaagctccctggctcgactctgcccagttcgcgtcttgctcgcctttgcgtcgcgcgtagcattctgttgttcctgcgtgtgctgccgcgaagctccctgttcagttctcctccgtcgcgttgttgtgcgcgcgaagttctttgctcgcaacggcgtgtcgagtttccgcgtcgagctcttctcttgcatgccggtcgtcgtctccaagccgattcttggctgtcgtggtatttttagttatccggctgcgtcggtagttgtcaagtgtgtctgttgctgtgaactcgcccctggtgcccattctgtccccggtccacacttccttcagcttggccaggcggggcatcgtttcgtgttgtgctcgcgcagtttcctgctcgccagcgcgtccccttggcttgtttggccttaattctcatcgtgtcgttgatttcgccggttagcgtcattcgtcgtcgtgtcgtgtgtgtagctctatatacgtcaccctcctgtgtcgtcgtcgttccgcgcgtcatcaagaaatctcaagcgtcaggtgaagacgaagccaacagcgtggtgtttaccaagtgcgcgacaaaaagctcgaacatcctgcgcgactcaagttcgattcatcaaaattattcagtcgaggaaaagatcttcagcaattgattaccgaagaaaaaaggcccctggatgacgtcaaccggaacccgtagtcgtgcttccgattatctcgtcaaattagtcagggtaagttgattcgtattccagtcaactaggtttataaataggttaaatagaattgtttatctcaataaatgttattaatttagcatgtgtatgttgtgatgatcgataaatcgataaaaccagtaattaagatacatagtttaaagagttagtaaaaagttaggaataaaaatagatgttctagtgttattatgtcaatttggttaatggatgtagtcgatgccctgctgtgatattcatgatgcttaatgcttgttaattgattttaatgcttgattttaagtgtttcattctttttagtgtagattatttatattatactcgttatactcgtgctcatacatgtgcatcatgcatctcatgaggtacgataaataattgcgtgaagtggaagatgagtcaagtcgaccccaagcgcggactaatttgcaagctgatgctggtggattaacctgaagatggataatcagagcaatgcgaagacaaaggatggtcgtcaagtggacgccacctaacaacactaacctagtgttattcaggcaagccccggtgcatttgccacctccttgtgttttaaaatctttatcaccttgtttgatgcattaggtgataggagttgtgtgctaaaccgttgatgcttttctttccttgaaaattgattacc

SEQ ID NO: 29885 - DNA, 2354 bp, Zea Mays
agtcaagttattttaggcatgtccgctgcttggacccatacgtcagatgtaacaaaatccagacccgagcgatcgtgccccggcccccgatcctgattcccacaaatttccgccatggcgatccgcccggactgatgcccgattctccatctgacgatcctcgattggggggaattctggtggggttcgtgtgggcgcgtagggcccctgacgacctggcctgacgcatcagcggcgagccatggctccggcttccgttccagctctacctacagccatggatactaaggacgagggcgacggtggctccaagaaccaaaacagcgtggtggtggtgaaatccgaggttgtctgcacgaatggtggccctctggtggtgaggcagacaatggtgaaccagaagtgaattctagcctgtctgctcatgccaatggtgttggcccctcaaaaccccctagaaggaaaaaggtgatggctgagtggagcaattctgttcgtccaattcagtggagatgccactggttagagttgcgtatgagggagctttcatctcaaatatcgaagtatgacaaggagcttgctctaatcaagaaacagaatgaattacaacaggcagcaagcaaagcaaatggtactatgtcagaatcgatgcagattcataaaggccatggaaacagtatcatgaagaggagaaagaggaagaggcatgaggacagtgtggatgcgtccttgtacatcaacaagcaccagatattgtcatactaccatgataaacaaaataagggagttcaaaccggtgatctcttagttgatgacgattgtggcacagttgatggtagtatcagtggtggacttgatactactacattgcttgattccgaggattatgatatgatttgtgagcaacacgctttacaggatattctcctgacaattgatgggcttcagtctcgagtccatctgctgcaagatcgtctcagcaaagctcattctgaaggagaaaatttggcattttctggggccgatactgatgtcagagtggctgggaagagacagcgtactcaaaagcactcattctctaatacaaagtctcgacatactaaaccacagaaaaggaagaatctaaatatcttgctgaaggatgatgatgatggacaagctcttgcaggcggacctgctttggctgatggggaaactgatgtgcatatgataggtgctagtaggagtactgaagaaagaagtggagagtgcaatcactcgagggacaaagccatcacagtggacctactgttgggtactggcaattccataacaaatagtgatattggggatttatacaatgtaaacactgatgatgtcctcatagccaatcaagcagccgttgaagcttgtcagcagtttcatgaggcaaagcatctgccttctggaagtccttccaaagacaagatcatttctgctccagcagaaatgaagaataattctccaccagtggaggtgaagaacacttgcggtccagtaaaaattgagagcttgtgttctccagttgaaggagaaaacacttctgatccagcattggagcaagaatcgttccttgaaaagtcaccctcgaggcagcctgtatccccggggaacaagcaggagctgaaacctaagaaaagacggaagaagaaaggctctttatttactaagaagcagcggaaggtggactccagaacacctgatgcaaaggaaaaaactgagggcacgccctctgatgtagcagaggaaactgagagcccactctctggtgcaacaggaccaggaaccatgaggtcttgctgtgctggaaagaagcgcaaatctggaaatgaacctgcagatgcaaataaaactgggaagccatcctcagcagtgaagaagcagaaaactgaaaacccgactgcagctgcaaatgcgacaaagaagcgggccacggagaagaagctagagagcgcgagtgcctcccagaagctgcaggttgagaaagctgtgcttgtcgctgtaaatagcaggaggagccaaagggtccgtaagcccaaagtttttgctgactgaagaagcaggtagaaagtcttaggctctctattgtgtatgtatcttgtagccccgtcatcaaaatcggtggccatagcaacataggaagtgcctggatcgcctcataagttagtgtacatatatcagctatgtctcacccaaattgtagatttgttagtttgttgttcttaacccttctcttctgggctgccagattaacaatgtcatgctgtgttagcgttatatcaaaaagaagaaaaaaaaaggagaaaaatatgccatgcaactgcaacttggcccgt

SEQ ID NO: 29886 - DNA, 2324 bp, Zea Mays
agtcaagttattttaggcatgtccgctgcttggacccatacgtcagatgtaacaaaatccagacccgagcgatcgtgccccggcccccgatcctgattcccacaaatttccgccatggcgatccgcccggactgatgcccgattctccatctgacgatcctcgattggggggaattctggtggggttcgtgtgggcgcgtagggcccctgacgacctggcctgacgcatcagcggcgagccatggctccggcttccgttccagctctacctacagccatggatactaaggacgagggcgacggtggctccaagaaccaaaacagcgtggtggtggtgaaatccgaggtgaggcagacaatggtgaaccagaagtgaattctagcctgtctgctcatgccaatggtgttggcccctcaaaaccccctagaaggaaaaaggtgatggctgagtggagcaattctgttcgtccaattcagtggagatgccactggttagagttgcgtatgagggagctttcatctcaaatatcgaagtatgacaaggagcttgctctaatcaagaaacagaatgaattacaacaggcagcaagcaaagcaaatggtactatgtcagaatcgatgcagattcataaaggccatggaaacagtatcatgaagaggagaaagaggaagaggcatgaggacagtgtggatgcgtccttgtacatcaacaagcaccagatattgtcatactaccatgataaacaaaataagggagttcaaaccggtgatctcttagttgatgacgattgtggcacagttgatggtagtatcagtggtggacttgatactactacattgcttgattccgaggattatgatatgatttgtgagcaacacgctttacaggatattctcctgacaattgatgggcttcagtctcgagtccatctgctgcaagatcgtctcagcaaagctcattctgaaggagaaaatttggcattttctggggccgatactgatgtcagagtggctgggaagagacagcgtactcaaaagcactcattctctaatacaaagtctcgacatactaaaccacagaaaaggaagaatctaaatatcttgctgaaggatgatgatgatggacaagctcttgcaggcggacctgctttggctgatggggaaactgatgtgcatatgataggtgctagtaggagtactgaagaaagaagtggagagtgcaatcactcgagggacaaagccatcacagtggacctactgttgggtactggcaattccataacaaatagtgatattggggatttatacaatgtaaacactgatgatgtcctcatagccaatcaagcagccgttgaagcttgtcagcagtttcatgaggcaaagcatctgccttctggaagtccttccaaagacaagatcatttctgctccagcagaaatgaagaataattctccaccagtggaggtgaagaacacttgcggtccagtaaaaattgagagcttgtgttctccagttgaaggagaaaacacttctgatccagcattggagcaagaatcgttccttgaaaagtcaccctcgaggcagcctgtatccccggggaacaagcaggagctgaaacctaagaaaagacggaagaagaaaggctctttatttactaagaagcagcggaaggtggactccagaacacctgatgcaaaggaaaaaactgagggcacgccctctgatgtagcagaggaaactgagagcccactctctggtgcaacaggaccaggaaccatgaggtcttgctgtgctggaaagaagcgcaaatctggaaatgaacctgcagatgcaaataaaactgggaagccatcctcagcagtgaagaagcagaaaactgaaaacccgactgcagctgcaaatgcgacaaagaagcgggccacggagaagaagctagagagcgcgagtgcctcccagaagctgcaggttgagaaagctgtgcttgtcgctgtaaatagcaggaggagccaaagggtccgtaagcccaaagtttttgctgactgaagaagcaggtagaaagtcttaggctctctattgtgtatgtatcttgtagccccgtcatcaaaatcggtggccatagcaacataggaagtgcctggatcgcctcataagttagtgtacatatatcagctatgtctcacccaaattgtagatttgttagtttgttgttcttaacccttctcttctgggctgccagattaacaatgtcatgctgtgttagcgttatatcaaaaagaagaaaaaaaaaggagaaaaatatgccatgcaactgcaacttggcccgt

SEQ ID NO: 29887 - DNA, 2372 bp, Zea Mays
ggcaacgaggagacccattttgacaaattctctcctcgccctcgcctccacttttgagccacagacccgagcgatcgtgccccggcccccgatcctgattcccacaaatttccgccatggcgatccgcccggactgatgcccgattctccatctgacgatcctcgcggcgagccatggctccggcttccgttccagctctacctacagccatggatactaaggacgagggcgacggtggctccaagaaccaaaacagcgtggtggtggtgaaatccgaggttgtctgcacgaatggtggccctctggtggtcgggactgaacttgtgaaatacgagggaggtgataccactgaatgctcgagctcgtttggtgacacctgctctggatttgaaggtgaggcagacaatggtgaaccagaagtgaattctagcctgtctgctcatgccaatggtgttggcccctcaaaaccccctagaaggaaaaaggtgatggctgagtggagcaattctgttcgtccaattcagtggagatgccactggttagagttgcgtatgagggagctttcatctcaaatatcgaagtatgacaaggagcttgctctaatcaagaaacagaatgaattacaacaggcagcaagcaaagcaaatggtactatgtcagaatcgatgcagattcataaaggccatggaaacagtatcatgaagaggagaaagaggaagaggcatgaggacagtgtggatgcgtccttgtacatcaacaagcaccagatattgtcatactaccatgataaacaaaataagggagttcaaaccggtgatctcttagttgatgacgattgtggcacagttgatggtagtatcagtggtggacttgatactactacattgcttgattccgaggattatgatatgatttgtgagcaacacgctttacaggatattctcctgacaattgatgggcttcagtctcgagtccatctgctgcaagatcgtctcagcaaagctcattctgaaggagaaaatttggcattttctggggccgatactgatgtcagagtggctgggaagagacagcgtactcaaaagcactcattctctaatacaaagtctcgacatactaaaccacagaaaaggaagaatctaaatatcttgctgaaggatgatgatgatggacaagctcttgcaggcggacctgctttggctgatggggaaactgatgtgcatatgataggtgctagtaggagtactgaagaaagaagtggagagtgcaatcactcgagggacaaagccatcacagtggacctactgttgggtactggcaattccataacaaatagtgatattggggatttatacaatgtaaacactgatgatgtcctcatagccaatcaagcagccgttgaagcttgtcagcagtttcatgaggcaaagcatctgccttctggaagtccttccaaagacaagatcatttctgctccagcagaaatgaagaataattctccaccagtggaggtgaagaacacttgcggtccagtaaaaattgagagcttgtgttctccagttgaaggagaaaacacttctgatccagcattggagcaagaatcgttccttgaaaagtcaccctcgaggcagcctgtatccccggggaacaagcaggagctgaaacctaagaaaagacggaagaagaaaggctctttatttactaagaagcagcggaaggtggactccagaacacctgatgcaaaggaaaaaactgagggcacgccctctgatgtagcagaggaaactgagagcccactctctggtgcaacaggaccaggaaccatgaggtcttgctgtgctggaaagaagcgcaaatctggaaatgaacctgcagatgcaaataaaactgggaagccatcctcagcagtgaagaagcagaaaactgaaaacccgactgcagctgcaaatgcgacaaagaagcgggccacggagaagaagctagagagcgcgagtgcctcccagaagctgcaggttgagaaagctgtgcttgtcgctgtaaatagcaggaggagccaaagggtccgtaagcccaaagtttttgctgactgaagaagcaggtagaaagtcttaggctctctattgtgtatgtatcttgtagccccgtcatcaaaatcggtggccatagcaacataggaagtgcctggatcgcctcataagttagtgtacatatatcagctatgtctcacccaaattgtagatttgttagtttgttgttcttaacccttctcttctgggctgccagattaacaatgtcatgctgtgttagcgttatatcaaaaagaagaaaaaaaaaggagaaaaatatgccatgcaactgcaacttggcccgt

SEQ ID NO: 29888 - DNA, 2061 bp, Zea Mays
ggcaacgaggagacccattttgacaaattctctcctcgccctcgcctccacttttgagccacagacccgagcgatcgtgccccggcccccgatcctgattcccacaaatttccgccatggcgatccgcccggactgatgcccgattctccatctgacgatcctcgaaggaaaaaggtgatggctgagtggagcaattctgttcgtccaattcagtggagatgccactggttagagttgcgtatgagggagctttcatctcaaatatcgaagtatgacaaggagcttgctctaatcaagaaacagaatgaattacaacaggcagcaagcaaagcaaatggtactatgtcagaatcgatgcagattcataaaggccatggaaacagtatcatgaagaggagaaagaggaagaggcatgaggacagtgtggatgcgtccttgtacatcaacaagcaccagatattgtcatactaccatgataaacaaaataagggagttcaaaccggtgatctcttagttgatgacgattgtggcacagttgatggtagtatcagtggtggacttgatactactacattgcttgattccgaggattatgatatgatttgtgagcaacacgctttacaggatattctcctgacaattgatgggcttcagtctcgagtccatctgctgcaagatcgtctcagcaaagctcattctgaaggagaaaatttggcattttctggggccgatactgatgtcagagtggctgggaagagacagcgtactcaaaagcactcattctctaatacaaagtctcgacatactaaaccacagaaaaggaagaatctaaatatcttgctgaaggatgatgatgatggacaagctcttgcaggcggacctgctttggctgatggggaaactgatgtgcatatgataggtgctagtaggagtactgaagaaagaagtggagagtgcaatcactcgagggacaaagccatcacagtggacctactgttgggtactggcaattccataacaaatagtgatattggggatttatacaatgtaaacactgatgatgtcctcatagccaatcaagcagccgttgaagcttgtcagcagtttcatgaggcaaagcatctgccttctggaagtccttccaaagacaagatcatttctgctccagcagaaatgaagaataattctccaccagtggaggtgaagaacacttgcggtccagtaaaaattgagagcttgtgttctccagttgaaggagaaaacacttctgatccagcattggagcaagaatcgttccttgaaaagtcaccctcgaggcagcctgtatccccggggaacaagcaggagctgaaacctaagaaaagacggaagaagaaaggctctttatttactaagaagcagcggaaggtggactccagaacacctgatgcaaaggaaaaaactgagggcacgccctctgatgtagcagaggaaactgagagcccactctctggtgcaacaggaccaggaaccatgaggtcttgctgtgctggaaagaagcgcaaatctggaaatgaacctgcagatgcaaataaaactgggaagccatcctcagcagtgaagaagcagaaaactgaaaacccgactgcagctgcaaatgcgacaaagaagcgggccacggagaagaagctagagagcgcgagtgcctcccagaagctgcaggttgagaaagctgtgcttgtcgctgtaaatagcaggaggagccaaagggtccgtaagcccaaagtttttgctgactgaagaagcaggtagaaagtcttaggctctctattgtgtatgtatcttgtagccccgtcatcaaaatcggtggccatagcaacataggaagtgcctggatcgcctcataagttagtgtacatatatcagctatgtctcacccaaattgtagatttgttagtttgttgttcttaacccttctcttctgggctgccagattaacaatgtcatgctgtgttagcgttatatcaaaaagaagaaaaaaaaaggagaaaaatatgccatgcaactgcaacttggcccgt

SEQ ID NO: 29889 - DNA, 1930 bp, Zea Mays
cttatgctaagtatgcttatcacgataagaaaagaaggaaaaaggtgatggctgagtggagcaattctgttcgtccaattcagtggagatgccactggttagagttgcgtatgagggagctttcatctcaaatatcgaagtatgacaaggagcttgctctaatcaagaaacagaatgaattacaacaggcagcaagcaaagcaaatggtactatgtcagaatcgatgcagattcataaaggccatggaaacagtatcatgaagaggagaaagaggaagaggcatgaggacagtgtggatgcgtccttgtacatcaacaagcaccagatattgtcatactaccatgataaacaaaataagggagttcaaaccggtgatctcttagttgatgacgattgtggcacagttgatggtagtatcagtggtggacttgatactactacattgcttgattccgaggattatgatatgatttgtgagcaacacgctttacaggatattctcctgacaattgatgggcttcagtctcgagtccatctgctgcaagatcgtctcagcaaagctcattctgaaggagaaaatttggcattttctggggccgatactgatgtcagagtggctgggaagagacagcgtactcaaaagcactcattctctaatacaaagtctcgacatactaaaccacagaaaaggaagaatctaaatatcttgctgaaggatgatgatgatggacaagctcttgcaggcggacctgctttggctgatggggaaactgatgtgcatatgataggtgctagtaggagtactgaagaaagaagtggagagtgcaatcactcgagggacaaagccatcacagtggacctactgttgggtactggcaattccataacaaatagtgatattggggatttatacaatgtaaacactgatgatgtcctcatagccaatcaagcagccgttgaagcttgtcagcagtttcatgaggcaaagcatctgccttctggaagtccttccaaagacaagatcatttctgctccagcagaaatgaagaataattctccaccagtggaggtgaagaacacttgcggtccagtaaaaattgagagcttgtgttctccagttgaaggagaaaacacttctgatccagcattggagcaagaatcgttccttgaaaagtcaccctcgaggcagcctgtatccccggggaacaagcaggagctgaaacctaagaaaagacggaagaagaaaggctctttatttactaagaagcagcggaaggtggactccagaacacctgatgcaaaggaaaaaactgagggcacgccctctgatgtagcagaggaaactgagagcccactctctggtgcaacaggaccaggaaccatgaggtcttgctgtgctggaaagaagcgcaaatctggaaatgaacctgcagatgcaaataaaactgggaagccatcctcagcagtgaagaagcagaaaactgaaaacccgactgcagctgcaaatgcgacaaagaagcgggccacggagaagaagctagagagcgcgagtgcctcccagaagctgcaggttgagaaagctgtgcttgtcgctgtaaatagcaggaggagccaaagggtccgtaagcccaaagtttttgctgactgaagaagcaggtagaaagtcttaggctctctattgtgtatgtatcttgtagccccgtcatcaaaatcggtggccatagcaacataggaagtgcctggatcgcctcataagttagtgtacatatatcagctatgtctcacccaaattgtagatttgttagtttgttgttcttaacccttctcttctgggctgccagattaacaatgtcatgctgtgttagcgttatatcaaaaagaagaaaaaaaaaggagaaaaatatgccatgcaactgcaacttggcccgt

SEQ ID NO: 29890 - DNA, 2208 bp, Zea Mays
atggcgccgcggggcggcgtggtggggtccggggcaatgctggggctggacatgcacctcgcccagcagcggatgcaccaggccgccgcgttccagcaccagcaggacagccacaacggtgggttccagctgcagcagccgtcgccggtggcggtgaggcagcaacagccgccgccgtcgtcgttcatgccctactccaccaacacgtcgtcgtccagggtcgtggtgagcgcggcagcggtgggtcacgacgacgaaatggtgggcaacggcggcggcgggaagggcggagtggtggtgcagcagcagcagcagcagcagctggcgtcggcggggtgcccgtggacgaggatgaagtggacggacgccatggtgcgcctgctcatcagggtggtgtacagcgtcggggacgacggcgagggcgtggcgacggctggcggcgccgggggagcggccaaggcgggccccggccacgcggcggcggcgcagcagcagaagaagggcaagtggaagtcggtgtcacacgccatgatggacaagggcttcgtggtgtcgccgcagcagtgcgaggacaagttcaacgacctgaacaagcgctacaagcgcgtggtcgacctgctgggccgcggccgcgcctgccgcgtggtcgagaaccacgcgctgctggacgccatcgacgagctcacgcccaaggccaagaacgaggcgcgcaagctgctcagctccaagcacctcttcttccgcgagatgtgcgcctaccacaatagcatcgccgccgcgggctcgaacctgccgccgcacggcggcggcggcgcggcgggcgacaccgcctgcctccaccacccgccgccggcgcccgtggccgccgcggcctcgtctgccgctcgctacgcccacgcgcagcagcatgcggcaccgtccccgcaggggatgaaggactcctccactgacgtcgcagacgacagcgacgatgccatgagcgacaacggggacgaggacgaggacgaggaggaggaggacggccccgtgtaccgcagccgccgccccagaagtcgtcagcacagcggcgggcgcggcaagcgcgggcgtggcatggatggcgccgcgtccgaggacctcgaggacgaggcggacggcggcggtgggagacgctcgaggacggcggcggcacccgacccgtcggcgatactgcggcagctgaagagcgagctcgcggctgcgaccgccgcggcgatggacccgcagcaggccaggagctgggtgcgccgccgcgcggtggaggtggaggagcagcagatcgtcctggagtcccacgcgtactacctggagcgccagcggctgaagtgggagcggttccgcgccagcaaggagcgcgacatggaacgctcccgcctgcagaacgaccgcctccgcatcgagagccgacgcctgctgctcatgctccgccacaaggacgtcgacctcgacatggccgaggcgaactcttcctccgtcgaccaccacaccggcgcgtcgccgctcgcagcacaccagcagcagccgattgggtccagccccagcccgtccaccgccggccacccaaactagctgccgtgcgcgccctgccattccattactgggagcggccagtagctgttctttttttaaagcaaattaaactttagttctatcattaacagcagcagttctctaggacaaaaggtcactagtgctcaagtctcagggttttttctttcattgtagtagtcaatgtcagggtttcagtgtagcatgttcatagtcatagtatactatgcgctgtgtagctgtcaggtcagactataatgcatgttgttgaaccctaatcgatgtttctgttctcgattttggtacaaccgcacgcacagaaactgagacggcatggcgcaggccgacaggctgctccgtaccaaatgtctttccttggtgataaaaggaatgtctttccttggcatcggaagtcgcgtacctgcaaggctgctatagaggatagaagttcccagcgtagcgccgggccgccggcgagcaattgacgcttttcgccttttccagcagaagatcctccaatggcagctcggcaaggttgatgggaaaggaaacttagacgtgattagtttttatttgagaggatttatttagcattctaaccatgttttcgagaaatagatgtatttgttcattacatccaac

SEQ ID NO: 29891 - DNA, 3090 bp, Zea Mays
tccgtcgtctcctacgcctccatccacactccacagccacgccacagtcgttgcccaccacccagagcacgcggcggcttgtcgccgtgcgcgccgccaccatcaccacacgaggcgccggagaaagacatcaagcgcacgcccatggccatgactcctcacgcctcggcggccaccgtagccgttacccctgcgttgcgctttccccacactttgtctgccacgggcctctcctcaccgcctctggctgggggctgcggcggctgccgggttcggttccggcccagccagcgcggccgaggcacgcaggggcggcgaggtggctctcacgtgtcgcgcgtggggggcctgctgggcaccgtattcggcgggggcggccgcgacgacggggaggccacgcggaagaagtacgcagacaccgtggcgcgtatcaactccatggagctcgaggtctccgcgctctcagacgctgatttgcgtgcacgcaccgctgcgctccaggaccgtgctcgctccggggaatccctggattcccttctccccgaagcatttgctgttgtgagggaggcttccaagagagttctaggcctccggccctttgatgtgcagttgattggtggtatggttctgcacaagggggagattgctgaaatgaagaccggagaggggaagactcttgtggccattctgccagcatacttaaatgctttgagtgggaaaggagtgcatgttgtcactgtaaatgattatctcgcaagacgtgattgtgagtgggttggtcaagtcccccgatttctaggactgcaggttggcttaattcaacagaacatgacacctgagcaaaggagggaaaattactcatatgatattacttatgtcacaaacagtgagcttggttttgattatctaagagataaccttgcaatgactgtagatgaacttgtcttgaggaacttcaattactgtgtgatagatgaagttgattcaatccttattgatgaagcaagaacacctcttataatatcaggcctagctgaaaagccaagtgatcggtattacaaagcagcaaaaatagctgaagcttttgagcgagacattcattacacggtggatgaaaagcagagaaacgttttacttacagaagaaggttatgctgatgctgaagaaatactggacatagatgatctgtacgatcctcgtgaacagtgggcttcgtatattctaaatgcaatcaaggctaaggagctcttccttaaagatgtcaattacattgttcgtagcaaggaagtgcttattgtagatgagtttactggcagagttatggcgggcaggcgatggagtgatggtctccatcaagcaattgaagcaaaagaaggtgtacctatacaaaatgaaaccataactctcgcatcaataagttaccaaaacttctttcttcagttccccaaactatgtggcatgactggaactgcagctacagagacccaagagtttgagagcatatataaacttaaagttactgttgtcccaacaaacaagccaatgatacggaaggatgactcagatgttgttttcagagcaacaaatggaaaatggcgtgctgttcttgttgagatatcaagaatgaataaagttggccgtcctgtgcttgttggtaccaccagtgttgagcaaagcgaatctttatcaaagcaattgcgtgaagctgggattcctcacgaggtcctgaatgctaagccagagaatgttgagagggaggcagagatcgtagctcagagtggacgccttggtgctgtgacaattgctaccaatatggcgggacgtggaactgatattatccttggtggcaatgcagaattcatggccaggttgaagttgcgtgagatccttatgccaagagtcgtcaatccaatagatggtgttattgtatccaaaaagcagatgccaccaagaaagacatggaagacaaatgaaagcttgttcccatgtgaactttcaaaagaaacattatcgtctgtcaaggatacagttgaaatggctgtcaaagaatggggagataaatcattaactgaactggaagcagaagagcggctgtcctattcatgtgagaagggaccaacacgtgatgaagtaatagcgaatttgagaaatgcatttgtgaagatagcagacgaatataaagtttacactgaggaggaaaagcagaaggtcattacagtaggtgggcttcacgtagtaggaacagagcgccatgaatcacgcagaattgacaatcagctccgtggtcgaagtggaagacagggggatcctggaagctctcgcttctttcttagtctcgaggataatattttccggatctttggaggtgacaggatacagggtctgatgcaagcattccgagttgaagatcttcctatcgaatcgaaaatgctaacgagggctctagatgaagcgcagcggaaagttgagaattacttttttgacatcaggaagcagttgtttgagtatgatgaggtattgaatagccagagagatcgtgtatatgcggaaagaagacgtgctcttgcatctgacagtcttcaatcacttattgtggaatatgctgaattgacaatggacgacatattaggggctaacataggacctgatactccaaaggaaaattgggacctgaacaaacttatagctaagctgcaacagtattgccatctgttggatgacttgacaccagaattgttggagggcaaaagctcaagctacgacgatttgcgggagtacctgcgtaagcgagggcgtgaagcttacttccagaaaactgttagttatttctccttttcctttcatggatattgttttttcgcatggttcaaaggttttaagaagttcaacaacaacaacatcaacatagccttttagtcccaaacaagttggggtaggctagagttgaaacccaacaagaagtcaccaaaaagagaaagagagagaaaggggaggggaaaaagtttttgagagaactaaaagggaaaaggcctaatcacagttcgggcacgtggatagtttttttccaagcacttctatccaaacacaact

SEQ ID NO: 29892 - DNA, 3071 bp, Zea Mays
gtcgtctcctacgcctccatccacactccacagccacgccacagtcgttgcccaccacccagagcacgcggcggcttgtcgccgtgcgcgccgccaccatcaccacacgaggcgccggagaaagacatcaagcgcacgcccatggccatgactcctcacgcctcggcggccaccgtagccgttacccctgcgttgcgctttccccacactttgtctgccacgggcctctcctcaccgcctctggctgggggctgcggcggctgccgggttcggttccggcccagccagcgcggccgaggcacgcaggggcggcgaggtggctctcacgtgtcgcgcgtggggggcctgctgggcaccgtattcggcgggggcggccgcgacgacggggaggccacgcggaagaagtacgcagacaccgtggcgcgtatcaactccatggagctcgaggtctccgcgctctcagacgctgatttgcgtgcacgcaccgctgcgctccaggaccgtgctcgctccggggaatccctggattcccttctccccgaagcatttgctgttgtgagggaggcttccaagagagttctaggcctccggccctttgatgtgcagttgattggtggtatggttctgcacaagggggagattgctgaaatgaagaccggagaggggaagactcttgtggccattctgccagcatacttaaatgctttgagtgggaaaggagtgcatgttgtcactgtaaatgattatctcgcaagacgtgattgtgagtgggttggtcaagtcccccgatttctaggactgcagagaacatgacacctgagcaaaggagggaaaattactcatatgatattacttatgtcacaaacagtgagcttggttttgattatctaagagataaccttgcaatgactgtagatgaacttgtcttgaggaacttcaattactgtgtgatagatgaagttgattcaatccttattgatgaagcaagaacacctcttataatatcaggcctagctgaaaagccaagtgatcggtattacaaagcagcaaaaatagctgaagcttttgagcgagacattcattacacggtggatgaaaagcagagaaacgttttacttacagaagaaggttatgctgatgctgaagaaatactggacatagatgatctgtacgatcctcgtgaacagtgggcttcgtatattctaaatgcaatcaaggctaaggagctcttccttaaagatgtcaattacattgttcgtagcaaggaagtgcttattgtagatgagtttactggcagagttatggcgggcaggcgatggagtgatggtctccatcaagcaattgaagcaaaagaaggtgtacctatacaaaatgaaaccataactctcgcatcaataagttaccaaaacttctttcttcagttccccaaactatgtggcatgactggaactgcagctacagagacccaagagtttgagagcatatataaacttaaagttactgttgtcccaacaaacaagccaatgatacggaaggatgactcagatgttgttttcagagcaacaaatggaaaatggcgtgctgttcttgttgagatatcaagaatgaataaagttggccgtcctgtgcttgttggtaccaccagtgttgagcaaagcgaatctttatcaaagcaattgcgtgaagctgggattcctcacgaggtcctgaatgctaagccagagaatgttgagagggaggcagagatcgtagctcagagtggacgccttggtgctgtgacaattgctaccaatatggcgggacgtggaactgatattatccttggtggcaatgcagaattcatggccaggttgaagttgcgtgagatccttatgccaagagtcgtcaatccaatagatggtgttattgtatccaaaaagcagatgccaccaagaaagacatggaagacaaatgaaagcttgttcccatgtgaactttcaaaagaaacattatcgtctgtcaaggatacagttgaaatggctgtcaaagaatggggagataaatcattaactgaactggaagcagaagagcggctgtcctattcatgtgagaagggaccaacacgtgatgaagtaatagcgaatttgagaaatgcatttgtgaagatagcagacgaatataaagtttacactgaggaggaaaagcagaaggtcattacagtaggtgggcttcacgtagtaggaacagagcgccatgaatcacgcagaattgacaatcagctccgtggtcgaagtggaagacagggggatcctggaagctctcgcttctttcttagtctcgaggataatattttccggatctttggaggtgacaggatacagggtctgatgcaagcattccgagttgaagatcttcctatcgaatcgaaaatgctaacgagggctctagatgaagcgcagcggaaagttgagaattacttttttgacatcaggaagcagttgtttgagtatgatgaggtattgaatagccagagagatcgtgtatatgcggaaagaagacgtgctcttgcatctgacagtcttcaatcacttattgtggaatatgctgaattgacaatggacgacatattaggggctaacataggacctgatactccaaaggaaaattgggacctgaacaaacttatagctaagctgcaacagtattgccatctgttggatgacttgacaccagaattgttggagggcaaaagctcaagctacgacgatttgcgggagtacctgcgtaagcgagggcgtgaagcttacttccagaaaactgttagttatttctccttttcctttcatggatattgttttttcgcatggttcaaaggttttaagaagttcaacaacaacaacatcaacatagccttttagtcccaaacaagttggggtaggctagagttgaaacccaacaagaagtcaccaaaaagagaaagagagagaaaggggaggggaaaaagtttttgagagaactaaaagggaaaaggcctaatcacagttcgggcacgtggatagtttttttccaagcacttctatccaaacacaact

SEQ ID NO: 29893 - DNA, 3015 bp, Zea Mays
ctacgcctccatccacactccacagccacgccacagtcgttgcccaccacccagagcacgcggcggcttgtcgccgtgcgcgccgccaccatcaccacacgaggcgccggagaaagacatcaagcgcacgcccatggccatgactcctcacgcctcggcggccaccgtagccgttacccctgcgttgcgctttccccacactttgtctgccacgggcctctcctcaccgcctctggctgggggctgcggcggctgccgggttcggttccggcccagccagcgcggccgaggcacgcaggggcggcgaggtggctctcacgtgtcgcgcgtggggggcctgctgggcaccgtattcggcgggggcggccgcgacgacggggaggccacgcggaagaagtacgcagacaccgtggcgcgtatcaactccatggagctcgaggtctccgcgctctcagacgctgatttgcgtgcacgcaccgctgcgctccaggaccgtgctcgctccggggaatccctggattcccttctccccgaagcatttgctgttgtgagggaggcttccaagagagttctaggcctccggccctttgatgtgcagttgattggtggtatggttctgcacaagggggagattgctgaaatgaagaccggagaggggaagactcttgtggccattctgccagcatacttaaatgctttgagtgggaaaggagtgcatgttgtcactgtaaatgattatctcgcaagacgtgattgtgagtgggttggtcaagtcccccgatttctaggactgcaggttggcttaattcaacagaacatgacacctgagcaaaggagggaaaattactcatatgatattacttatgtcacaaacagtgagcttggttttgattatctaagagataaccttgcaatgactgtagatgaacttgtcttgaggaacttcaattactgtgtgatagatgaagttgattcaatccttattgatgaagcaagaacacctcttataatatcaggcctagctgaaaagccaagtgatcggtattacaaagcagcaaaaatagctgaagcttttgagcgagacattcattacacggtggatgaaaagcagagaaacgttttacttacagaagaaggttatgctgatgctgaagaaatactggacatagatgatctgtacgatcctcgtgaacagtgggcttcgtatattctaaatgcaatcaaggctaaggagctcttccttaaagatgtcaattacattgttcgtagcaaggaagtgcttattgtagatgagtttactggcagagttatggcgggcaggcgatggagtgatggtctccatcaagcaattgaagcaaaagaaggtgtacctatacaaaatgaaaccataactctcgcatcaataagttaccaaaacttctttcttcagttccccaaactatgtggcatgactggaactgcagctacagagacccaagagtttgagagcatatataaacttaaagttactgttgtcccaacaaacaagccaatgatacggaaggatgactcagatgttgttttcagagcaacaaatggaaaatggcgtgctgttcttgttgagatatcaagaatgaataaagttggccgtcctgtgcttgttggtaccaccagtgttgagcaaagcgaatctttatcaaagcaattgcgtgaagctgggattcctcacgaggtcctgaatgctaagccagagaatgttgagagggaggcagagatcgtagctcagagtggacgccttggtgctgtgacaattgctaccaatatggcgggacgtggaactgatattatccttggtggcaatgcagaattcatggccaggttgaagttgcgtgagatccttatgccaagagtcgtcaatccaatagatggtgttattgtatccaaaaagcagatgccaccaagaaagacatggaagttgaaatggctgtcaaagaatggggagataaatcattaactgaactggaagcagaagagcggctgtcctattcatgtgagaagggaccaacacgtgatgaagtaatagcgaatttgagaaatgcatttgtgaagatagcagacgaatataaagtttacactgaggaggaaaagcagaaggtcattacagtaggtgggcttcacgtagtaggaacagagcgccatgaatcacgcagaattgacaatcagctccgtggtcgaagtggaagacagggggatcctggaagctctcgcttctttcttagtctcgaggataatattttccggatctttggaggtgacaggatacagggtctgatgcaagcattccgagttgaagatcttcctatcgaatcgaaaatgctaacgagggctctagatgaagcgcagcggaaagttgagaattacttttttgacatcaggaagcagttgtttgagtatgatgaggtattgaatagccagagagatcgtgtatatgcggaaagaagacgtgctcttgcatctgacagtcttcaatcacttattgtggaatatgctgaattgacaatggacgacatattaggggctaacataggacctgatactccaaaggaaaattgggacctgaacaaacttatagctaagctgcaacagtattgccatctgttggatgacttgacaccagaattgttggagggcaaaagctcaagctacgacgatttgcgggagtacctgcgtaagcgagggcgtgaagcttacttccagaaaactgttagttatttctccttttcctttcatggatattgttttttcgcatggttcaaaggttttaagaagttcaacaacaacaacatcaacatagccttttagtcccaaacaagttggggtaggctagagttgaaacccaacaagaagtcaccaaaaagagaaagagagagaaaggggaggggaaaaagtttttgagagaactaaaagggaaaaggcctaatcacagttcgggcacgtggatagtttttttccaagcacttctatccaaacacaact

SEQ ID NO: 29894 - DNA, 3062 bp, Zea Mays
ccacactccacagccacgccacagtcgttgcccaccacccagagcacgcggcggcttgtcgccgtgcgcgccgccaccatcaccacacgaggcgccggagaaagacatcaagcgcacgcccatggccatgactcctcacgcctcggcggccaccgtagccgttacccctgcgttgcgctttccccacactttgtctgccacgggcctctcctcaccgcctctggctgggggctgcggcggctgccgggttcggttccggcccagccagcgcggccgaggcacgcaggggcggcgaggtggctctcacgtgtcgcgcgtggggggcctgctgggcaccgtattcggcgggggcggccgcgacgacggggaggccacgcggaagaagtacgcagacaccgtggcgcgtatcaactccatggagctcgaggtctccgcgctctcagacgctgatttgcgtgcacgcaccgctgcgctccaggaccgtgctcgctccggggaatccctggattcccttctccccgaagcatttgctgttgtgagggaggcttccaagagagttctaggcctccggccctttgatgtgcagttgattggtggtatggttctgcacaagggggagattgctgaaatgaagaccggagaggggaagactcttgtggccattctgccagcatacttaaatgctttgagtgggaaaggagtgcatgttgtcactgtaaatgattatctcgcaagacgtgattgtgagtgggttggtcaagtcccccgatttctaggactgcaggttggcttaattcaacagaacatgacacctgagcaaaggagggaaaattactcatatgatattacttatgtcacaaacagtgagcttggttttgattatctaagagataaccttgcaatgactgtagatgaacttgtcttgaggaacttcaattactgtgtgatagatgaagttgattcaatccttattgatgaagcaagaacacctcttataatatcaggcctagctgaaaagccaagtgatcggtattacaaagcagcaaaaatagctgaagcttttgagcgagacattcattacacggtggatgaaaagcagagaaacgttttacttacagaagaaggttatgctgatgctgaagaaatactggacatagatgatctgtacgatcctcgtgaacagtgggcttcgtatattctaaatgcaatcaaggctaaggagctcttccttaaagatgtcaattacattgttcgtagcaaggaagtgcttattgtagatgagtttactggcagagttatggcggcgatggagtgatggtctccatcaagcaattgaagcaaaagaaggtgtacctatacaaaatgaaaccataactctcgcatcaataagttaccaaaacttctttcttcagttccccaaactatgtggcatgactggaactgcagctacagagacccaagagtttgagagcatatataaacttaaagttactgttgtcccaacaaacaagccaatgatacggaaggatgactcagatgttgttttcagagcaacaaatggaaaatggcgtgctgttcttgttgagatatcaagaatgaataaagttggccgtcctgtgcttgttggtaccaccagtgttgagcaaagcgaatctttatcaaagcaattgcgtgaagctgggattcctcacgaggtcctgaatgctaagccagagaatgttgagagggaggcagagatcgtagctcagagtggacgccttggtgctgtgacaattgctaccaatatggcgggacgtggaactgatattatccttggtggcaatgcagaattcatggccaggttgaagttgcgtgagatccttatgccaagagtcgtcaatccaatagatggtgttattgtatccaaaaagcagatgccaccaagaaagacatggaagacaaatgaaagcttgttcccatgtgaactttcaaaagaaacattatcgtctgtcaaggatacagttgaaatggctgtcaaagaatggggagataaatcattaactgaactggaagcagaagagcggctgtcctattcatgtgagaagggaccaacacgtgatgaagtaatagcgaatttgagaaatgcatttgtgaagatagcagacgaatataaagtttacactgaggaggaaaagcagaaggtcattacagtaggtgggcttcacgtagtaggaacagagcgccatgaatcacgcagaattgacaatcagctccgtggtcgaagtggaagacagggggatcctggaagctctcgcttctttcttagtctcgaggataatattttccggatctttggaggtgacaggatacagggtctgatgcaagcattccgagttgaagatcttcctatcgaatcgaaaatgctaacgagggctctagatgaagcgcagcggaaagttgagaattacttttttgacatcaggaagcagttgtttgagtatgatgaggtattgaatagccagagagatcgtgtatatgcggaaagaagacgtgctcttgcatctgacagtcttcaatcacttattgtggaatatgctgaattgacaatggacgacatattaggggctaacataggacctgatactccaaaggaaaattgggacctgaacaaacttatagctaagctgcaacagtattgccatctgttggatgacttgacaccagaattgttggagggcaaaagctcaagctacgacgatttgcgggagtacctgcgtaagcgagggcgtgaagcttacttccagaaaactgttagttatttctccttttcctttcatggatattgttttttcgcatggttcaaaggttttaagaagttcaacaacaacaacatcaacatagccttttagtcccaaacaagttggggtaggctagagttgaaacccaacaagaagtcaccaaaaagagaaagagagagaaaggggaggggaaaaagtttttgagagaactaaaagggaaaaggcctaatcacagttcgggcacgtggatagtttttttccaagcacttctatccaaacacaact

SEQ ID NO: 29895 - DNA, 2816 bp, Zea Mays
cgccacagtcgttgcccaccacccagagcacgcggcggcttgtcgccgtgcgcgccgccaccatcaccacacgaggcgccggagaaagacatcaagcgcacgcccatggccatgactcctcacgcctcggcggccaccgtagccgttacccctgcgttgcgctttccccacactttgtctgccacgggcctctcctcaccgcctctggctgggggctgcggcggctgccgggttcggttccggcccagccagcgcggccgaggcacgcaggggcggcgaggtggctctcacgtgtcgcgcgtggggggcctgctgggcaccgtattcggcgggggcggccgcgacgacggggaggccacgcggaagaagtacgcagacaccgtggcgcgtatcaactccatggagctcgaggtctccgcgctctcagacgctgatttgcgtgcacgcaccgctgcgctccaggaccgtgctcgctccggggaatccctggattcccttctccccgaagcatttgctgttgtgagggaggcttccaagagagttctaggcctccggccctttgatgtgcagttgattggtggtatggttctgcacaagggggagattgctgaaatgaagaccggagaggggaagactcttgtggccattctgccagcatacttaaatgctttgagtgggaaaggagtgcatgttgtcactgtaaatgattatctcgcaagacgtgattgtgagtgggttggtcaagtcccccgatttctaggactgcagagaacatgacacctgagcaaaggagggaaaattactcatatgatattacttatgtcacaaacagtgagcttggttttgattatctaagagataaccttgcaatgactgtagatgaacttgtcttgaggaacttcaattactgtgtgatagatgaagttgattcaatccttattgatgaagcaagaacacctcttataatatcaggcctagctgaaaagccaagtgatcggtattacaaagcagcaaaaatagctgaagcttttgagcgagacattcattacacggtggatgaaaagcagagaaacgttttacttacagaagaaggttatgctgatgctgaagaaatactggacatagatgatctgtacgatcctcgtgaacagtgggcttcgtatattctaaatgcaatcaaggctaaggagctcttccttaaagatgtcaattacattgttcgtagcaaggaagtgcttattgtagatgagtttactggcagagttatggcggcgatggagtgatggtctccatcaagcaattgaagcaaaagaaggtgtacctatacaaaatgaaaccataactctcgcatcaataagttaccaaaacttctttcttcagttccccaaactatgtggcatgactggaactgcagctacagagacccaagagtttgagagcatatataaacttaaagttactgttgtcccaacaaacaagccaatgatacggaaggatgactcagatgttgttttcagagcaacaaatggaaaatggcgtgctgttcttgttgagatatcaagaatgaataaagttggccgtcctgtgcttgttggtaccaccagtgttgagcaaagcgaatctttatcaaagcaattgcgtgaagctgggattcctcacgaggtcctgaatgctaagccagagaatgttgagagggaggcagagatcgtagctcagagtggacgccttggtgctgtgacaattgctaccaatatggcgggacgtggaactgatattatccttggtggcaatgcagaattcatggccaggttgaagttgcgtgagatccttatgccaagggaccaacacgtgatgaagtaatagcgaatttgagaaatgcatttgtgaagatagcagacgaatataaagtttacactgaggaggaaaagcagaaggtcattacagtaggtgggcttcacgtagtaggaacagagcgccatgaatcacgcagaattgacaatcagctccgtggtcgaagtggaagacagggggatcctggaagctctcgcttctttcttagtctcgaggataatattttccggatctttggaggtgacaggatacagggtctgatgcaagcattccgagttgaagatcttcctatcgaatcgaaaatgctaacgagggctctagatgaagcgcagcggaaagttgagaattacttttttgacatcaggaagcagttgtttgagtatgatgaggtattgaatagccagagagatcgtgtatatgcggaaagaagacgtgctcttgcatctgacagtcttcaatcacttattgtggaatatgctgaattgacaatggacgacatattaggggctaacataggacctgatactccaaaggaaaattgggacctgaacaaacttatagctaagctgcaacagtattgccatctgttggatgacttgacaccagaattgttggagggcaaaagctcaagctacgacgatttgcgggagtacctgcgtaagcgagggcgtgaagcttacttccagaaaactgttagttatttctccttttcctttcatggatattgttttttcgcatggttcaaaggttttaagaagttcaacaacaacaacatcaacatagccttttagtcccaaacaagttggggtaggctagagttgaaacccaacaagaagtcaccaaaaagagaaagagagagaaaggggaggggaaaaagtttttgagagaactaaaagggaaaaggcctaatcacagttcgggcacgtggatagtttttttccaagcacttctatccaaacacaact

SEQ ID NO: 29896 - DNA, 3030 bp, Zea Mays
cgccacagtcgttgcccaccacccagagcacgcggcggcttgtcgccgtgcgcgccgccaccatcaccacacgaggcgccggagaaagacatcaagcgcacgcccatggccatgactcctcacgcctcggcggccaccgtagccgttacccctgcgttgcgctttccccacactttgtctgccacgggcctctcctcaccgcctctggctgggggctgcggcggctgccgggttcggttccggcccagccagcgcggccgaggcacgcaggggcggcgaggtggctctcacgtgtcgcgcgtggggggcctgctgggcaccgtattcggcgggggcggccgcgacgacggggaggccacgcggaagaagtacgcagacaccgtggcgcgtatcaactccatggagctcgaggtctccgcgctctcagacgctgatttgcgtgcacgcaccgctgcgctccaggaccgtgctcgctccggggaatccctggattcccttctccccgaagcatttgctgttgtgagggaggcttccaagagagttctaggcctccggccctttgatgtgcagttgattggtggtatggttctgcacaagggggagattgctgaaatgaagaccggagaggggaagactcttgtggccattctgccagcatacttaaatgctttgagtgggaaaggagtgcatgttgtcactgtaaatgattatctcgcaagacgtgattgtgagtgggttggtcaagtcccccgatttctaggactgcagagaacatgacacctgagcaaaggagggaaaattactcatatgatattacttatgtcacaaacagtgagcttggttttgattatctaagagataaccttgcaatgactgtagatgaacttgtcttgaggaacttcaattactgtgtgatagatgaagttgattcaatccttattgatgaagcaagaacacctcttataatatcaggcctagctgaaaagccaagtgatcggtattacaaagcagcaaaaatagctgaagcttttgagcgagacattcattacacggtggatgaaaagcagagaaacgttttacttacagaagaaggttatgctgatgctgaagaaatactggacatagatgatctgtacgatcctcgtgaacagtgggcttcgtatattctaaatgcaatcaaggctaaggagctcttccttaaagatgtcaattacattgttcgtagcaaggaagtgcttattgtagatgagtttactggcagagttatggcggcgatggagtgatggtctccatcaagcaattgaagcaaaagaaggtgtacctatacaaaatgaaaccataactctcgcatcaataagttaccaaaacttctttcttcagttccccaaactatgtggcatgactggaactgcagctacagagacccaagagtttgagagcatatataaacttaaagttactgttgtcccaacaaacaagccaatgatacggaaggatgactcagatgttgttttcagagcaacaaatggaaaatggcgtgctgttcttgttgagatatcaagaatgaataaagttggccgtcctgtgcttgttggtaccaccagtgttgagcaaagcgaatctttatcaaagcaattgcgtgaagctgggattcctcacgaggtcctgaatgctaagccagagaatgttgagagggaggcagagatcgtagctcagagtggacgccttggtgctgtgacaattgctaccaatatggcgggacgtggaactgatattatccttggtggcaatgcagaattcatggccaggttgaagttgcgtgagatccttatgccaagagtcgtcaatccaatagatggtgttattgtatccaaaaagcagatgccaccaagaaagacatggaagacaaatgaaagcttgttcccatgtgaactttcaaaagaaacattatcgtctgtcaaggatacagttgaaatggctgtcaaagaatggggagataaatcattaactgaactggaagcagaagagcggctgtcctattcatgtgagaagggaccaacacgtgatgaagtaatagcgaatttgagaaatgcatttgtgaagatagcagacgaatataaagtttacactgaggaggaaaagcagaaggtcattacagtaggtgggcttcacgtagtaggaacagagcgccatgaatcacgcagaattgacaatcagctccgtggtcgaagtggaagacagggggatcctggaagctctcgcttctttcttagtctcgaggataatattttccggatctttggaggtgacaggatacagggtctgatgcaagcattccgagttgaagatcttcctatcgaatcgaaaatgctaacgagggctctagatgaagcgcagcggaaagttgagaattacttttttgacatcaggaagcagttgtttgagtatgatgaggtattgaatagccagagagatcgtgtatatgcggaaagaagacgtgctcttgcatctgacagtcttcaatcacttattgtggaatatgctgaattgacaatggacgacatattaggggctaacataggacctgatactccaaaggaaaattgggacctgaacaaacttatagctaagctgcaacagtattgccatctgttggatgacttgacaccagaattgttggagggcaaaagctcaagctacgacgatttgcgggagtacctgcgtaagcgagggcgtgaagcttacttccagaaaactgttagttatttctccttttcctttcatggatattgttttttcgcatggttcaaaggttttaagaagttcaacaacaacaacatcaacatagccttttagtcccaaacaagttggggtaggctagagttgaaacccaacaagaagtcaccaaaaagagaaagagagagaaaggggaggggaaaaagtttttgagagaactaaaagggaaaaggcctaatcacagttcgggcacgtggatagtttttttccaagcacttctatccaaacacaact

SEQ ID NO: 29897 - DNA, 2971 bp, Zea Mays
cgccacagtcgttgcccaccacccagagcacgcggcggcttgtcgccgtgcgcgccgccaccatcaccacacgaggcgccggagaaagacatcaagcgcacgcccatggccatgactcctcacgcctcggcggccaccgtagccgttacccctgcgttgcgctttccccacactttgtctgccacgggcctctcctcaccgcctctggctgggggctgcggcggctgccgggttcggttccggcccagccagcgcggccgaggcacgcaggggcggcgaggtggctctcacgtgtcgcgcgtggggggcctgctgggcaccgtattcggcgggggcggccgcgacgacggggaggccacgcggaagaagtacgcagacaccgtggcgcgtatcaactccatggagctcgaggtctccgcgctctcagacgctgatttgcgtgcacgcaccgctgcgctccaggaccgtgctcgctccggggaatccctggattcccttctccccgaagcatttgctgttgtgagggaggcttccaagagagttctaggcctccggccctttgatgtgcagttgattggtggtatggttctgcacaagggggagattgctgaaatgaagaccggagaggggaagactcttgtggccattctgccagcatacttaaatgctttgagtgggaaaggagtgcatgttgtcactgtaaatgattatctcgcaagacgtgattgtgagtgggttggtcaagtcccccgatttctaggactgcagagaacatgacacctgagcaaaggagggaaaattactcatatgatattacttatgtcacaaacagtgagcttggttttgattatctaagagataaccttgcaatgactgtagatgaacttgtcttgaggaacttcaattactgtgtgatagatgaagttgattcaatccttattgatgaagcaagaacacctcttataatatcaggcctagctgaaaagccaagtgatcggtattacaaagcagcaaaaatagctgaagcttttgagcgagacattcattacacggtggatgaaaagcagagaaacgttttacttacagaagaaggttatgctgatgctgaagaaatactggacatagatgatctgtacgatcctcgtgaacagtgggcttcgtatattctaaatgcaatcaaggctaaggagctcttccttaaagatgtcaattacattgttcgtagcaaggaagtgcttattgtagatgagtttactggcagagttatggcgggcaggcgatggagtgatggtctccatcaagcaattgaagcaaaagaaggtgtacctatacaaaatgaaaccataactctcgcatcaataagttaccaaaacttctttcttcagttccccaaactatgtggcatgactggaactgcagctacagagacccaagagtttgagagcatatataaacttaaagttactgttgtcccaacaaacaagccaatgatacggaaggatgactcagatgttgttttcagagcaacaaatggaaaatggcgtgctgttcttgttgagatatcaagaatgaataaagttggccgtcctgtgcttgttggtaccaccagtgttgagcaaagcgaatctttatcaaagcaattgcgtgaagctgggattcctcacgaggtcctgaatgctaagccagagaatgttgagagggaggcagagatcgtagctcagagtggacgccttggtgctgtgacaattgctaccaatatggcgggacgtggaactgatattatccttggtggcaatgcagaattcatggccaggttgaagttgcgtgagatccttatgccaagagtcgtcaatccaatagatggtgttattgtatccaaaaagcagatgccaccaagaaagacatggaagttgaaatggctgtcaaagaatggggagataaatcattaactgaactggaagcagaagagcggctgtcctattcatgtgagaagggaccaacacgtgatgaagtaatagcgaatttgagaaatgcatttgtgaagatagcagacgaatataaagtttacactgaggaggaaaagcagaaggtcattacagtaggtgggcttcacgtagtaggaacagagcgccatgaatcacgcagaattgacaatcagctccgtggtcgaagtggaagacagggggatcctggaagctctcgcttctttcttagtctcgaggataatattttccggatctttggaggtgacaggatacagggtctgatgcaagcattccgagttgaagatcttcctatcgaatcgaaaatgctaacgagggctctagatgaagcgcagcggaaagttgagaattacttttttgacatcaggaagcagttgtttgagtatgatgaggtattgaatagccagagagatcgtgtatatgcggaaagaagacgtgctcttgcatctgacagtcttcaatcacttattgtggaatatgctgaattgacaatggacgacatattaggggctaacataggacctgatactccaaaggaaaattgggacctgaacaaacttatagctaagctgcaacagtattgccatctgttggatgacttgacaccagaattgttggagggcaaaagctcaagctacgacgatttgcgggagtacctgcgtaagcgagggcgtgaagcttacttccagaaaactgttagttatttctccttttcctttcatggatattgttttttcgcatggttcaaaggttttaagaagttcaacaacaacaacatcaacatagccttttagtcccaaacaagttggggtaggctagagttgaaacccaacaagaagtcaccaaaaagagaaagagagagaaaggggaggggaaaaagtttttgagagaactaaaagggaaaaggcctaatcacagttcgggcacgtggatagtttttttccaagcacttctatccaaacacaact

SEQ ID NO: 29898 - DNA, 2640 bp, Zea Mays
cgccacagtcgttgcccaccacccagagcacgcggcggcttgtcgccgtgcgcgccgccaccatcaccacacgaggcgccggagaaagacatcaagcgcacgcccatggccatgactcctcacgcctcggcggccaccgtagccgttacccctgcgttgcgctttccccacactttgtctgccacgggcctctcctcaccgcctctggctgggggctgcggcggctgccgggttcggttccggcccagccagcgcggccgaggcacgcaggggcggcgaggtggctctcacgtgtcgcgcgtggggggcctgctgggcaccgtattcggcgggggcggccgcgacgacggggaggccacgcggaagaagtacgcagacaccgtggcgcgtatcaactccatggagctcgaggtctccgcgctctcagacgctgatttgcgtgcacgcaccgctgcgctccaggaccgtgctcgctccggggaatccctggattcccttctccccgaagcatttgctgttgtgagggaggcttccaagagagttctaggcctccggccctttgatgtgcagttgattggtggtatggttctgcacaagggggagattgctgaaatgaagaccggagaggggaagactcttgtggccattctgccagcatacttaaatgctttgagtgggaaaggagtgcatgttgtcactgtaaatgattatctcgcaagacgtgattgtgagtgggttggtcaagtcccccgatttctaggactgcaggttggcttaattcaacagaacatgacacctgagcaaaggagggaaaattactcatatgatattacttatgtcacaaacagtgagcttggttttgattatctaagagataaccttgcaatgactgtagatgaacttgtcttgaggaacttcaattactgtgtgatagatgaagttgattcaatccttattgatgaagcaagaacacctcttataatatcaggcctagctgaaaagccaagtgatcggtattacaaagcagcaaaaatagctgaagcttttgagcgagacattcattacacggtggatgaaaagcagagaaacgttttacttacagaagaaggttatgctgatgctgaagaaatactggacatagatgatctgtacgatcctcgtgaacagtgggcttcgtatattctaaatgcaatcaaggctaaggagctcttccttaaagatgtcaattacattgttcgtagcaaggaagtgcttattgtagatgagtttactggcagagttatggcgggcaggcgatggagtgatggtctccatcaagcaattgaagcaaaagaaggtgtacctatacaaaatgaaaccataactctcgcatcaataagttaccaaaacttctttcttcagttccccaaactatgtggcatgactggaactgcagctacagagacccaagagtttgagagcatatataaacttaaagttactgttgtcccaacaaacaagccaatgatacggaagacaaatgaaagcttgttcccatgtgaactttcaaaagaaacattatcgtctgtcaaggatacagttgaaatggctgtcaaagaatggggagataaatcattaactgaactggaagcagaagagcggctgtcctattcatgtgagaagggaccaacacgtgatgaagtaatagcgaatttgagaaatgcatttgtgaagatagcagacgaatataaagtttacactgaggaggaaaagcagaaggtcattacagtaggtgggcttcacgtagtaggaacagagcgccatgaatcacgcagaattgacaatcagctccgtggtcgaagtggaagacagggggatcctggaagctctcgcttctttcttagtctcgaggataatattttccggatctttggaggtgacaggatacagggtctgatgcaagcattccgagttgaagatcttcctatcgaatcgaaaatgctaacgagggctctagatgaagcgcagcggaaagttgagaattacttttttgacatcaggaagcagttgtttgagtatgatgaggtattgaatagccagagagatcgtgtatatgcggaaagaagacgtgctcttgcatctgacagtcttcaatcacttattgtggaatatgctgaattgacaatggacgacatattaggggctaacataggacctgatactccaaaggaaaattgggacctgaacaaacttatagctaagctgcaacagtattgccatctgttggatgacttgacaccagaattgttggagggcaaaagctcaagctacgacgatttgcgggagtacctgcgtaagcgagggcgtgaagcttacttccagaaaactgttagttatttctccttttcctttcatggatattgttttttcgcatggttcaaaggttttaagaagttcaacaacaacaacatcaacatagccttttagtcccaaacaagttggggtaggctagagttgaaacccaacaagaagtcaccaaaaagagaaagagagagaaaggggaggggaaaaagtttttgagagaactaaaagggaaaaggcctaatcacagttcgggcacgtggatagtttttttccaagcacttctatccaaacacaact

SEQ ID NO: 29899 - DNA, 3045 bp, Zea Mays
cgccacagtcgttgcccaccacccagagcacgcggcggcttgtcgccgtgcgcgccgccaccatcaccacacgaggcgccggagaaagacatcaagcgcacgcccatggccatgactcctcacgcctcggcggccaccgtagccgttacccctgcgttgcgctttccccacactttgtctgccacgggcctctcctcaccgcctctggctgggggctgcggcggctgccgggttcggttccggcccagccagcgcggccgaggcacgcaggggcggcgaggtggctctcacgtgtcgcgcgtggggggcctgctgggcaccgtattcggcgggggcggccgcgacgacggggaggccacgcggaagaagtacgcagacaccgtggcgcgtatcaactccatggagctcgaggtctccgcgctctcagacgctgatttgcgtgcacgcaccgctgcgctccaggaccgtgctcgctccggggaatccctggattcccttctccccgaagcatttgctgttgtgagggaggcttccaagagagttctaggcctccggccctttgatgtgcagttgattggtggtatggttctgcacaagggggagattgctgaaatgaagaccggagaggggaagactcttgtggccattctgccagcatacttaaatgctttgagtgggaaaggagtgcatgttgtcactgtaaatgattatctcgcaagacgtgattgtgagtgggttggtcaagtcccccgatttctaggactgcagagaacatgacacctgagcaaaggagggaaaattactcatatgatattacttatgtcacaaacagtgagcttggttttgattatctaagagataaccttgcaatgactgtagatgaacttgtcttgaggaacttcaattactgtgtgatagatgaagttgattcaatccttattgatgaagcaagaacacctcttataatatcaggcctagctgaaaagccaagtgatcggtattacaaagcagcaaaaatagctgaagcttttgagcgagacattcattacacggtggatgaaaagcagagaaacgttttacttacagaagaaggttatgctgatgctgaagaaatactggacatagatgatctgtacgatcctcgtgaacagtgggcttcgtatattctaaatgcaatcaaggctaaggagctcttccttaaagatgtcaattacattgttcgtagcaaggaagtgcttattgtagatgagtttactggcagagttatggcgggcaggcgatggagtgatggtctccatcaagcaattgaagcaaaagaaggtgtacctatacaaaatgaaaccataactctcgcatcaataagttaccaaaacttctttcttcagttccccaaactatgtggcatgactggaactgcagctacagagacccaagagtttgagagcatatataaacttaaagttactgttgtcccaacaaacaagccaatgatacggaaggatgactcagatgttgttttcagagcaacaaatggaaaatggcgtgctgttcttgttgagatatcaagaatgaataaagttggccgtcctgtgcttgttggtaccaccagtgttgagcaaagcgaatctttatcaaagcaattgcgtgaagctgggattcctcacgaggtcctgaatgctaagccagagaatgttgagagggaggcagagatcgtagctcagagtggacgccttggtgctgtgacaattgctaccaatatggcgggacgtggaactgatattatccttggtggcaatgcagaattcatggccaggttgaagttgcgtgagatccttatgccaagagtcgtcaatccaatagatggtgttattgtatccaaaaagcagatgccaccaagaaagacatggaagacaaatgaaagcttgttcccatgtgaactttcaaaagaaacattatcgtctgtcaaggatacagttgaaatggctgtcaaagaatggggagataaatcattaactgaactggaagcagaagagcggctgtcctattcatgtgagaagggaccaacacgtgatgaagtaatagcgaatttgagaaatgcatttgtgaagatagcagacgaatataaagtttacactgaggaggaaaagcagaaggtcattacagtaggtgggcttcacgtagtaggaacagagcgccatgaatcacgcagaattgacaatcagctccgtggtcgaagtggaagacagggggatcctggaagctctcgcttctttcttagtctcgaggataatattttccggatctttggaggtgacaggatacagggtctgatgcaagcattccgagttgaagatcttcctatcgaatcgaaaatgctaacgagggctctagatgaagcgcagcggaaagttgagaattacttttttgacatcaggaagcagttgtttgagtatgatgaggtattgaatagccagagagatcgtgtatatgcggaaagaagacgtgctcttgcatctgacagtcttcaatcacttattgtggaatatgctgaattgacaatggacgacatattaggggttggttatggctaacataggacctgatactccaaaggaaaattgggacctgaacaaacttatagctaagctgcaacagtattgccatctgttggatgacttgacaccagaattgttggagggcaaaagctcaagctacgacgatttgcgggagtacctgcgtaagcgagggcgtgaagcttacttccagaaaactgttagttatttctccttttcctttcatggatattgttttttcgcatggttcaaaggttttaagaagttcaacaacaacaacatcaacatagccttttagtcccaaacaagttggggtaggctagagttgaaacccaacaagaagtcaccaaaaagagaaagagagagaaaggggaggggaaaaagtttttgagagaactaaaagggaaaaggcctaatcacagttcgggcacgtggatagtttttttccaagcacttctatccaaacacaact

SEQ ID NO: 29900 - DNA, 3056 bp, Zea Mays
cgccacagtcgttgcccaccacccagagcacgcggcggcttgtcgccgtgcgcgccgccaccatcaccacacgaggcgccggagaaagacatcaagcgcacgcccatggccatgactcctcacgcctcggcggccaccgtagccgttacccctgcgttgcgctttccccacactttgtctgccacgggcctctcctcaccgcctctggctgggggctgcggcggctgccgggttcggttccggcccagccagcgcggccgaggcacgcaggggcggcgaggtggctctcacgtgtcgcgcgtggggggcctgctgggcaccgtattcggcgggggcggccgcgacgacggggaggccacgcggaagaagtacgcagacaccgtggcgcgtatcaactccatggagctcgaggtctccgcgctctcagacgctgatttgcgtgcacgcaccgctgcgctccaggaccgtgctcgctccggggaatccctggattcccttctccccgaagcatttgctgttgtgagggaggcttccaagagagttctaggcctccggccctttgatgtgcagttgattggtggtatggttctgcacaagggggagattgctgaaatgaagaccggagaggggaagactcttgtggccattctgccagcatacttaaatgctttgagtgggaaaggagtgcatgttgtcactgtaaatgattatctcgcaagacgtgattgtgagtgggttggtcaagtcccccgatttctaggactgcaggttggcttaattcaacagaacatgacacctgagcaaaggagggaaaattactcatatgatattacttatgtcacaaacagtgagcttggttttgattatctaagagataaccttgcaatgactgtagatgaacttgtcttgaggaacttcaattactgtgtgatagatgaagttgattcaatccttattgatgaagcaagaacacctcttataatatcaggcctagctgaaaagccaagtgatcggtattacaaagcagcaaaaatagctgaagcttttgagcgagacattcattacacggtggatgaaaagcagagaaacgttttacttacagaagaaggttatgctgatgctgaagaaatactggacatagatgatctgtacgatcctcgtgaacagtgggcttcgtatattctaaatgcaatcaaggctaaggagctcttccttaaagatgtcaattacattgttcgtagcaaggaagtgcttattgtagatgagtttactggcagagttatggcggcgatggagtgatggtctccatcaagcaattgaagcaaaagaaggtgtacctatacaaaatgaaaccataactctcgcatcaataagttaccaaaacttctttcttcagttccccaaactatgtggcatgactggaactgcagctacagagacccaagagtttgagagcatatataaacttaaagttactgttgtcccaacaaacaagccaatgatacggaaggatgactcagatgttgttttcagagcaacaaatggaaaatggcgtgctgttcttgttgagatatcaagaatgaataaagttggccgtcctgtgcttgttggtaccaccagtgttgagcaaagcgaatctttatcaaagcaattgcgtgaagctgggattcctcacgaggtcctgaatgctaagccagagaatgttgagagggaggcagagatcgtagctcagagtggacgccttggtgctgtgacaattgctaccaatatggcgggacgtggaactgatattatccttggtggcaatgcagaattcatggccaggttgaagttgcgtgagatccttatgccaagagtcgtcaatccaatagatggtgttattgtatccaaaaagcagatgccaccaagaaagacatggaagacaaatgaaagcttgttcccatgtgaactttcaaaagaaacattatcgtctgtcaaggatacagttgaaatggctgtcaaagaatggggagataaatcattaactgaactggaagcagaagagcggctgtcctattcatgtgagaagggaccaacacgtgatgaagtaatagcgaatttgagaaatgcatttgtgaagatagcagacgaatataaagtttacactgaggaggaaaagcagaaggtcattacagtaggtgggcttcacgtagtaggaacagagcgccatgaatcacgcagaattgacaatcagctccgtggtcgaagtggaagacagggggatcctggaagctctcgcttctttcttagtctcgaggataatattttccggatctttggaggtgacaggatacagggtctgatgcaagcattccgagttgaagatcttcctatcgaatcgaaaatgctaacgagggctctagatgaagcgcagcggaaagttgagaattacttttttgacatcaggaagcagttgtttgagtatgatgaggtattgaatagccagagagatcgtgtatatgcggaaagaagacgtgctcttgcatctgacagtcttcaatcacttattgtggaatatgctgaattgacaatggacgacatattaggggttggttatggctaacataggacctgatactccaaaggaaaattgggacctgaacaaacttatagctaagctgcaacagtattgccatctgttggatgacttgacaccagaattgttggagggcaaaagctcaagctacgacgatttgcgggagtacctgcgtaagcgagggcgtgaagcttacttccagaaaactgttagttatttctccttttcctttcatggatattgttttttcgcatggttcaaaggttttaagaagttcaacaacaacaacatcaacatagccttttagtcccaaacaagttggggtaggctagagttgaaacccaacaagaagtcaccaaaaagagaaagagagagaaaggggaggggaaaaagtttttgagagaactaaaagggaaaaggcctaatcacagttcgggcacgtggatagtttttttccaagcacttctatccaaacacaact

SEQ ID NO: 29901 - DNA, 2837 bp, Zea Mays
cgccacagtcgttgcccaccacccagagcacgcggcggcttgtcgccgtgcgcgccgccaccatcaccacacgaggcgccggagaaagacatcaagcgcacgcccatggccatgactcctcacgcctcggcggccaccgtagccgttacccctgcgttgcgctttccccacactttgtctgccacgggcctctcctcaccgcctctggctgggggctgcggcggctgccgggttcggttccggcccagccagcgcggccgaggcacgcaggggcggcgaggtggctctcacgtgtcgcgcgtggggggcctgctgggcaccgtattcggcgggggcggccgcgacgacggggaggccacgcggaagaagtacgcagacaccgtggcgcgtatcaactccatggagctcgaggtctccgcgctctcagacgctgatttgcgtgcacgcaccgctgcgctccaggaccgtgctcgctccggggaatccctggattcccttctccccgaagcatttgctgttgtgagggaggcttccaagagagttctaggcctccggccctttgatgtgcagttgattggtggtatggttctgcacaagggggagattgctgaaatgaagaccggagaggggaagactcttgtggccattctgccagcatacttaaatgctttgagtgggaaaggagtgcatgttgtcactgtaaatgattatctcgcaagacgtgattgtgagtgggttggtcaagtcccccgatttctaggactgcaggttggcttaattcaacagaacatgacacctgagcaaaggagggaaaattactcatatgatattacttatgtcacaaacagtgagcttggttttgattatctaagagataaccttgcaatgactgtagatgaacttgtcttgaggaacttcaattactgtgtgatagatgaagttgattcaatccttattgatgaagcaagaacacctcttataatatcaggcctagctgaaaagccaagtgatcggtattacaaagcagcaaaaatagctgaagcttttgagcgagacattcattacacggtggatgaaaagcagagaaacgttttacttacagaagaaggttatgctgatgctgaagaaatactggacatagatgatctgtacgatcctcgtgaacagtgggcttcgtatattctaaatgcaatcaaggctaaggagctcttccttaaagatgtcaattacattgttcgtagcaaggaagtgcttattgtagatgagtttactggcagagttatggcgggcaggcgatggagtgatggtctccatcaagcaattgaagcaaaagaaggtgtacctatacaaaatgaaaccataactctcgcatcaataagttaccaaaacttctttcttcagttccccaaactatgtggcatgactggaactgcagctacagagacccaagagtttgagagcatatataaacttaaagttactgttgtcccaacaaacaagccaatgatacggaaggatgactcagatgttgttttcagagcaacaaatggaaaatggcgtgctgttcttgttgagatatcaagaatgaataaagttggccgtcctgtgcttgttggtaccaccagtgttgagcaaagcgaatctttatcaaagcaattgcgtgaagctgggattcctcacgaggtcctgaatgctaagccagagaatgttgagagggaggcagagatcgtagctcagagtggacgccttggtgctgtgacaattgctaccaatatggcgggacgtggaactgatattatccttggtggcaatgcagaattcatggccaggttgaagttgcgtgagatccttatgccaagggaccaacacgtgatgaagtaatagcgaatttgagaaatgcatttgtgaagatagcagacgaatataaagtttacactgaggaggaaaagcagaaggtcattacagtaggtgggcttcacgtagtaggaacagagcgccatgaatcacgcagaattgacaatcagctccgtggtcgaagtggaagacagggggatcctggaagctctcgcttctttcttagtctcgaggataatattttccggatctttggaggtgacaggatacagggtctgatgcaagcattccgagttgaagatcttcctatcgaatcgaaaatgctaacgagggctctagatgaagcgcagcggaaagttgagaattacttttttgacatcaggaagcagttgtttgagtatgatgaggtattgaatagccagagagatcgtgtatatgcggaaagaagacgtgctcttgcatctgacagtcttcaatcacttattgtggaatatgctgaattgacaatggacgacatattaggggctaacataggacctgatactccaaaggaaaattgggacctgaacaaacttatagctaagctgcaacagtattgccatctgttggatgacttgacaccagaattgttggagggcaaaagctcaagctacgacgatttgcgggagtacctgcgtaagcgagggcgtgaagcttacttccagaaaactgttagttatttctccttttcctttcatggatattgttttttcgcatggttcaaaggttttaagaagttcaacaacaacaacatcaacatagccttttagtcccaaacaagttggggtaggctagagttgaaacccaacaagaagtcaccaaaaagagaaagagagagaaaggggaggggaaaaagtttttgagagaactaaaagggaaaaggcctaatcacagttcgggcacgtggatagtttttttccaagcacttctatccaaacacaact

SEQ ID NO: 29902 - DNA, 3036 bp, Zea Mays
cgccacagtcgttgcccaccacccagagcacgcggcggcttgtcgccgtgcgcgccgccaccatcaccacacgaggcgccggagaaagacatcaagcgcacgcccatggccatgactcctcacgcctcggcggccaccgtagccgttacccctgcgttgcgctttccccacactttgtctgccacgggcctctcctcaccgcctctggctgggggctgcggcggctgccgggttcggttccggcccagccagcgcggccgaggcacgcaggggcggcgaggtggctctcacgtgtcgcgcgtggggggcctgctgggcaccgtattcggcgggggcggccgcgacgacggggaggccacgcggaagaagtacgcagacaccgtggcgcgtatcaactccatggagctcgaggtctccgcgctctcagacgctgatttgcgtgcacgcaccgctgcgctccaggaccgtgctcgctccggggaatccctggattcccttctccccgaagcatttgctgttgtgagggaggcttccaagagagttctaggcctccggccctttgatgtgcagttgattggtggtatggttctgcacaagggggagattgctgaaatgaagaccggagaggggaagactcttgtggccattctgccagcatacttaaatgctttgagtgggaaaggagtgcatgttgtcactgtaaatgattatctcgcaagacgtgattgtgagtgggttggtcaagtcccccgatttctaggactgcaggttggcttaattcaacagaacatgacacctgagcaaaggagggaaaattactcatatgatattacttatgtcacaaacagtgagcttggttttgattatctaagagataaccttgcaatgactgtagatgaacttgtcttgaggaacttcaattactgtgtgatagatgaagttgattcaatccttattgatgaagcaagaacacctcttataatatcaggcctagctgaaaagccaagtgatcggtattacaaagcagcaaaaatagctgaagcttttgagcgagacattcattacacggtggatgaaaagcagagaaacgttttacttacagaagaaggttatgctgatgctgaagaaatactggacatagatgatctgtacgatcctcgtgaacagtgggcttcgtatattctaaatgcaatcaaggctaaggagctcttccttaaagatgtcaattacattgttcgtagcaaggaagtgcttattgtagatgagtttactggcagagttatggcggcgatggagtgatggtctccatcaagcaattgaagcaaaagaaggtgtacctatacaaaatgaaaccataactctcgcatcaataagttaccaaaacttctttcttcagttccccaaactatgtggcatgactggaactgcagctacagagacccaagagtttgagagcatatataaacttaaagttactgttgtcccaacaaacaagccaatgatacggaaggatgactcagatgttgttttcagagcaacaaatggaaaatggcgtgctgttcttgttgagatatcaagaatgaataaagttggccgtcctgtgcttgttggtaccaccagtgttgagcaaagcgaatctttatcaaagcaattgcgtgaagctgggattcctcacgaggtcctgaatgctaagccagagaatgttgagagggaggcagagatcgtagctcagagtggacgccttggtgctgtgacaattgctaccaatatggcgggacgtggaactgatattatccttggtggcaatgcagaattcatggccaggttgaagttgcgtgagatccttatgccaagagtcgtcaatccaatagatggtgttattgtatccaaaaagcagatgccaccaagaaagacatggaagacaaatgaaagcttgttcccatgtgaactttcaaaagaaacattatcgtctgtcaaggatacagttgaaatggctgtcaaagaatggggagataaatcattaactgaactggaagcagaagagcggctgtcctattcatgtgagaagggaccaacacgtgatgaagtaatagcgaatttgagaaatgcatttgtgaagatagcagacgaatataaagtttacactgaggaggaaaagcagaagtaggtgggcttcacgtagtaggaacagagcgccatgaatcacgcagaattgacaatcagctccgtggtcgaagtggaagacagggggatcctggaagctctcgcttctttcttagtctcgaggataatattttccggatctttggaggtgacaggatacagggtctgatgcaagcattccgagttgaagatcttcctatcgaatcgaaaatgctaacgagggctctagatgaagcgcagcggaaagttgagaattacttttttgacatcaggaagcagttgtttgagtatgatgaggtattgaatagccagagagatcgtgtatatgcggaaagaagacgtgctcttgcatctgacagtcttcaatcacttattgtggaatatgctgaattgacaatggacgacatattaggggctaacataggacctgatactccaaaggaaaattgggacctgaacaaacttatagctaagctgcaacagtattgccatctgttggatgacttgacaccagaattgttggagggcaaaagctcaagctacgacgatttgcgggagtacctgcgtaagcgagggcgtgaagcttacttccagaaaactgttagttatttctccttttcctttcatggatattgttttttcgcatggttcaaaggttttaagaagttcaacaacaacaacatcaacatagccttttagtcccaaacaagttggggtaggctagagttgaaacccaacaagaagtcaccaaaaagagaaagagagagaaaggggaggggaaaaagtttttgagagaactaaaagggaaaaggcctaatcacagttcgggcacgtggatagtttttttccaagcacttctatccaaacacaact

SEQ ID NO: 29903 - DNA, 3061 bp, Zea Mays
cgccacagtcgttgcccaccacccagagcacgcggcggcttgtcgccgtgcgcgccgccaccatcaccacacgaggcgccggagaaagacatcaagcgcacgcccatggccatgactcctcacgcctcggcggccaccgtagccgttacccctgcgttgcgctttccccacactttgtctgccacgggcctctcctcaccgcctctggctgggggctgcggcggctgccgggttcggttccggcccagccagcgcggccgaggcacgcaggggcggcgaggtggctctcacgtgtcgcgcgtggggggcctgctgggcaccgtattcggcgggggcggccgcgacgacggggaggccacgcggaagaagtacgcagacaccgtggcgcgtatcaactccatggagctcgaggtctccgcgctctcagacgctgatttgcgtgcacgcaccgctgcgctccaggaccgtgctcgctccggggaatccctggattcccttctccccgaagcatttgctgttgtgagggaggcttccaagagagttctaggcctccggccctttgatgtgcagttgattggtggtatggttctgcacaagggggagattgctgaaatgaagaccggagaggggaagactcttgtggccattctgccagcatacttaaatgctttgagtgggaaaggagtgcatgttgtcactgtaaatgattatctcgcaagacgtgattgtgagtgggttggtcaagtcccccgatttctaggactgcaggttggcttaattcaacagaacatgacacctgagcaaaggagggaaaattactcatatgatattacttatgtcacaaacagtgagcttggttttgattatctaagagataaccttgcaatgactgtagatgaacttgtcttgaggaacttcaattactgtgtgatagatgaagttgattcaatccttattgatgaagcaagaacacctcttataatatcaggcctagctgaaaagccaagtgatcggtattacaaagcagcaaaaatagctgaagcttttgagcgagacattcattacacggtggatgaaaagcagagaaacgttttacttacagaagaaggttatgctgatgctgaagaaatactggacatagatgatctgtacgatcctcgtgaacagtgggcttcgtatattctaaatgcaatcaaggctaaggagctcttccttaaagatgtcaattacattgttcgtagcaaggaagtgcttattgtagatgagtttactggcagagttatggcgggcaggcgatggagtgatggtctccatcaagcaattgaagcaaaagaaggtgtacctatacaaaatgaaaccataactctcgcatcaataagttaccaaaacttctttcttcagttccccaaactatgtggcatgactggaactgcagctacagagacccaagagtttgagagcatatataaacttaaagttactgttgtcccaacaaacaagccaatgatacggaaggatgactcagatgttgttttcagagcaacaaatggaaaatggcgtgctgttcttgttgagatatcaagaatgaataaagttggccgtcctgtgcttgttggtaccaccagtgttgagcaaagcgaatctttatcaaagcaattgcgtgaagctgggattcctcacgaggtcctgaatgctaagccagagaatgttgagagggaggcagagatcgtagctcagagtggacgccttggtgctgtgacaattgctaccaatatggcgggacgtggaactgatattatccttggtggcaatgcagaattcatggccaggttgaagttgcgtgagatccttatgccaagagtcgtcaatccaatagatggtgttattgtatccaaaaagcagatgccaccaagaaagacatggaagacaaatgaaagcttgttcccatgtgaactttcaaaagaaacattatcgtctgtcaaggatacagttgaaatggctgtcaaagaatggggagataaatcattaactgaactggaagcagaagagcggctgtcctattcatgtgagaagggaccaacacgtgatgaagtaatagcgaatttgagaaatgcatttgtgaagatagcagacgaatataaagtttacactgaggaggaaaagcagaaggtcattacagtaggtgggcttcacgtagtaggaacagagcgccatgaatcacgcagaattgacaatcagctccgtggtcgaagtggaagacagggggatcctggaagctctcgcttctttcttagtctcgaggataatattttccggatctttggaggtgacaggatacagggtctgatgcaagcattccgagttgaagatcttcctatcgaatcgaaaatgctaacgagggctctagatgaagcgcagcggaaagttgagaattacttttttgacatcaggaagcagttgtttgagtatgatgaggtattgaatagccagagagatcgtgtatatgcggaaagaagacgtgctcttgcatctgacagtcttcaatcacttattgtggaatatgctgaattgacaatggacgacatattaggggttggttatggctaacataggacctgatactccaaaggaaaattgggacctgaacaaacttatagctaagctgcaacagtattgccatctgttggatgacttgacaccagaattgttggagggcaaaagctcaagctacgacgatttgcgggagtacctgcgtaagcgagggcgtgaagcttacttccagaaaactgttagttatttctccttttcctttcatggatattgttttttcgcatggttcaaaggttttaagaagttcaacaacaacaacatcaacatagccttttagtcccaaacaagttggggtaggctagagttgaaacccaacaagaagtcaccaaaaagagaaagagagagaaaggggaggggaaaaagtttttgagagaactaaaagggaaaaggcctaatcacagttcgggcacgtggatagtttttttccaagcacttctatccaaacacaact

SEQ ID NO: 29904 - DNA, 2963 bp, Zea Mays
cgccacagtcgttgcccaccacccagagcacgcggcggcttgtcgccgtgcgcgccgccaccatcaccacacgaggcgccggagaaagacatcaagcgcacgcccatggccatgactcctcacgcctcggcggccaccgtagccgttacccctgcgttgcgctttccccacactttgtctgccacgggcctctcctcaccgcctctggctgggggctgcggcggctgccgggttcggttccggcccagccagcgcggccgaggcacgcaggggcggcgaggtggctctcacgtgtcgcgcgtggggggcctgctgggcaccgtattcggcgggggcggccgcgacgacggggaggccacgcggaagaagtacgcagacaccgtggcgcgtatcaactccatggagctcgaggtctccgcgctctcagacgctgatttgcgtgcacgcaccgctgcgctccaggaccgtgctcgctccggggaatccctggattcccttctccccgaagcatttgctgttgtgagggaggcttccaagagagttctaggcctccggccctttgatgtgcagttgattggtggtatggttctgcacaagggggagattgctgaaatgaagaccggagaggggaagactcttgtggccattctgccagcatacttaaatgctttgagtgggaaaggagtgcatgttgtcactgtaaatgattatctcgcaagacgtgattgtgagtgggttggtcaagtcccccgatttctaggactgcagagaacatgacacctgagcaaaggagggaaaattactcatatgatattacttatgtcacaaacagtgagcttggttttgattatctaagagataaccttgcaatgactgtagatgaacttgtcttgaggaacttcaattactgtgtgatagatgaagttgattcaatccttattgatgaagcaagaacacctcttataatatcaggcctagctgaaaagccaagtgatcggtattacaaagcagcaaaaatagctgaagcttttgagcgagacattcattacacggtggatgaaaagcagagaaacgttttacttacagaagaaggttatgctgatgctgaagaaatactggacatagatgatctgtacgatcctcgtgaacagtgggcttcgtatattctaaatgcaatcaaggctaaggagctcttccttaaagatgtcaattacattgttcgtagcaaggaagtgcttattgtagatgagtttactggcagagttatggcggcgatggagtgatggtctccatcaagcaattgaagcaaaagaaggtgtacctatacaaaatgaaaccataactctcgcatcaataagttaccaaaacttctttcttcagttccccaaactatgtggcatgactggaactgcagctacagagacccaagagtttgagagcatatataaacttaaagttactgttgtcccaacaaacaagccaatgatacggaaggatgactcagatgttgttttcagagcaacaaatggaaaatggcgtgctgttcttgttgagatatcaagaatgaataaagttggccgtcctgtgcttgttggtaccaccagtgttgagcaaagcgaatctttatcaaagcaattgcgtgaagctgggattcctcacgaggtcctgaatgctaagccagagaatgttgagagggaggcagagatcgtagctcagagtggacgccttggtgctgtgacaattgctaccaatatggcgggacgtggaactgatattatccttggtggcaatgcagaattcatggccaggttgaagttgcgtgagatccttatgccaagacaaatgaaagcttgttcccatgtgaactttcaaaagaaacattatcgtctgtcaaggatacagttgaaatggctgtcaaagaatggggagataaatcattaactgaactggaagcagaagagcggctgtcctattcatgtgagaagggaccaacacgtgatgaagtaatagcgaatttgagaaatgcatttgtgaagatagcagacgaatataaagtttacactgaggaggaaaagcagaaggtcattacagtaggtgggcttcacgtagtaggaacagagcgccatgaatcacgcagaattgacaatcagctccgtggtcgaagtggaagacagggggatcctggaagctctcgcttctttcttagtctcgaggataatattttccggatctttggaggtgacaggatacagggtctgatgcaagcattccgagttgaagatcttcctatcgaatcgaaaatgctaacgagggctctagatgaagcgcagcggaaagttgagaattacttttttgacatcaggaagcagttgtttgagtatgatgaggtattgaatagccagagagatcgtgtatatgcggaaagaagacgtgctcttgcatctgacagtcttcaatcacttattgtggaatatgctgaattgacaatggacgacatattaggggctaacataggacctgatactccaaaggaaaattgggacctgaacaaacttatagctaagctgcaacagtattgccatctgttggatgacttgacaccagaattgttggagggcaaaagctcaagctacgacgatttgcgggagtacctgcgtaagcgagggcgtgaagcttacttccagaaaactgttagttatttctccttttcctttcatggatattgttttttcgcatggttcaaaggttttaagaagttcaacaacaacaacatcaacatagccttttagtcccaaacaagttggggtaggctagagttgaaacccaacaagaagtcaccaaaaagagaaagagagagaaaggggaggggaaaaagtttttgagagaactaaaagggaaaaggcctaatcacagttcgggcacgtggatagtttttttccaagcacttctatccaaacacaact

SEQ ID NO: 29905 - DNA, 1754 bp, Zea Mays
atatattcacctgagccaggtcgctgtttcatcatcgtgcttgactgcagtctgcagggggtgtggccgcgctgcagcctgcctgtcaatctcgatcgatcaaggggtggcgtgccgagatggcggaccggccgtcgcttcctgctctcattattgctatcgccgttcttgctggcagttactgccgcgtggcgagctcggcctcgccggcggtggaagatgagctgcgcggtggaggaggagccggcggtccgacgacgatgcggcggcgcgcggcgtcggtgatggtgcccatcaccatcctcaagtccgctgttagcgacggagctgtgtgcatggatggaacgccacctgcttaccacttggatcctggctccggagcgggcagcagaagctggattgtgaacttagagggaggtgcgtggtgcaacagcgccaagacatgccggctcaccaggagctccggccgtggctcgtcggaccacatggacaaagagatccccttcaccggcatcatgagcagtagccgtgccgtgaatcctggtctcgcccgattctaatttctacaactggaaccgggtcaaggttcgctactgtgacggtggatcttttgccggcgaggccttcgacaaggacactgggatctacttccgagggcagcgcatctggaacgcggtcatccggcacctcctctccattgggatggccaacgctgaccaggtgctgctcgccggctgctcctcgggcggtctggcggtgatactgcactgcgaccagctccgcgccttcttcccgtccggctccaccgtcgtcaagtgcatctccgacggcggcctctacctcgacgccgtggacgtctccgggggccgcagcctgagatcctacttcggagacattgtggccatgcaaggaatagctcagaacctgccgccggcttgcaccgcccgcctcgacgccacctcgaacataatcgacggcgttaaaaccccactgttcctgctaaatgccgcatacgacttcattcagattgtgctcagcctggcgccagacagagctgacccaagcggcgcttggcgagcctgcaagtccaaccgcacggcctgcagcgcatcccagatgagtttcctgcaagatttcagggaccagatggtagcgtccgtcaaaggcttctccggttccaggagcaacggggtcttcctaagctcctgcttcgcgcactgccagtccgagcagctgggcacctggaacaccaaaccaggtggctcccccaccattcaaaacaaggggatttcaaaatccgttggcgactggtactttgatcgagctgaggtgaaggcggtcgactgccgctatccctgcgacaacacttgccaccacattatatgagaggatccacgtttttttattattttatgcatagggaagaacattcgctctctcaacgaagtgtacatcgtatttgattttgggaatgcaattggatacagccatcaaatgaacacaacacgcgaaaataaatggtaatggcgtgttccagtaagacaattgagtgattcaacagctgttgtttagcatttgatccatgcaatggagttcctctgtattatcattctagtcagttggcactgctaccagcaaatatcttctactagtacattcggaattctgcgtgcctgttcatgctaatcctgcaaaaactgaaggattgagctttcagtaatcagtgccgataagaatgaattacattattatac

SEQ ID NO: 29906 - DNA, 1715 bp, Zea Mays
atatattcacctgagccaggtcgctgtttcatcatcgtgcttgactgcagtctgcagggggtgtggccgcgctgcagcctgcctgtcaatctcgatcgatcaaggggtggcgtgccgagatggcggaccggccgtcgcttcctgctctcattattgctatcgccgttcttgctggcagttactgccgcgtggcgagctcggcctcgccggcggtggaagatgagctgcgcggtggaggaggagccggcggtccgacgacgatgcggcggcgcgcggcgtcggtgatggtgcccatcaccatcctcaagtccgctgttagcgacggagctgtgtgcatggatggaacgccacctgcttaccacttggatcctggctccggagcgggcagcagaagctggattgtgaacttagagggaggtgcgtggtgcaacagcgccaagacatgccggctcaccaggagctccggccgtggctcgtcggaccacatggacaaagagatccccttcaccggcatcatgagcagtagccgtgccgtgaatcctggtctcgcccgattctaatttctacaactggaaccgggtcaaggttcgctactgtgacggtggatcttttgccggcgaggccttcgacaaggacactgggatctacttccgagggcagcgcatctggaacgcggtcatccggcacctcctctccattgggatggccaacgctgaccaggtgctgctcgccggctgctcctcgggcggtctggcggtgatactgcactgcgaccagctccgcgccttcttcccgtccggctccaccgtcgtcaagtgcatctccgacggcggcctctacctcgacgccgtggacgtctccgggggccgcagcctgagatcctacttcggagacattgtggccatgcaaggaatagctcagaacctgccgccggcttgcaccgcccgcctcgacgccacctcgtgcttcttcccgcagaacataatcgacggcgttaaaaccccactgttcctgctaaatgccgcatacgacttcattcagattgtgctcagcctggcgccagacagagctgacccaagcggcgcttggcgagcctgcaagtccaaccgcacggcctgcagcgcatcccagatgagtttcctgcaagatttcagggaccagatggtagcgtccgtcaaaggcttctccggttccaggagcaacggggtcttcctaagctcctgcttcgcgcactgccagtccgagcagctgggcacctggaacaccaaaccaggtggctcccccaccattcaaaacaaggggatttcaaaatccgttggcgactggtactttgatcgagctgaggtgaaggcggtcgactgccgctatccctgcgacaacacttgccaccacattatatgagaggatccacgtttttttattattttatgcatagggaagaacattcgctctctcaacgaagtgtacatcgtatttgattttgggaatgcaattggatacagccatcaaatgaacacaacacgcgaaaataaatggtaatggcgtgttccagtaagacaattgagtgattcaacagctgttgtttagcatttgatccatgcaatggagttcctctgtattatcattctagtcagttggcactgctaccagcaaatatcttctactagtacattcggaattctgcgtgcctgttcatgctaatcctgcaaaaacat

SEQ ID NO: 29907 - DNA, 2284 bp, Zea Mays
ggcaggcaacaggcaggcaggcaggagcacagcccagcccgcccggcaccaacacctgctcctgctgcttctgctcgccctcgccccctgctgcgttttgtgccatcgccatttgcgatttctttcgaggaaaaagggaagcaagcgcggaaatactccacagatactactcacctaccgctccgatccggccaccaagcgcaaccaatatctcgctccctttctctttctccgtctccctcctccgcacagcgcacgcgcaggaggccgctgccgggaggcccatctctatctctctccgctggatcctccggcctctcgcggtccggtggagcggagatccggccgctcgggcgtcggctgcttcctcgttctgccggagcaagaagctggcatcccgccatgtcgtcaccgatgccctcccctactctgaaggaccatctctccacgcctacaggccccttgcatctcaaagtatgggaggtcatatgcattgccttgggagctttcatggtgctcgtcttgtttgccaccgtgtggctcacgctcaggagcaagaagagggtaaggcggcgggcatccgcaaatatcccaatcacccaaatccctgcaatttccaaggaaatcaaggaggtgagggtggagcaagtgccggccagcgactttgtggcgcatgatggcgtcctcctcacgttccaggacaagaccagcgaccgggattcggacaaggtcatggcccatttgggtgttagcaaatcgaagcgtggtgatgagagccattcggggtcatttcgctacatggacaaggatgcaggattccagtcagctgaggaaggtggctctggaacgtttcggcagacttcagctaatgccatagttgctccttcacctctggttggcctgcccgagttttcataccttggttggggtcactggtttacgctgagggatctggagcttgctaccaatcgcttttcaaaggacaacattattggtgagggtggatacggtgtagtttatcgcgggcagctaatcaatggctcccctgttgctgtcaaaaagcttctcaataacctaggtcaagctgagaaggaatttagagtagaagttgaggctattggtcatgttcgacacaagaacttggtccggcttcttggttattgcgtggagggtacccaaaggatgcttgtctatgagtatgtgaacaatggaaacctagaacaatggcttcatggagctatgagtcaacatggctctcttacatgggaggcccgcataaagattcttcttgggactgctaaagcgcttgcttacttgcatgaggcgattgaacccaaagttgtgcaccgtgacatcaaatccagcaatattttgattgatgatgagttcgagtccaaagtatcagatttcggtttagccaagcttcttggcgctggaaagagtcatgtcaccactagagttatgggtacctttgggtatgtggcaccagagtatgcaaatactggactcttgaacgaaaagagtgacatttacagctttggagtcgttctccttgaagcaattaccggaagggatcctgttgactatggacgcccaccaaacgaggtgaatctagttgactggctaaaaatgatggttgccagcaggcggtcagaagaagtagtggatcccaccatagagacacgaccttcgacgagagctctaaagcgtgcacttttgacagctctgaggtgtgtggatccagattcagagaagagaccgaagatgggtcaagttgtccggatgctggaatcggatgatccaattcctcgagggaagatctaagcaccaccgtggagggagcacagaaatggattcgcaaaaggacaacaactccgacacggagaagagtgataatgcagattcgaaacctagcaggaccagagcatcgtcgtccaaatgagcaaaccagcatttcacctattacagtcttcggcacattgcatggactgggggctacgtctattttacattgctgacgaattggtaactgaaagctctgaagaaagacctatttttcttttcttttcttttcttttctttttgttgcaacaatttatgatttatttgtagagaaggtattggtttttgtacttatcaatgtgtacgtaccggtgctcttgacaattgctgctgtaagtttttaacattgtgtacaggcgtagcatcatgaatactggcggaatgcccacaatatttgaaatgattatgtttaaatgaaagcctccttcccatttgggccatt

SEQ ID NO: 29908 - DNA, 1824 bp, Zea Mays
gtcctttcctttgcgcatgttccgtggatccagattcatgcatttgcattttgctgcgtggagagctgctgtatgcccatcggcggagcaagaagctggcatcccgccatgtcgtcaccgatgccctcccctactctgaaggaccatctctccacgcctacaggccccttgcatctcaaagtatgggaggtcatatgcattgccttgggagctttcatggtgctcgtcttgtttgccaccgtgtggctcacgctcaggagcaagaagagggtaaggcggcgggcatccgcaaatatcccaatcacccaaatccctgcaatttccaaggaaatcaaggaggtgagggtggagcaagtgccggccagcgactttgtggcgcatgatggcgtcctcctcacgttccaggacaagaccagcgaccgggattcggacaaggtcatggcccatttgggtgttagcaaatcgaagcgtggtgatgagagccattcggggtcatttcgctacatggacaaggatgcaggattccagtcagctgaggaaggtggctctggaacgtttcggcagacttcagctaatgccatagttgctccttcacctctggttggcctgcccgagttttcataccttggttggggtcactggtttacgctgagggatctggagcttgctaccaatcgcttttcaaaggacaacattattggtgagggtggatacggtgtagtttatcgcgggcagctaatcaatggctcccctgttgctgtcaaaaagcttctcaataacctaggtcaagctgagaaggaatttagagtagaagttgaggctattggtcatgttcgacacaagaacttggtccggcttcttggttattgcgtggagggtacccaaaggatgcttgtctatgagtatgtgaacaatggaaacctagaacaatggcttcatggagctatgagtcaacatggctctcttacatgggaggcccgcataaagattcttcttgggactgctaaagcgtatgtggcaccagagtatgcaaatactggactcttgaacgaaaagagtgacatttacagctttggagtcgttctccttgaagcaattaccggaagggatcctgttgactatggacgcccaccaaacgaggtgaatctagttgactggctaaaaatgatggttgccagcaggcggtcagaagaagtagtggatcccaccatagagacacgaccttcgacgagagctctaaagcgtgcacttttgacagctctgaggtgtgtggatccagattcagagaagagaccgaagatgggtcaagttgtccggatgctggaatcggatgatccaattcctcgaggggacagaagatctaagcaccaccgtggagggagcacagaaatggattcgcaaaaggacaacaactccgacacggagaagagtgataatgcagattcgaaacctagcaggaccagagcatcgtcgtccaaatgagcaaaccagcatttcacctattacagtcttcggcacattgcatggactgggggctacgtctattttacattgctgacgaattggtaactgaaagctctgaagaaagacctatttttcttttcttttcttttcttttctttttgttgcaacaatttatgatttatttgtagagaaggtattggtttttgtacttatcaatgtgtacgtaccggtgctcttgacaattgctgctgtaagtttttaacattgtgtacaggcgtagcatcatgaatactggcggaatgcccacaatatttgaaatgattatgtttaaatgaaagcctccttcccatttgggccatt

SEQ ID NO: 29909 - DNA, 2208 bp, Zea Mays
ctcacatcataccagtaccacccgttcctatttttcctaaagcaggggcagggcaaaccgtattgttggcttcgcctagggtctcccttctactgtcgccgcaacctgaccaacctcccttctactgcccgcctagggtctcccttctactgccgccgcaacggcgcaacctcccttctactgccgccgcaacctcccttcttcgagtcccatccgacctagccctgcaacccgccggacgacgagcagtgaggcccgcggccgagatggaccggtacctgacggtggagcggccacggaacgagtcaaccatcgaagagaacgggatccgcatcaccgcgcagggcctcatctgcaactatgtctcctacgctacctccctcctccaggtgcctgggcttgtcctcaccatcgccgtcgtatcgtattgtacttaggatgcgctgttctgttcgagtcccgtccctgtcgattcgaagagatccccagcaacgtgagggaggtgttcctgaccggccccacctccaagttcggcagggccatcgcgctctacctctgcaggaagaagatcagagtcctgatgttcacggtgtcgtcggagaggttcctgaagatccagagggaggcaccgccggagtaccagcagtacctcgtgcaggtgaccaagtaccaggccgcacagaactgcaaggtcatggtgatttcacgtccgttaggctcgagaggtggactcaaacatccaagttttgcaagttttgatgttggatgttaaatttctatgctcacccctcgtttggttattgatttgatcatagttttgcatgaactattggcgttggctatctaaaaggacagaaaggcagacatgagcaacagatcccgctccatgggctgaaactgggattcgtgatggcaggcgcccctcttagtcgtgtgtagggcgagctgctgccatggtggctttttcttgcgggtgtgagctccgctcgccgccggtcttggacgccgtggctaggctcctaccacccctccctccacccgggactccacgctgccaccgccacacgacagtacgcatacactcttcttcctcccctcgctctggatggctggcgtccgctccctcagcgcctccgcccatgcccggctcccgcacttgccggctccccgatggagatgaatgaagaaaggaagatctgcaagaataaagtcgaggcggaggcttggtttactggtcttagtgccttgatatgtcgaagacagcatggatcccaggtccaacatatagatggaatccggattgctggacttcctattgattttccaagatcggagatgcaatttcatactgtgcaaaagcaatttcgctatgcaagtcacgcatacagaacctgaaaagttccaaggatgctttgttggatggtatagatggtggtgatgcatctgctgctgaagctgaaggaggctcagaaaaatctaccattgaaaaagagctagagcagcttactagcatattgcctgatcttgagaagaagcttgaggacctgtctgaagcaaacccaagcgctgacatggatgagatggtgaaggcaattgtgtccagggtaactgaagtgatgccaaaagctgcatcttttacttcttcccaaatagcaacctcaagcaatggattcgactcctcggttatgtctacgacagcgacaactggaagctctggaagcactgtgaactgaccttggggttgtaggcagaggcgtcaaacgagctagcatcaagccgatctctgccaaacctgttgctaagaaacctgcacttgattcaccatctctccaaggtgacaacagcatcaactctgaggttgtccctgcgacgcagactgatgaatccagctaaagctctacatttgaaacgaacgctttctgacgggggcacggcgataacacgccttctattctagtatgcttagatagattcaatgttagcgcaaacgactgatgataagtttttcagttagtattttaatttggatttagagtacacttatgtatgatttatttgacaatgcttatttatgagacattgaattgtacttatctatattacattaaatatgatgttattaaatatgtgtgtatgtatatttatcttttaaattattataatgtgacatctcaaaaatgattataaattgaagaatgtctagttatg

SEQ ID NO: 29910 - DNA, 2192 bp, Zea Mays
ctatttttcctaaagcaggggcagggcaaaccgtattgttggcttcgcctagggtctcccttctactgtcgccgcaacctgaccaacctcccttctactgcccgcctagggtctcccttctactgccgccgcaacggcgcaacctcccttctactgccgccgcaacctcccttcttcgagtcccatccgacctagccctgcaacccgccggacgacgagcagtgaggcccgcggccgagatggaccggtacctgacggtggagcggccacggaacgagtcaaccatcgaagagaacgggatccgcatcaccgcgcagggcctcatctgcaactatgtctcctacgctacctccctcctccaggtgcctgggcttgtcctcaccatcgccgtcgtatcgtattgtacttaggatgcgctgttctgttcgagtcccgtccctgtcgattcgaagagatccccagcaacgtgagggaggtgttcctgaccggccccacctccaagttcggcagggccatcgcgctctacctctgcaggaagaagatcagagtcctgatgttcacggtgtcgtcggagaggttcctgaagatccagagggaggcaccgccggagtaccagcagtacctcgtgcaggtgaccaagtaccaggccgcacagaactgcaagttgatcatagttttgcatgaactattggcgttggctatctaaaaggacagaaaggcagacatgagcaacagatcccgctccatgggctgaaactgggattcgtgatggcaggcgcccctcttagtcgtgtgtagggcgagctgctgccatggtggctttttcttgcgggtgtgagctccgctcgccgccggtcttggacgccgtggctaggctcctaccacccctccctccacccgggactccacgctgccaccgccacacgacagtacgcatacactcttcttcctcccctcgctctggatggctggcgtccgctccctcagcgcctccgcccatgcccggctcccgcacttgccggctccccgatggagatgaatgaagaaaggaagatctgcaagaataaagtcgaggcggaggcttggtttactggtcttagtgccttgatatgtcgaagacagcatggatcccaggtccaacatatagatggaatccggattgctggacttcctattgatctatatacgacattcaataattagaaccagaatgaaagctttatccatgttggagcatttggttgagcctgaccatcgtcgagttgtggaattaaacttccgcatttgtttggtttatgaactagtttccaagatcggagatgcaatttcatactgtgcaaaagcaatttcgctatgcaagtcacgcatacagaacctgaaaagttccaaggatgctttgttggatggtatagatggtggtgatgcatctgctgctgaagctgaaggaggctcagaaaaatctaccattgaaaaagagctagagcagcttactagcatattgcctgatcttgagaagaagcttgaggacctgtctgaagcaaacccaagcgctgacatggatgagatggtgaaggcaattgtgtccagggtaactgaagtgatgccaaaagctgcatcttttacttcttcccaaatagcaacctcaagcaatggattcgactcctcggttatgtctacgacagcgacaactggaagctctggaagcactgtgaactgaccttggggttgtaggcagaggcgtcaaacgagctagcatcaagccgatctctgccaaacctgttgctaagaaacctgcacttgattcaccatctctccaaggtgacaacagcatcaactctgaggttgtccctgcgacgcagactgatgaatccagctaaagctctacatttgaaacgaacgctttctgacgggggcacggcgataacacgccttctattctagtatgcttagatagattcaatgttagcgcaaacgactgatgataagtttttcagttagtattttaatttggatttagagtacacttatgtatgatttatttgacaatgcttatttatgagacattgaattgtacttatctatattacattaaatatgatgttattaaatatgtgtgtatgtatatttatcttttaaattattataatgtgacatctcaaaaatgattataaattgaagaatgtctagttatg

SEQ ID NO: 29911 - DNA, 2145 bp, Zea Mays
aaagcaggggcagggcaaaccgtattgttggcttcgcctagggtctcccttctactgtcgccgcaacctgaccaacctcccttctactgcccgcctagggtctcccttctactgccgccgcaacggcgcaacctcccttctactgccgccgcaacctcccttcttcgagtcccatccgacctagccctgcaacccgccggacgacgagcagtgaggcccgcggccgagatggaccggtacctgacggtggagcggccacggaacgagtcaaccatcgaagagaacgggatccgcatcaccgcgcagggcctcatctgcaactatgtctcctacgctacctccctcctccaggtgcctgggcttgtcctcaccatcgccgtcgtatcgtattgtacttaggatgcgctgttctgttcgagtcccgtccctgtcgattcgaagagatccccagcaacgtgagggaggtgttcctgaccggccccacctccaagttcggcagggccatcgcgctctacctctgcaggaagaagatcagagtcctgatgttcacggtgtcgtcggagaggttcctgaagatccagagggaggcaccgccggagtaccagcagtacctcgtgcaggtgaccaagtaccaggccgcacagaactgcaaggctcgagaggtggactcaaacatccaagttttgcaagttttgatgttggatgttaaatttctatgctcacccctcgtttggttattgatttgatcatagttttgcatgaactattggcgttggctatctaaaaggacagaaaggcagacatgagcaacagatcccgctccatgggctgaaactgggattcgtgatggcaggcgcccctcttagtcgtgtgtagggcgagctgctgccatggtggctttttcttgcgggtgtgagctccgctcgccgccggtcttggacgccgtggctaggctcctaccacccctccctccacccgggactccacgctgccaccgccacacgacagtacgcatacactcttcttcctcccctcgctctggatggctggcgtccgctccctcagcgcctccgcccatgcccggctcccgcacttgccggctccccgatggagatgaatgaagaaaggaagatctgcaagaataaagtcgaggcggaggcttggtttactggtcttagtgccttgatatgtcgaagacagcatggatcccaggtccaacatatagatggaatccggattgctggacttcctattgattttccaagatcggagatgcaatttcatactgtgcaaaagcaatttcgctatgcaagtcacgcatacagaacctgaaaagttccaaggatgctttgttggatggtatagatggtggtgatgcatctgctgctgaagctgaaggaggctcagaaaaatctaccattgaaaaagagctagagcagcttactagcatattgcctgatcttgagaagaagcttgaggacctgtctgaagcaaacccaagcgctgacatggatgagatggtgaaggcaattgtgtccagggtaactgaagtgatgccaaaagctgcatcttttacttcttcccaaatagcaacctcaagcaatggattcgactcctcggttatgtctacgacagcgacaactggaagctctggaagcactgtgaactgaccttggggttgtaggcagaggcgtcaaacgagctagcatcaagccgatctctgccaaacctgttgctaagaaacctgcacttgattcaccatctctccaaggtgacaacagcatcaactctgaggttgtccctgcgacgcagactgatgaatccagctaaagctctacatttgaaacgaacgctttctgacgggggcacggcgataacacgccttctattctagtatgcttagatagattcaatgttagcgcaaacgactgatgataagtttttcagttagtattttaatttggatttagagtacacttatgtatgatttatttgacaatgcttatttatgagacattgaattgtacttatctatattacattaaatatgatgttattaaatatgtgtgtatgtatatttatcttttaaattattataatgtgacatctcaaaaatgattataaattgaagaatgtctagttatg

SEQ ID NO: 29912 - DNA, 2153 bp, Zea Mays
ggcaaaccgtattgttggcttcgcctagggtctcccttctactgtcgccgcaacctgaccaacctcccttctactgcccgcctagggtctcccttctactgccgccgcaacggcgcaacctcccttctactgccgccgcaacctcccttcttcgagtcccatccgacctagccctgcaacccgccggacgacgagcagtgaggcccgcggccgagatggaccggtacctgacggtggagcggccacggaacgagtcaaccatcgaagagaacgggatccgcatcaccgcgcagggcctcatctgcaactatgtctcctacgctacctccctcctccaggtgcctgggcttgtcctcaccatcgccgtcgtatcgtattgtacttaggatgcgctgttctgttcgagtcccgtccctgtcgattcgaagagatccccagcaacgtgagggaggtgttcctgaccggccccacctccaagttcggcagggccatcgcgctctacctctgcaggaagaagatcagagtcctgatgttcacggtgtcgtcggagaggttcctgaagatccagagggaggcaccgccggagtaccagcagtacctcgtgcaggtgaccaagtaccaggccgcacagaactgcaaggtcatggtgatttcacgtccgttaggctcgagaggtggactcaaacatccaagttttgcaagttttgatgttggatgttaaatttctatgctcacccctcgtttggttattgatttgatcatagttttgcatgaactattggcgttggctatctaaaaggacagaaaggcagacatgagcaacagatcccgctccatgggctgaaactgggattcgtgatggcgcccctcttagtcgtgtgtagggcgagctgctgccatggtggctttttcttgcgggtgtgagctccgctcgccgccggtcttggacgccgtggctaggctcctaccacccctccctccacccgggactccacgctgccaccgccacacgacagtacgcatacactcttcttcctcccctcgctctggatggctggcgtccgctccctcagcgcctccgcccatgcccggctcccgcacttgccggctccccgatggagatgaatgaagaaaggaagatctgcaagaataaagtcgaggcggaggcttggtttactggtcttagtgccttgatatgtcgaagacagcatggatcccaggtccaacatatagatggaatccggattgctggacttcctattgattttccaagatcggagatgcaatttcatactgtgcaaaagcaatttcgctatgcaagtcacgcatacagaacctgaaaagttccaaggatgctttgttggatggtatagatggtggtgatgcatctgctgctgaagctgaaggaggctcagaaaaatctaccattgaaaaagagctagagcagcttactagcatattgcctgatcttgagaagaagcttgaggacctgtctgaagcaaacccaagcgctgacatggatgagatggtgaaggcaattgtgtccagggtaactgaagtgatgccaaaagctgcatcttttacttcttcccaaatagcaacctcaagcaatggattcgactcctcggttatgtctacgacagcgacaactggaagctctggaagcactgtgaactgaccttggggttgtaggcagaggcgtcaaacgagctagcatcaagccgatctctgccaaacctgttgctaagaaacctgcacttgattcaccatctctccaaggtgacaacagcatcaactctgaggttgtccctgcgacgcagactgatgaatccagctaaagctctacatttgaaacgaacgctttctgacgggggcacggcgataacacgccttctattctagtatgcttagatagattcaatgttagcgcaaacgactgatgataagtttttcagttagtattttaatttggatttagagtacacttatgtatgatttatttgacaatgcttatttatgagacattgaattgtacttatctatattacattaaatatgatgttattaaatatgtgtgtatgtatatttatcttttaaattattataatgtgacatctcaaaaatgattataaattgaagaatgtctagttatg

SEQ ID NO: 29913 - DNA, 2047 bp, Zea Mays
ggcaaaccgtattgttggcttcgcctagggtctcccttctactgtcgccgcaacctgaccaacctcccttctactgcccgcctagggtctcccttctactgccgccgcaacggcgcaacctcccttctactgccgccgcaacctcccttcttcgagtcccatccgacctagccctgcaacccgccggacgacgagcagtgaggcccgcggccgagatggaccggtacctgacggtggagcggccacggaacgagtcaaccatcgaagagaacgggatccgcatcaccgcgcagggcctcatctgcaactatgtctcctacgctacctccctcctccaggtgcctgggcttgtcctcaccatcgccgtcgtatcgtattgtacttaggatgcgctgttctgttcgagtcccgtccctgtcgattcgaagagatccccagcaacgtgagggaggtgttcctgaccggccccacctccaagttcggcagggccatcgcgctctacctctgcaggaagaagatcagagtcctgatgttcacggtgtcgtcggagaggttcctgaagatccagagggaggcaccgccggagtaccagcagtacctcgtgcaggtgaccaagtaccaggccgcacagaactgcaaggtagttgatcatagttttgcatgaactattggcgttggctatctaaaaggacagaaaggcagacatgagcaacagatcccgctccatgggctgaaactgggattcgtgatggcaggcgcccctcttagtcgtgtgtagggcgagctgctgccatggtggctttttcttgcgggtgtgagctccgctcgccgccggtcttggacgccgtggctaggctcctaccacccctccctccacccgggactccacgctgccaccgccacacgacagtacgcatacactcttcttcctcccctcgctctggatggctggcgtccgctccctcagcgcctccgcccatgcccggctcccgcacttgccggctccccgatggagatgaatgaagaaaggaagatctgcaagaataaagtcgaggcggaggcttggtttactggtcttagtgccttgatatgtcgaagacagcatggatcccaggtccaacatatagatggaatccggattgctggacttcctattgattttccaagatcggagatgcaatttcatactgtgcaaaagcaatttcgctatgcaagtcacgcatacagaacctgaaaagttccaaggatgctttgttggatggtatagatggtggtgatgcatctgctgctgaagctgaaggaggctcagaaaaatctaccattgaaaaagagctagagcagcttactagcatattgcctgatcttgagaagaagcttgaggacctgtctgaagcaaacccaagcgctgacatggatgagatggtgaaggcaattgtgtccagggtaactgaagtgatgccaaaagctgcatcttttacttcttcccaaatagcaacctcaagcaatggattcgactcctcggttatgtctacgacagcgacaactggaagctctggaagcactgtgaactgaccttggggttgtaggcagaggcgtcaaacgagctagcatcaagccgatctctgccaaacctgttgctaagaaacctgcacttgattcaccatctctccaaggtgacaacagcatcaactctgaggttgtccctgcgacgcagactgatgaatccagctaaagctctacatttgaaacgaacgctttctgacgggggcacggcgataacacgccttctattctagtatgcttagatagattcaatgttagcgcaaacgactgatgataagtttttcagttagtattttaatttggatttagagtacacttatgtatgatttatttgacaatgcttatttatgagacattgaattgtacttatctatattacattaaatatgatgttattaaatatgtgtgtatgtatatttatcttttaaattattataatgtgacatctcaaaaatgattataaattgaagaatgtctagttatg

SEQ ID NO: 29914 - DNA, 2132 bp, Zea Mays
ggcaaaccgtattgttggcttcgcctagggtctcccttctactgtcgccgcaacctgaccaacctcccttctactgcccgcctagggtctcccttctactgccgccgcaacggcgcaacctcccttctactgccgccgcaacctcccttcttcgagtcccatccgacctagccctgcaacccgccggacgacgagcagtgaggcccgcggccgagatggaccggtacctgacggtggagcggccacggaacgagtcaaccatcgaagagaacgggatccgcatcaccgcgcagggcctcatctgcaactatgtctcctacgctacctccctcctccaggtgcctgggcttgtcctcaccatcgccgtcgtatcgtattgtacttaggatgcgctgttctgttcgagtcccgtccctgtcgattcgaagagatccccagcaacgtgagggaggtgttcctgaccggccccacctccaagttcggcagggccatcgcgctctacctctgcaggaagaagatcagagtcctgatgttcacggtgtcgtcggagaggttcctgaagatccagagggaggcaccgccggagtaccagcagtacctcgtgcaggtgaccaagtaccaggccgcacagaactgcaagttgatcatagttttgcatgaactattggcgttggctatctaaaaggacagaaaggcagacatgagcaacagatcccgctccatgggctgaaactgggattcgtgatggcgcccctcttagtcgtgtgtagggcgagctgctgccatggtggctttttcttgcgggtgtgagctccgctcgccgccggtcttggacgccgtggctaggctcctaccacccctccctccacccgggactccacgctgccaccgccacacgacagtacgcatacactcttcttcctcccctcgctctggatggctggcgtccgctccctcagcgcctccgcccatgcccggctcccgcacttgccggctccccgatggagatgaatgaagaaaggaagatctgcaagaataaagtcgaggcggaggcttggtttactggtcttagtgccttgatatgtcgaagacagcatggatcccaggtccaacatatagatggaatccggattgctggacttcctattgatctatatacgacattcaataattagaaccagaatgaaagctttatccatgttggagcatttggttgagcctgaccatcgtcgagttgtggaatttttccaagatcggagatgcaatttcatactgtgcaaaagcaatttcgctatgcaagtcacgcatacagaacctgaaaagttccaaggatgctttgttggatggtatagatggtggtgatgcatctgctgctgaagctgaaggaggctcagaaaaatctaccattgaaaaagagctagagcagcttactagcatattgcctgatcttgagaagaagcttgaggacctgtctgaagcaaacccaagcgctgacatggatgagatggtgaaggcaattgtgtccagggtaactgaagtgatgccaaaagctgcatcttttacttcttcccaaatagcaacctcaagcaatggattcgactcctcggttatgtctacgacagcgacaactggaagctctggaagcactgtgaactgaccttggggttgtaggcagaggcgtcaaacgagctagcatcaagccgatctctgccaaacctgttgctaagaaacctgcacttgattcaccatctctccaaggtgacaacagcatcaactctgaggttgtccctgcgacgcagactgatgaatccagctaaagctctacatttgaaacgaacgctttctgacgggggcacggcgataacacgccttctattctagtatgcttagatagattcaatgttagcgcaaacgactgatgataagtttttcagttagtattttaatttggatttagagtacacttatgtatgatttatttgacaatgcttatttatgagacattgaattgtacttatctatattacattaaatatgatgttattaaatatgtgtgtatgtatatttatcttttaaattattataatgtgacatctcaaaaatgattataaattgaagaatgtctagttatg

SEQ ID NO: 29915 - DNA, 2165 bp, Zea Mays
ggcaaaccgtattgttggcttcgcctagggtctcccttctactgtcgccgcaacctgaccaacctcccttctactgcccgcctagggtctcccttctactgccgccgcaacggcgcaacctcccttctactgccgccgcaacctcccttcttcgagtcccatccgacctagccctgcaacccgccggacgacgagcagtgaggcccgcggccgagatggaccggtacctgacggtggagcggccacggaacgagtcaaccatcgaagagaacgggatccgcatcaccgcgcagggcctcatctgcaactatgtctcctacgctacctccctcctccaggtgcctgggcttgtcctcaccatcgccgtcgtatcgtattgtacttaggatgcgctgttctgttcgagtcccgtccctgtcgattcgaagagatccccagcaacgtgagggaggtgttcctgaccggccccacctccaagttcggcagggccatcgcgctctacctctgcaggaagaagatcagagtcctgatgttcacggtgtcgtcggagaggttcctgaagatccagagggaggcaccgccggagtaccagcagtacctcgtgcaggtgaccaagtaccaggccgcacagaactgcaaggctgccaggtcatggtgatttcacgtccgttaggctcgagaggtggactcaaacatccaagttttgcaagttttgatgttggatgttaaatttctatgctcacccctcgtttggttattgatttgatcatagttttgcatgaactattggcgttggctatctaaaaggacagaaaggcagacatgagcaacagatcccgctccatgggctgaaactgggattcgtgatggcaggcgcccctcttagtcgtgtgtagggcgagctgctgccatggtggctttttcttgcgggtgtgagctccgctcgccgccggtcttggacgccgtggctaggctcctaccacccctccctccacccgggactccacgctgccaccgccacacgacagtacgcatacactcttcttcctcccctcgctctggatggctggcgtccgctccctcagcgcctccgcccatgcccggctcccgcacttgccggctccccgatggagatgaatgaagaaaggaagatctgcaagaataaagtcgaggcggaggcttggtttactggtcttagtgccttgatatgtcgaagacagcatggatcccaggtccaacatatagatggaatccggattgctggacttcctattgattttccaagatcggagatgcaatttcatactgtgcaaaagcaatttcgctatgcaagtcacgcatacagaacctgaaaagttccaaggatgctttgttggatggtatagatggtggtgatgcatctgctgctgaagctgaaggaggctcagaaaaatctaccattgaaaaagagctagagcagcttactagcatattgcctgatcttgagaagaagcttgaggacctgtctgaagcaaacccaagcgctgacatggatgagatggtgaaggcaattgtgtccagggtaactgaagtgatgccaaaagctgcatcttttacttcttcccaaatagcaacctcaagcaatggattcgactcctcggttatgtctacgacagcgacaactggaagctctggaagcactgtgaactgaccttggggttgtaggcagaggcgtcaaacgagctagcatcaagccgatctctgccaaacctgttgctaagaaacctgcacttgattcaccatctctccaaggtgacaacagcatcaactctgaggttgtccctgcgacgcagactgatgaatccagctaaagctctacatttgaaacgaacgctttctgacgggggcacggcgataacacgccttctattctagtatgcttagatagattcaatgttagcgcaaacgactgatgataagtttttcagttagtattttaatttggatttagagtacacttatgtatgatttatttgacaatgcttatttatgagacattgaattgtacttatctatattacattaaatatgatgttattaaatatgtgtgtatgtatatttatcttttaaattattataatgtgacatctcaaaaatgattataaattgaagaatgtctagttatg

SEQ ID NO: 29916 - DNA, 3058 bp, Zea Mays
ctacaatggtgccaaaatctactcgttatctcgttttctactctcttccatttcatcctggccaccagttcccgccatgccgccaccgccgccgcagcgtccagcttcatcccacgttggccgcgccaacctcttctccgcctcaccgcctcccctctccaatcgccgctacccccatcatcggtcgttgcccctcccgcccgtctccccacgccgccgcgaccccaagaagcactcccagcagccttcccaagaagaaccgacagacagcggtccaacaagaacggtcacaaccaacccggccttccgcgcggcccatctccgtaccgcgtaccgcaagcccgtgcctccagccgcagccgccggcgaaggcgaggccctcctcgccgccgacccaaccgatgccgcctcggggcgcgctgtcgtcgtgggtccctcgggcctttccttccgcctccccggggcgccgttcgacttccagttcagctactccgaggcgccccgcgccccaccgctcgccatccgggaaccggccttcctgcccttcgcgccgccgaccatgccgcggccctggacgggcaaggcgccgcttctgacaaaggaggagaaggcgcggcgccggggcgtgcggctgcacacgccgctcgggcaggagacgccgcagacggtgagcgcgcacgggatcatgatggaggtcagggagaggaggaaaatggacctggccagggtgagccccggtgacggcaggagcagggaggaggtgctcggtgagccgctcaccccatctgagacttgagattaaactcaaatgggccaatgtgtagagcataatgagagaatgcagtggcatgataacaaacacatctggagttaagttagatgcaaggtccttttcgattacataaggttaaaaatgtggattgtggcacagccatggtatctgcctacaaattcagccatttgttaggaaacggtgaaactatagcaatgtctttcatgcatgaaacgagaacaagtcaatttgtggccctccaactcttctcagggttttatggtgggccaattgcatacctcttcgaaccatttttatgaacattccatttgagaagtcataattgcatagttgccaccaaaagcgctggtcactcaccgctggattatcaaactgaagaaatgtcgtcatccagacaaaatccttccttccccatcagcacactgatgggaccacttcatggtgttgcatttcttcagtccatggatcctccttatcgctccatctccatggttaccattgcaacatctggaggtagggttggacgggcaggtagccaggagctgagggcaccagcgagggggacttgcgccagatcaggttaggctatctccagcagcagcatctgaggagctggcaccagaggtggggacacttcgactgtgaggagcaggcaggggtcagcaccatgtaagagaaaggggctggcaatggagaccaacatgcaaagcacagatgatgccaatgagaggctgcaatggcgaaagaaaggaagcatcagaaaggatatgccgaggattaatttggaagagatggcttgactcacaacatgttggaaatgatacattgtcattggaggcgccaggaaatctgcaaagttagatgccgaggcgttccaactgttgatatgaagaatctctgttatcatcttgaggagaagtcaggtggaaaagtcattcaccgagtaggcggcgttgtttttctatatagaggaagacattatgatcctaagacccgtcctcgctatccactaatgctctggaaacctgcaactcctgtatatccaaaactcatcaaagaagctccagatgggtttacaaaagaagaagcggatgaaatgagaagaaaagggcgtgatctgctgccaatctgtaaattagccaaaaatggaatatacatcactcttgtcaaggatgtgcgagatgcttttgaaggaagtgacctggtgaagattgactgtgagggtttgaatccaagtgactacaaaaagattggagcgaaactaagggatcttgttccctgtgttcttttatcatttgatgatgagcagatattgatgcacagaggcaaagaatggaaatccagatactcgaagcctcttactctcattccaaaagttccaaagaataatctggcaatgacatctgtcatgaatagttcagatgaagttagtgatgccaacactcaagttgcgataagagaagtattgagacccaaaatgttcaaattatggaagagtgcggtggactcgtctctggcattgctgctggatgacgccgaagcaaataatctcacacccgattcgctcctgactctggttgaggagttcagcgtgacatctcaggcggtggagcactcatttcctgctctgcttgtgaccaatggtgatgcgagcaccgactctctaagtgcagagtacatgaatgacgagcctgaaacaagcgttgctggaaacgaagagggccagctggagcagtcacctgatctccgtgacgatgaacattttgatgtcgacatgtttgagcgtctggagtcatctgtgccattgggatcgctgcctattgacagcatgatagagcggctgaacagtgagtgaagtacagcgagcagttcgttctgtccactgggataactactgatggtcagattgcaatctcggatcgtgtgatgcattatctacgttcctccggaccctcagtctggtgataatctcaagatccgagaatttcctgcgatttggtagcaaacgtgatgtaaagaaactaactgtagtatgcaagtgcgccatgcatttggcaaacgcaccaacggataacacgtctcgtttgccatcgtcaatgagtgcgcttgcatgtatatgaatatctgcatttatactgtgtttaccaaaaaaaaaagtattgtgccatgctccaaaaagatgcggagctagcagtgtcagaagtctataaactctatagtaatttatacttctgcattttctgaatatttttgaaaataaagaat

SEQ ID NO: 29917 - DNA, 1888 bp, Zea Mays
aaacaacacgatagcaaatttgaaatagccacaatgtagtttctaatggcataattaatagtaagtagcttctaatgtagcaaatatgtgaactagcaaagcattctagcagtagcttctagctagttctaatttttgaactctcccatctctcaaaagtcatcatcaaactctcctaggatattgagtgcctccccttatccaccatcgttgccaccatcaggttcatcttcacaatctgtgatttctgcatcatgtggatcattttcttcctattcagcctctgacacattttgtgcagctgcagcaccagaatttcttcttgaatacacattatgggctcttcttggaaagtttcggccacaaagtgcttttgatgcaccaatgacattatttacaagctcccatgaagagatggcttgactcacaacatgttggaaatgatacattgtcattggaggcgccaggaaatctgcaaagttagatgccgaggcgttccaactgttgatatgaagaatctctgttatcatcttgaggagaagtcaggtggaaaagtcattcaccgagtaggcggcgttgtttttctatatagaggaagacattatgatcctaagacccgtcctcgctatccactaatgctctggaaacctgcaactcctgtatatccaaaactcatcaaagaagctccagatgggtttacaaaagaagaagcggatgaaatgagaagaaaagggcgtgatctgctgccaatctgtaaattagccaaaaatggaatatacatcactcttgtcaaggatgtgcgagatgcttttgaaggaagtgacctggtgaagattgactgtgagggtttgaatccaagtgactacaaaaagattggagcgaaactaagggatcttgttccctgtgttcttttatcatttgatgatgagcagatattgatgcacagaggcaaagaatggaaatccagatactcgaagcctcttactctcattccaaaagttccaaagaataatctggcaatgacatctgtcatgaatagttcagatgaagttagtgatgccaacactcaagttgcgataagagaagtattgagacccaaaatgttcaaattatggaagagtgcggtggactcgtctctggcattgctgctggatgacgccgaagcaaataatctcacacccgattcgctcctgactctggttgaggagttcagcgtgacatctcaggcggtggagcactcatttcctgctctgcttgtgaccaatggtgatgcgagcaccgactctctaagtgcagagtacatgaatgacgagcctgaaacaagcgttgctggaaacgaagagggccagctggagcagtcacctgatctccgtgacgatgaacattttgatgtcgacatgtttgagcgtctggagtcatctgtgccattgggatcgctgcctattgacagcatgatagagcggctgaacagtgagtgaagtacagcgagcagttcgttctgtccactgggataactactgatggtcagattgcaatctcggatcgtgtgatgcattatctacgttcctccggaccctcagtctggtgataatctcaagatccgagaatttcctgcgatttggtagcaaacgtgatgtaaagaaactaactgtagtatgcaagtgcgccatgcatttggcaaacgcaccaacggataacacgtctcgtttgccatcgtcaatgagtgcgcttgcatgtatatgaatatctgcatttatactgtgtttaccaaaaaaaaaagtattgtgccatgctccaaaaagatgcggagctagcagtgtcagaagtctataaactctatagtaatttatacttctgcattttctgaatatttttgaaaataaagaat

SEQ ID NO: 29918 - DNA, 1656 bp, Zea Mays
ggcactatatcgagatcaagtgttgaagcagagtacaaggctttgagcctttggcaaatgctacaacagagatcatgtggatttaaatcttattgatcaagttaaatcttattgatagggattgattttgtacttactggagatttggttatggatggtttcatcaagctcttttggaagagatggcttgactcacaacatgttggaaatgatacattgtcattggaggcgccaggaaatctgcaaagttagatgccgaggcgttccaactgttgatatgaagaatctctgttatcatcttgaggagaagtcaggtggaaaagtcattcaccgagtaggcggcgttgtttttctatatagaggaagacattatgatcctaagacccgtcctcgctatccactaatgctctggaaacctgcaactcctgtatatccaaaactcatcaaagaagctccagatgggtttacaaaagaagaagcggatgaaatgagaagaaaagggcgtgatctgctgccaatctgtaaattagccaaaaatggaatatacatcactcttgtcaaggatgtgcgagatgcttttgaaggaagtgacctggtgaagattgactgtgagggtttgaatccaagtgactacaaaaagattggagcgaaactaagggatcttgttccctgtgttcttttatcatttgatgatgagcagatattgatgcacagaggcaaagaatggaaatccagatactcgaagcctcttactctcattccaaaagttccaaagaataatctggcaatgacatctgtcatgaatagttcagatgaagttagtgatgccaacactcaagttgcgataagagaagtattgagacccaaaatgttcaaattatggaagagtgcggtggactcgtctctggcattgctgctggatgacgccgaagcaaataatctcacacccgattcgctcctgactctggttgaggagttcagcgtgacatctcaggcggtggagcactcatttcctgctctgcttgtgaccaatggtgatgcgagcaccgactctctaagtgcagagtacatgaatgacgagcctgaaacaagcgttgctggaaacgaagagggccagctggagcagtcacctgatctccgtgacgatgaacattttgatgtcgacatgtttgagcgtctggagtcatctgtgccattgggatcgctgcctattgacagcatgatagagcggctgaacagtgagtgaagtacagcgagcagttcgttctgtccactgggataactactgatggtcagattgcaatctcggatcgtgtgatgcattatctacgttcctccggaccctcagtctggtgataatctcaagatccgagaatttcctgcgatttggtagcaaacgtgatgtaaagaaactaactgtagtatgcaagtgcgccatgcatttggcaaacgcaccaacggataacacgtctcgtttgccatcgtcaatgagtgcgcttgcatgtatatgaatatctgcatttatactgtgtttaccaaaaaaaaaagtattgtgccatgctccaaaaagatgcggagctagcagtgtcagaagtctataaactctatagtaatttatacttctgcattttctgaatatttttgaaaataaagaat

SEQ ID NO: 29919 - DNA, 865 bp, Zea Mays
cccctttctatcttattatcaatgaagttagtgatgccaacactcaagttgcgataagagaagtattgagacccaaaatgttcaaattatggaagagtgcggtggactcgtctctggcattgctgctggatgacgccgaagcaaataatctcacacccgattcgctcctgactctggttgaggagttcagcgtgacatctcaggcggtggagcactcatttcctgctctgcttgtgaccaatggtgatgcgagcaccgactctctaagtgcagagtacatgaatgacgagcctgaaacaagcgttgctggaaacgaagagggccagctggagcagtcacctgatctccgtgacgatgaacattttgatgtcgacatgtttgagcgtctggagtcatctgtgccattgggatcgctgcctattgacagcatgatagagcggctgaacagtgagtgaagtacagcgagcagttcgttctgtccactgggataactactgatggtcagattgcaatctcggatcgtgtgatgcattatctacgttcctccggaccctcagtctggtgataatctcaagatccgagaatttcctgcgatttggtagcaaacgtgatgtaaagaaactaactgtagtatgcaagtgcgccatgcatttggcaaacgcaccaacggataacacgtctcgtttgccatcgtcaatgagtgcgcttgcatgtatatgaatatctgcatttatactgtgtttaccaaaaaaaaaagtattgtgccatgctccaaaaagatgcggagctagcagtgtcagaagtctataaactctatagtaatttatacttctgcattttctgaatatttttgaaaataaagaat

SEQ ID NO: 29920 - DNA, 1165 bp, Zea Mays
gactactgtattaaggattgtggcatcatctcggcgccggagggctgtgatggatccgtcctcctcaccgtgaatcctggcggcgggcagactgagcgtgacgccctcccaaacaacccgagcctccgcggcttcgacgtgatcgacgccgccaagaccgccgttgagcagagctgcccgcgcacagtctcgtgcgccgacatcgtcgccttcgccgcccgcgacagcatcagtctcaccgggagcgtctcgtaccaggtccccgcgggccggcgcgacggccgcgtgtccaacgcgacggagaccgtcgacctacccccgcccacctccacggcgcaaagcctgaccgacttgttcaaggtcaaggagcttagcgtggaggacatggtcgtcctctccggcgctcacaccgtcggccgctccttctgcgcctccttcttcaagcgcgtctggaacacaagcacgaaccccgctaccgcaatcgtggacgcggggctgagcccgtcgtacgcgcagctactacgcgcgctgtgcccgtcaaacacgacgcagacgacgccgatcacgacggccatggacccgggaacgcccaacgtgctggacaacaactactacaagctcctgcctcgcggcatggggctcttcttctccgacaaccagctgcgcgtgaacccgcagatggccgcgctggtgagcagcttcgcgtccaacgagacgctgtggaaggagaaattcgcggcggccatggtaaagatgggacgcatccaggtgcagacagggacgtgcggagaggtccgtctcaactgcggcgtcgtcaacccgagttcgtactcgtcgtcgtcggcggtggagctgggttcgagcgcgccagcagccgtcggtgaagagggctacgccgcgagctagtagctcgcataccagtcttcggccgccgtcgttgtcgagatcaatgattttttttctctctctcgcatgcatccctcttctgcttttattttgtcgcgtggactgtggtttttgttgtgtcgatgatctttgttgtgtgccagtgccactaaacgtacgcatgccggccggcgaactcttaacttcggtggcgggtaataataagcatatgtatgagtaagatgagattgtgtcaatttagggtgtggatgcttttaaa

SEQ ID NO: 29921 - DNA, 689 bp, Zea Mays
gctttccggtgacactacttttttatgtactactttgctgggcctgaaaacgggaacaaaaaaacaaaaagtatgaaagatcagcgaaaggaaaatgctacttcaactgaggcccacacattgttctctactaacctgtgttgccttccttctttggtgtatctgttcttattgtgtttccccaactgtaggctctctgtcgtggatatcctaccaaaatttgcttcttacttccattaatgtcgctcactgcgtttcgaagatgcaccggactatcagtacctgaagagattgttcagagacctttttattcgggaaggtttttagtttgattatgtttttgactggaccattctaaagtaccaacaggcacagatgaccactgctccacctcgtgcaattgtctgtacaaggaataaacttaccctcctaacttaagtacttgtagagattgtattgcgtatagaaatgtacttcttttgttatgttatatttcattgccccctctctattttgattcctggccttgatttttgtttcttgtatttttttcaggtcgtctagctactgtagttgcccatcgtcaaagttttgtagagtggacatattgctaagaatctgccacattatgtttgcttgaggtattaatttatccaggtgtttaatgctggagtacagttagaagatcc

SEQ ID NO: 29922 - DNA, 557 bp, Zea Mays
gtcagaacccgacccgctgccaagcctagttctttcctctcctctctttttcagcccccggagccgcctgcgtcaccacatcgtcatcgtgcgtgtaggagtgtcctccagatccagagccggcgcgccgcccctgcctctcctggcctctccgccctccgagcgcgcgccgacgccgcccctagcgccgcccgtagctctagcgtcgacgccctgccgacgcccagaaagcgtcccggccttcactagctggaagtcccgagtctcgagtggaggcggatccaaagccaaagccaaagccaacaaccgccgctgggacgcgagggatcgattcggagatggcgtcaactagctccgccggggacgtgggagactcagggtcaaaaggtgcggttgcagataaaacacttactgcttctgcaaacactagtagctcacatcaagaatctcatgatgttgaaacaagccttttagatatttgggtcaacaaatttgtgatgcatatgtataggctatggaccatattcttactgcaatgtgttcccattcatgattga

SEQ ID NO: 29923 - DNA, 1667 bp, Zea Mays
gtcagaacccgacccgctgccaagcctagttctttcctctcctctctttttcagcccccggagccgcctgcgtcaccacatcgtcatcgtgcgtgtaggagtgtcctccagatccagagccggcgcgccgcccctgcctctcctggcctctccgccctccgagcgcgcgccgacgccgcccctagcgccgcccgtagctctagcgtcgacgccctgccgacgcccagaaagcgtcccggccttcactagctggaagtcccgagtctcgagtggaggcggatccaaagccaaagccaaagccaacaaccgccgctgggacgcgagggatcgattcggagatggcgtcaactagctccgccggggacgtgggagactcagggtcaaaaggtgcggttgcagataaaacacttactgcttctgcaaacactagtagctcacatcaagaatctcatgatgttgcaactataaccgggaaggaaaaaacattaacaagcagcaaatgccatctcggcttctgcttaccttaaattcatctggcacttcccatccaaaaaaagctgccggcgcttcaacatgagcaagagggccttcattgcttgttttgtggaccttgaacataactcttgtttgtcatattcaatccctacccccgcaaggtgacgactatggtgtggggcaccagcagaagcctgggcactctgcagcatgaaggagaggccatcaggtgttacaagaaggctggagaccttcatgatgcaaaatcacgtgtggaggacatttggaagaaaatgaacagtggttttcctaataagatgcccaaacctgcaatgacaaagctcagtacaacagaaaaacaaaagaaaaataaaccaacaaataattggatgactgttctaggcctttcaccaagcaaggcacatagtgtcgatcaaggatccaaaaatgggctacaacagacacaacatgaaatgagcgaggatgctaaaaaacttgcagccaaggcccttgcagctgccaaaaatgctgctgctgtggcatctggacgagggaaagtggagatcactgaggtaagggactttgctgggaaggacatcgaaatcaagaaactggttgatgctaattcaaaggaggcaatcgagaaggccagggcaggtggtgccgccccatcagctgtcgataacatcctagagcaaatacggaagaagcagaagctgagcgtcctggacaagacgaagaaagactggggagagtacaaggaagagaaccggggcttgggggaagagctggacgcctacaagaagagctcgaaccagtaccttgacaagcaatcatttctgcagcgaaccgattaccgcgagtttgagcgcgagcgggatgcccggctgtcaatgatggccaagcggaggacagatacgcgggaggactgaaatgtttccctgtaactccgttgtagacattctttcgagataatggtagacactaaattgtcaatgccttccagccccgttaaatcttcttttttagaattataatgtgctgattataatttacaaagatgcaccgtgcatgtgcgtaaattgcatctggtggttttggcaaacatttctgagctgcataaaatgcagtcatgattggatatttctgaaaccgggaaactttgacgaacc

SEQ ID NO: 29924 - DNA, 1292 bp, Zea Mays
gtcagaacccgacccgctgccaagcctagttctttcctctcctctctttttcagcccccggagccgcctgcgtcaccacatcgtcatcgtgcgtgtaggagtgtcctccagatccagagccggcgcgccgcccctgcctctcctggcctctccgccctccgagcgcgcgccgacgccgcccctagcgccgcccgtagctctagcgtcgacgccctgccgacgcccagaaagcgtcccggccttcactagctggaagtcccgagtctcgagtggaggcggatccaaagccaaagccaaagccaacaaccgccgctgggacgcgagggatcgattcggagatggcgtcaactagctccgccggggacgtgggagactcagatgcaaaatcacgtgtggaggacatttggaagaaaatgaacagtggttttcctaataagatgcccaaacctgcaatgacaaagctcagtacaacagaaaaacaaaagaaaaataaaccaacaaataattggatgactgttctaggcctttcaccaagcaaggcacatagtgtcgatcaaggatccaaaaatgggctacaacagacacaacatgaaatgagcgaggatgctaaaaaacttgcagccaaggcccttgcagctgccaaaaatgctgctgctgtggcatctggacgagggaaagtggagatcactgaggtaagggactttgctgggaaggacatcgaaatcaagaaactggttgatgctaattcaaaggaggcaatcgagaaggccagggcaggtggtgccgccccatcagctgtcgataacatcctagagcaaatacggaagaagcagaagctgagcgtcctggacaagacgaagaaagactggggagagtacaaggaagagaaccggggcttgggggaagagctggacgcctacaagaagagctcgaaccagtaccttgacaagcaatcatttctgcagcgaaccgattaccgcgagtttgagcgcgagcgggatgcccggctgtcaatgatggccaagcggaggacagatacgcgggaggactgaaatgtttccctgtaactccgttgtagacattctttcgagataatggtagacactaaattgtcaatgccttccagccccgttaaatcttcttttttagaattataatgtgctgattataatttacaaagatgcaccgtgcatgtgcgtaaattgcatctggtggttttggcaaacatttctgagctgcataaaatgcagtcatgattggatatttctgaaaccgggaaactttgacgaacc

SEQ ID NO: 29925 - DNA, 1965 bp, Zea Mays
gtcagaacccgacccgctgccaagcctagttctttcctctcctctctttttcagcccccggagccgcctgcgtcaccacatcgtcatcgtgcgtgtaggagtgtcctccagatccagagccggcgcgccgcccctgcctctcctggcctctccgccctccgagcgcgcgccgacgccgcccctagcgccgcccgtagctctagcgtcgacgccctgccgacgcccagaaagcgtcccggccttcactagctggaagtcccgagtctcgagtggaggcggatccaaagccaaagccaaagccaacaaccgccgctgggacgcgagggatcgattcggagatggcgtcaactagctccgccggggacgtgggagactcagggtcaaaaggtgcggttgcagataaaacacttactgcttctgcaaacactagtagctcacatcaagaatctcatgatgttgatgcaaaatcacgtgtggaggacatttggaagaaaatgaacagtggttttcctaataagatgcccaaacctgcaatgacaaagctcagtacaacagaaaaacaaaagaaaaataaaccaacaaataattggatgactgttctaggcctttcaccaagcaaggcacatagtgtcgatcaaggatccaaaaatgggctacaacagacacaacatgaaatgagcgaggatgctaaaaaacttgcagccaaggcccttgcagctgccaaaaatgctgctgctgtggcatctggacgagggaaagtggagatcactgaggtaagggactttgctgggaaggacatcgaaatcaagaaactggttgatgctaattcaaaggaggcaatcgagaaggccagggcaggtggtgccgccccatcagctgtcgataacatcctagagcaaatacggaagaagcagaagctgagcgtcctggacaagacgaagaaagactggggagagtacaaggaagagaaccggggcttgggggaagagctggacgcctacaagaagagctcgaaccagtaccttgacaagcaatcatttctgcagcgaaccgattaccgcgagtttgagcgcgagcgggatgcccggctgtcaatgatggccaagcggaggacagatacgcgggaggactgaaatgtttccctgtaactccgttgtagacattctttcgagataatgtaccgagcttgaagttgatgttccatgctcggtggcctatcagtgttactcagaacgggagagtattcctcagtggatgccattcatctcgtctgtcaagatccttgaagataaacctgatctttcacggtggactctgaagtacgaggtgcttgggcgggatgtagaattttcttggcttgcacgtaacatgacacctattaaaaaccagaagatccattggcgatctcttgaaggtcttgctaatagaggtgctgtccggttcttccccaaaagctcatcctcctgtagagtacaactgacggtggcatatgaagttcctgaaattttggccccagttgcatcagcactgaaaccgtttctggaaagcttgcttctcaaaggtttagagcgctttgccacatttgccaaggagcgtaatagcaagatacctcaggcttaacagcgccattactagttccattctagtgaagccacatcacaatgcatgtaaagaatgatgtcattatggatgtgcccaaataatgtacccaaagagaagtgaatacaaatctgtcaaaagttggaagtaagcttcttgctgtatgtcattgtagtgttataacgccattataaatcttgaatataattattggtagcatcacatgccatctcattctcagtaaatttcaccagaatacgcatctccaacgtagacccgattgttttagctacttggcggtaaacaccaagcatgagccatgccgaacgagtgtatttgcacgcgtacctgactaatacattgctg

SEQ ID NO: 29926 - DNA, 1037 bp, Zea Mays
gttgtacccggggatcgagggccgttcagttcatctgccctgttatctgagttattcttcttgaaccgttttctggagtacaccaatagattcttggtggtgtattcagttgatcaaagacagatgcaaaatcacgtgtggaggacatttggaagaaaatgaacagtggttttcctaataagatgcccaaacctgcaatgacaaagctcagtacaacagaaaaacaaaagaaaaataaaccaacaaataattggatgactgttctaggcctttcaccaagcaaggcacatagtgtcgatcaaggatccaaaaatgggctacaacagacacaacatgaaatgagcgaggatgctaaaaaacttgcagccaaggcccttgcagctgccaaaaatgctgctgctgtggcatctggacgagggaaagtggagatcactgaggtaagggactttgctgggaaggacatcgaaatcaagaaactggttgatgctaattcaaaggaggcaatcgagaaggccagggcaggtggtgccgccccatcagctgtcgataacatcctagagcaaatacggaagaagcagaagctgagcgtcctggacaagacgaagaaagactggggagagtacaaggaagagaaccggggcttgggggaagagctggacgcctacaagaagagctcgaaccagtaccttgacaagcaatcatttctgcagcgaaccgattaccgcgagtttgagcgcgagcgggatgcccggctgtcaatgatggccaagcggaggacagatacgcgggaggactgaaatgtttccctgtaactccgttgtagacattctttcgagataatggtagacactaaattgtcaatgccttccagccccgttaaatcttcttttttagaattataatgtgctgattataatttacaaagatgcaccgtgcatgtgcgtaaattgcatctggtggttttggcaaacatttctgagctgcataaaatgcagtcatgattggatatttctgaaaccgggaaactttgacgaacc

SEQ ID NO: 29927 - DNA, 1148 bp, Zea Mays
gcagctaatgaatagccaataggcccattgaatattattcttgtggtcgccgggagacagcggctgcccaaccatataactgtaggggagactaggagagcaggagtacattacaaccgcgcgcggagcacgcggtcacagaagagagacgacggagagcagccatggccgcaggagccgcgttgtactaccacccaggcgccgggaaggtgagcctcgaggcggtcgtcccgtcctctccgtcgctggccctgaggctatcgcagagcaaggtgctcagcgtcagcagcagggcaagggcaagagcaagcgcaaggcctgccttgttctcccctgtggccatggactggcaggagtgcactaccgagcttgaagttgatgttccatgctcggtggcctatcagtgttactcagaacgggagagtattcctcagtggatgccattcatctcgtctgtcaagatccttgaagataaacctgatctttcacggtggactctgaagtacgaggtgcttgggcgggatgtagaattttcttggcttgcacgtaacatgacacctattaaaaaccagaagatccattggcgatctcttgaaggtcttgctaatagaggtgctgtccggttcttccccaaaagctcatcctcctgtagagtacaactgacggtggcatatgaagttcctgaaattttggccccagttgcatcagcactgaaaccgtttctggaaagcttgcttctcaaaggtttagagcgctttgccacatttgccaaggagcgtaatagcaagatacctcaggcttaacagcgccattactagttccattctagtgaagccacatcacaatgcatgtaaagaatgatgtcattatggatgtgcccaaataatgtacccaaagagaagtgaatacaaatctgtcaaaagttggaagtaagcttcttgctgtatgtcattgtagtgttataacgccattataaatcttgaatataattattggtagcatcacatgccatctcattctcagtaaatttcaccagaatacgcatctccaacgtagacccgattgttttagctacttggcggtaaacaccaagcatgagccatgccgaacgagtgtatttgcacgcgtacctgactaatacattgctg

SEQ ID NO: 29928 - DNA, 2198 bp, Zea Mays
gggaaagtgacgacgggcagggcgggaggagaagctgtgggtcgatcacttgggtcttgggtggcacgcgctacaagctagggcttctgctccgtcctccgcgaatccgcggcgagcctgctagctgcgtggcttccctcttcccgggagcggcgcggcggtagtgctggtgctgcccggaccagaccagacccgaaagcggagaggcccccgtgcaaccggagccgtgcgttggaggtggacaggtggtggcacctgtgggcaacggccaacggcacggcaggtacaccgtacagctcttgtgtcttgttcacttggtccctagtcgttcgtggtgtaggatgccgtcgtcggcgttaccatcactacaagcacgcggcggccgcagctgcgtcgccgtcgtccagtgccattggtgacggtggccgtgtctttggcgctcatctcgctggcgtgccttcctgtcttcgcggatgcaagcagagcgctgcaccgcgaccgggaggagcaccggaggcagcaccaccgcacggaggacaagaagagccgcgtctcgctccctcccgacgctgacggcgactctccgcccgagcctccggactccggcggcgcgccgccgcctgccgacgacagcgactgcggcaacgtgttcgacgtgagggcgttcggcgcgtcgggcgacggctcgtgcgtcgacgacgacacggccgcgttccgcgcggcgtggaaggcggcgtgctcctccgactccgccgcggccacgctgctggtgccgtcggacggcgtgttcaccatcgcatccaccatcttctccgggccgtgcaagcccgacctcaccttccaaatcgatggcgtcctcatgccgccggacggcccggcgagctggccggcgacggacagccggaaacagtggatagtcttctacaaggccgatcgcttgacgctggcgggggaaggcaccatcgaaggcaacggtgaggagtggtgggatctgccgtgcaagcctcacaggggtccaaacggatcgacgctgcgcggaccatgtgacagccccgcgctcatacgattcttctcgagcaatgacgtgacggtatgcggcctgcggatcgagaacagcccgcagttccacctcaggttcgacgactgcgagcgcgtgcgcgtcgacggcctcttcgtcagctcgccggcgtccagccccaacacggacggcgtccacgtcgagaacaccaagtccgtccagatcctcaactctaggatctacaacggcgacgactgcgtctccatcggcgccggatgctccgatgtccacgtcgagaacataacatgcggccacggccatggaattagcatcggcagcctgggtgtccacaacacccacgcctgcgtgtccaacgtcacggtccggaacgtgcggatactcgactccgacaacggcgtccggatcaagacgtggcagggcggcgccggcgcggtgtcggcggtcgagttcaccggcgtgcagatgcagaacgtgaagaactgcatcgtcatcgaccagtactactgcctcggccacgggtgcgccaaccagacctccgcggtgcgcgtggccggcgtcgcgtacagggacatccacggcacgtacaacccgcaggccggcgcgcccatccgcctcgcgtgcagcgacgccgtcgcctgcacggacatcaccatgtctggcgtcgagctgctgccggccggcggggacgacggagcactgctcgccgacccctactgctggaacgcgtacggggtcatggagacgctcacgctgccaccggtgtactgcttgctggagggcagcccggagtctctccaggatccgctcaccagttgctgagatgagatcgttttctttactaacaaagatttctctcctgagacagtcaacgctaatacactggacattctacatgtgacaaattacaaattacgcagacaatgtgaatttctgaaatggcatgctcccagcaactgaaagttgagccgcaatgtattcaagagagtgaaatacgcactcgagtcctcaaaaactgaggatggatagatactcttcctcatccaaataaaaatacgccggcataaggtgtgcacagtgacgaacaatctcggtagatcctaagaaaaatgtaagcaggacggcgacgacgaccggagagccctttagcacaacaacaaac

SEQ ID NO: 29929 - DNA, 2462 bp, Zea Mays
gtcgatcggtatccgcggtcctgcgccattaacaagtcacacggggccggacgggtggtgggcgcgccccggcacctacctgatgatgtcgtcccgtccctcccctcccgcgccgccgtcggtccccgaggcagcaagcgaagccgatcagatgcgccgtcgccgttccgccctcgcgcgcgcgcgtcgcgcatccagcctttattactccaaatgcttggagtatatcgcaaaaaccatcatcaacagaccccgccaccccaccaaccgcccttgactccaagcatggcgccatagatgccagcggagggtcctgatcgattcataaacacgcgcgttaatgcatcgcctttctccgcgcgcttggccttttccttttccttttcttttctccccaccaccattgttgtattgtatcgctccgtcggttcgtcgtcgtgcgacgtctcgtcatctcccgacaacgaggagatgctatgctgctactactacggtactacctactgtgggaaaaaaggctgaggccacacctcaacctctcaacctcaactgctgcatgccgcctatacatactacgcacgcagtcgcgcccggccctgcactgcactgcacgggcgcggcgggagatcgagaggagactttgctcgcttttggtgggcatccgcgcggagcgtgaccacagacggtgtagagactagatagatcggaaggggatctaggcatagagagcgaggaggatgaccggcgttgttgcaggcgccggagggggcaacaaggcggcgggcgccacgctgcggctgcaccactaccttgtgatggccggggtggcggcggcgttcgtcctcgcctgcctccggtacgcgccggaccccgcggggtacggcttcctggccgtggcgccgcggccggtggaggccgatgctggtgcccggcgggacaccactcctccaccgcgcccgtcgtcgtcgtcgtcgtcggtggtcatcttcaacttcggtgactccaactccgacacgggcggcatggcggcggtcaacgggatgaacattaacctgcccgagggacgcaccttcttccgccgccccaccggaaggctctccgatggccgcctcgtcatcgacttcatctgtgagagcctgcacacgcctttcctgagcccatacctcaaggcgctgggcgcggatttcagcaacggcgtgaacttcgccatcggcggctcgacggcgacgccggggggctctccattctcgctggacgtgcagctccatcagtggctctacttcagggccaggtccatggagatgatcaacctagaggcctcccatcgatcgcgaaggattccgaaaggccatctacaccatcgacatcgggcagaacgacgtgtctgcttacatgcacctgccctacgaccaagtgcttgccaagatccctggatttgttgctcagatcaagtacaccatcgagacgctgtactcgcacggggcccgcaagttctggatccacggcacgggcgcgctgggctgcctgccgcagaagctggccatcccgcgggacgccgacgacggcgaccagctggacgcccacggctgcctcaagacctacaacaacgccgccaagcgcttcaacgcgctgctcggcgacgcctgcgcccagctccggcgccggatggtggacgcggcgctcgtcttcgtcgacatgtacgccgtcaagtacgacctggtggccaaccacacgacgcacgggatcgagaaacctctcatggcgtgctgcggctacggcgggccgccgtacaactacaaccacttcaaggcgtgcatgtcggcggagatgcagctgtgcgacgtgggcacgcgcttcatcagctgggacggcgtgcacttcacggaggccgccaacgccatcgtcgccgccaaggtgctcaccggcgactactccacgcccagggtcaccatcgccaaactcgtcaactccacgctgcccaacgacgactagctggctggccgatcgatcgatcgatcgtcgtcgtcgtcattctgataaacatactgcaggctgcaggcttcatcgatccatatccaattgtccgtagaaatctacgactagctcattgtagatctgtaatgtgggctaagagatgcatgacgatcgactatagctgcccaactcgtcaagagctggttcaccgccctcgtcatgatcgagctagtttggacgagcaaattccatggcaccgagtgacacaattgatatcctcattgactaatactagtagtcgtactagcaaaaggaagagagggttggaacttggaacaactgagtggttctgtgggggtcgttagtgttagaatttatactgatcgattcctaagtccttagaaaaccaatccgtaactggaagtaaaatcttgatgacgagtagatctgatctactaagaggaataggaaaacatacctttgttgtt

SEQ ID NO: 29930 - DNA, 1595 bp, Zea Mays
aaaatgggtagctccatccgtcccctccccactgcacaccacaccacagcagcatatatgccactgccctgcccaggcagccagccatgccgccaccaccccgatcccggcacagaacccagtgccagacgcggacagcgagcgcgaccacatctatctaggacccgtatctctctctctcctcccgaccagcacgtcacgtgccacggacaggggtcaagcgcggtcgccgatgtcggcagcgggcggcagcctcgcccgcgccacctcgcggcccgcggcggcagcatggctgctgctggcgctggccgcagcagcagcatcggcgctggcgctgccagcggccgcgggcggcttcagctgccgtcctgggtcccggccggtgctcttcaacttcggggactccaactccgacacgggcggcatggcggcggccaaggggtggcacctcacgcgcccggagggccgcgccttcttcccacgccccaccggccggttctgcgacggccgcctcgccatcgacttcctctgcgaaagcttgaacatcagctatttgagcccatttctgaaggcgttaggctccaattacagcaacggtgcaaatttcgccattgctggcgcagcaacgcaaccgcgagatgttccatttgcgttgcacatacaagtgcaggagttcttgtacttcagagatagatccttggaactcatcgatcaaggtctaagtggtccaattgatgcacaaggattccaaaacgctctatatatgatagacatagggcagaacgatgtaaacgctcttctgtcaaacttgccctatgatcaagttattgccaaattcccaccaattcttgctgagattaaggacgctgtccagactctatatagcaacggtagccgaaacttctggatacatgggacgggggctctgggttgcctgccgcagaagcttgccataccaaggaaaaacgacagcgatcttgatcagtatggctgtctcaagacctataacagagctgcagttgcgttcaacgcagcgctgggcagcctctgcgacgagctgagtgcgcagatgaaagacgcgacgcttgtgtacacggacctgttccccatcaagtatggtcttgtcgccaaccacactaaatatggttttgacaagccgctgatgacatgctgtgggtacggagggcctccctacaactacgacttcagcaagggttgccagtctaaggatgtggcggcctgcgatgacggctcgaagttcgtcagctgggatggcgtgcacctgacggaggcggccaatgcggttgtggccagagcgatactgagctcacagtactccaagcccagtctcaagtttgatcagttctgcagagcctgatacttggatgtgacccatcattgatctgtcagccatagcccataggccataactttggataggtgaaacttccaaatattgtgggccacatgtaccttcaaactacatgtcctatctgatatgttttcatcaaagagagaaatacaccatgggttatcaaacttcttccgtattcttatatgagttgatgaattctcaaagtgttcaaatttctcag

SEQ ID NO: 29931 - DNA, 1563 bp, Zea Mays
aaaatgggtagctccatccgtcccctccccactgcacaccacaccacagcagcatatatgccactgccctgcccaggcagccagccatgccgccaccaccccgatcccggcacagaacccagtgccagacgcggacagcgagcgcgaccacatctatctaggacccgtatctctctctctcctcccgaccagcacgtcacgtgccacggacaggggtcaagcgcggtcgccgatgtcggcagcgggcggcagcctcgcccgcgccacctcgcggcccgcggcggcagcatggctgctgctggcgctggccgcagcagcagcatcggcgctggcgctgccagcggccgcgggcggcttcagctgccgtcctgggtcccggccggtgctcttcaacttcggggactccaactccgacacgggcggcatggcggcggccaaggggtggcacctcacgcgcccggagggccgcgccttcttcccacgccccaccggccggttctgcgacggccgcctcgccatcgacttcctctgcgaaagcttgaacatcagctatttgagcccatttctgaaggcgttaggctccaattacagcaacggtgcaaatttcgccattgctggcgcagcaacgcaaccgcgagatgttccatttgcgttgcacatacaagtgcaggagttcttgtacttcagagatagatccttggaactcatcgatcaaggtctaagtggtccaattgatgcacaaggattccaaaacgctctatatatgatagacatagggcagaacgatgtaaacgctcttctgtcaaacttgccctatgatcaagttattgccaaattcccaccaattcttgctgagattaaggacgctgtccagactctatatagcaacggtagccgaaacttctggatacatgggacgggggctctgggttgcctgccgcagaagcttgccataccaaggaaaaacgacagcgatcttgatcagtatggctgtctcaagacctataacagagctgcagttgcgttcaacgcagcgctgggcagcctctgcgacgagctgagtgcgcagatgaaagacgcgacgcttgtgtacacggacctgttccccatcaagttttgacaagccgctgatgacatgctgtgggtacggagggcctccctacaactacgacttcagcaagggttgccagtctaaggatgtggcggcctgcgatgacggctcgaagttcgtcagctgggatggcgtgcacctgacggaggcggccaatgcggttgtggccagagcgatactgagctcacagtactccaagcccagtctcaagtttgatcagttctgcagagcctgatacttggatgtgacccatcattgatctgtcagccatagcccataggccataactttggataggtgaaacttccaaatattgtgggccacatgtaccttcaaactacatgtcctatctgatatgttttcatcaaagagagaaatacaccatgggttatcaaacttcttccgtattcttatatgagttgatgaattctcaaagtgttcaaatttctcag

SEQ ID NO: 29932 - DNA, 1640 bp, Zea Mays
cccattcctatcccatccccgaaaaaagagcagcgctctgcagaggattctgttccgttcttaatccagtcttcgccatccgtatctgaacttttgtgtcatcatccatgcggctgatactaacaattagtatagcactagtagtctagtataccacaactcatccaatacatcacccttctggagcttcagtcactgacggatgaaccccataatatcttgccatgacatctatcagcagccagccaggatctgttttccgtgcaaagtgcagatgcggtggggatgctgagaccacggcatcacgtgcaggagctcatgtattatgttgctcaagctaatcatgtgtactactaccatctgccaaccagagtacactgcctcagctaagcaacactgctaattaaggactatcacgtgaaagcgctctgctcgtaactcgaattactagattggcgaaagcttgaacatcagctatttgagcccatttctgaaggcgttaggctccaattacagcaacggtgcaaatttcgccattgctggcgcagcaacgcaaccgcgagatgttccatttgcgttgcacatacaagtgcaggagttcttgtacttcagagatagatccttggaactcatcgatcaaggtctaagtggtccaattgatgcacaaggattccaaaacgctctatatatgatagacatagggcagaacgatgtaaacgctcttctgtcaaacttgccctatgatcaagttattgccaaattcccaccaattcttgctgagattaaggacgctgtccagactctatatagcaacggtagccgaaacttctggatacatgggacgggggctctgggttgcctgccgcagaagcttgccataccaaggaaaaacgacagcgatcttgatcagtatggctgtctcaagacctataacagagctgcagttgcgttcaacgcagcgctgggcagcctctgcgacgagctgagtgcgcagatgaaagacgcgacgcttgtgtacacggacctgttccccatcaagtatggtcttgtcgccaaccacactaaatatggttttgacaagccgctgatgacatgctgtgggtacggagggcctccctacaactacgacttcagcaagggttgccagtctaaggatgtggcggcctgcgatgacggctcgaagttcgtcagctgggatggcgtgcacctgacggaggcggccaatgcggttgtggccagagcgatactgagctcacagtactccaagcccagtctcaagtttgatcagttctgcagagcctgatacttgttagtacctcataccgtgcctttttagtttaggcaaatttactgaacacaacttggcacttcaaagtcaaaatggatggatccgcttctgataatttgattgccttatttacccgtcagggatgtgacccatcattgatctgtcagccatagcccataggccataactttggataggtgaaacttccaaatattgtgggccacatgtaccttcaaactacatgtcctatctgatatgttttcatcaaagagagaaatacaccatgggttatcaaacttcttccgtattcttatatgagttgatgaattctcaaagtgttcaaatttctcag

SEQ ID NO: 29933 - DNA, 1597 bp, Zea Mays
ctccttcagtgtggctgctacaacatgatcccttagctagcaagcaccttttcttttgttctgtttaaataaaagaaaaggagagtatacaaattgatcttttagtatatcaatatctcgataaataacagactggtacagttataattgttctgataatagtttcataatattatggtgtgcatactacattttccaccttacaggagacgacttaaattgcacatctcaagaaagcggtgatatatatacctgtttatgcccatttctctcagagaaaataaatgggcagtaatactttcgagggagttcatttttgttccagataaactgaccactgcttttcgcctgcatggatcgtcaagccttgccaaatgcatactgagatggcctcaccttgtagtctgagcaagcgaaagcttgaacatcagctatttgagcccatttctgaaggcgttaggctccaattacagcaacggtgcaaatttcgccattgctggcgcagcaacgcaaccgcgagatgttccatttgcgttgcacatacaagtgcaggagttcttgtacttcagagatagatccttggaactcatcgatcaaggtctaagtggtccaattgatgcacaaggattccaaaacgctctatatatgatagacatagggcagaacgatgtaaacgctcttctgtcaaacttgccctatgatcaagttattgccaaattcccaccaattcttgctgagattaaggacgctgtccagactctatatagcaacggtagccgaaacttctggatacatgggacgggggctctgggttgcctgccgcagaagcttgccataccaaggaaaaacgacagcgatcttgatcagtatggctgtctcaagacctataacagagctgcagttgcgttcaacgcagcgctgggcagcctctgcgacgagctgagtgcgcagatgaaagacgcgacgcttgtgtacacggacctgttccccatcaagtatggtcttgtcgccaaccacactaaatatggttttgacaagccgctgatgacatgctgtgggtacggagggcctccctacaactacgacttcagcaagggttgccagtctaaggatgtggcggcctgcgatgacggctcgaagttcgtcagctgggatggcgtgcacctgacggaggcggccaatgcggttgtggccagagcgatactgagctcacagtactccaagcccagtctcaagtttgatcagttctgcagagcctgatacttgttagtacctcataccgtgcctttttagtttaggcaaatttactgaacacaacttggcacttcaaagtcaaaatggatggatccgcttctgataatttgattgccttatttacccgtcagggatgtgacccatcattgatctgtcagccatagcccataggccataactttggataggtgaaacttccaaatattgtgggccacatgtaccttcaaactacatgtcctatctgatatgttttcatcaaagagagaaatacaccatgggttatcaaacttcttccgtattcttatatgagttgatgaattctcaaagtgttcaaatttctcag

SEQ ID NO: 29934 - DNA, 1647 bp, Zea Mays
atggatggaatggaacagacacaccggcctctgcaaacctgtgcgacgcatgtggcttttctcccgcccattcggtgcgtgctgggcggcgagactgatgatgatcaattggtcatgcacagcccatccagccagcagggagggacacgggcgggcatggctgctggtggcgctggtgcagctgttgcggcggtgctcacgacggccgtcgctgcagtcctcgttgcggtgttgacgacgacggtgtccggacaggacgacccagcgccagagccagcgccggcggcggcgtgcgcgcggcggcccgtggtgttcgcgttcggggactccaacacggacacgggcggcgtggcggctgggctggggcactactacccgctccccgagggccgcgtcttcttccgccgatccaccggccgcctctgcgacggacgcctcgtcatcgactacctctgtgagagcctgaacatgagctacctgagcccgtacctggaggccgtgggctccgacttcacgggcggcgccaacttcgccatctccggctcctccacgctgccccgcaacgtccccttcgcgctccacgtccaggtccagcagttcctgcacctgaagcagcgctcgctcgacctcgccgcccacggcgggacggctcccgtcgacgccgacggcttccggaacgcgctctacctcatcgacatcggccagaacgacctgtccgccgcattcgggagcggagcgccctacgacgacgtcgtccaccacaggatcccggctatcgtactctctactacaacggcgccaagaacttctgggtccacggcaccggccctctgggctgcttgccccagaagctcgccgcgccgaggcccgacgacagcgacctcgactacaacggctgcctcaagaccctcaacgacggcgcctacgagttcaacggtcagctgtgcgccgcctgcgacggcctcaggtcgcagctgcgcggcgccaccatcgtctacaccgacgtcttgctcgtcaagtacgacctcatcgccaaccacaccgcctacgggttcgaggagccgctcatggcgtgctgcggctacggcgggccgccctacaactacaacgccaacgtgagctgcctcggcccgggcttccgggtgtgcgaggacggcaccaagttcgtcagctgggacggcgtgcactacaccgacgccgcaaacgcccttgttgccgcgaagatcttctccggccaattctccacgccccaaatgcccttcgactacttctgccaggcatgaccatcgtacgagtacgacccagcatagctagctgagcgattcagctgttgcgagagagaatccattcgtgtaactaagaaatgtaacaagcaccgcagatcatatcatgctgaataattcgcgattgacctatttgtcacgcacgctacctgtgagactcaagcgctaacgctagctgggctttagatgaagtgctatggcctgttaagggtttgtttgcttggtggcctgttaagggtttgtcatagctttctatataagcagttgtttggttcgcggcaagggccccgattaccctgaatttggtccagaaacataatactcctcgacgtttcgacccaaagaaataaatctatgcaacttg

SEQ ID NO: 29935 - DNA, 2307 bp, Zea Mays
ttgagtgttgataccgcgaaagggtctctagctgagttggttaggtggtctgagtagcactccttaggtcctgactttgactccccatgggagcgaatttcaggctgtggttaaaaaaatcctctcgtctgttccacgccaaagcacaagtctaaggcccggtcccggtcttggtcgtttttcacatgggctacggtgccgctgtgtatgagtggggcaggggttcaggggttttctcgacctgcatgaggtcttcttaatataatgcccgggggctgtcttatccccgcagatcaagtttttttagtgttggtacccctgaagttacccttcaccaggaaaaggggctgaatctaggtgtgcacagatgtgtgatcaactcatagtattagatacatgtcttcagttgaatatatttctctgtacctgtatcctgtgggataaccattcaaaaacgagcagagtatttaatatagtatcaatatgtggatgttttccatgcatgctgctaaaccagctgtacatttaactcttctttcatatacaaactgtagattgaaaaaatgtgaaaattaatgtttccttgatatataattgcaatggatggaatgtaacatgaattaaatgaggtagcatggcaaactgtggttttgagaagttgtcctaatgggccatacatccagttcccatgaccatgattaaactgagatattcatatcataataactagtaactcctggttaaaccttttctatcaagttgtggcaaaagcacaagtgtattattgcactggcatggtctatcaagagggggggttagacctgagccaatgtggatgctgatctattatactgggaaatgaaagtttggggcatttctatagtttttatatcctgctagttaaagcatctccaacaacgtgacctataaaaatgtcctataatttaaaaatgagtatattttatagaatttagggcaccaacaaaacatcttgttccaacagtaaagcctcaaatctagattatagggcagcacactacggtgtagtatatttgaggcacttgagagggtgccctataatttttttgaccaaaatttatgaattgagtcactgttgttgtagttttttctgtgtagagtctcatatttcaatttaaggcaccaatttgaggcattgttggagatgctcttagacaaagaaatagttgaacctacaatgtttatattttatttgtttagcaaatgcagttatggttcattattgaaagtagagtcctggctatggttaggtttgagaatttatgaatcatttcaataccatgcttggtgattaacatgatcagtacggaaaatatcgatcaagcgcactgtcaggtgcccaggtcataggtctgttttaattttccattttggagtgaaaacggacctgttgagtcatcatactgtgctgtgtctgcatgattttcatacagaatttcacataattccatttttttatttggaattaggacaaaattgaaacagagcacaattctgtcacaatagattgactggaaagtttggatgctgtggaaacaccacaaaaatcgtgttcaatagaaccaacgctggtatacagcatgtcttcggacagattttttttatgaggctcacctctggtgtttagcaggtgcaggggttatctcttggaggtggttgccttatgtctttagtcaggccgttttttgtttatcttagaatcgaatgtaactaaaatcctgccacgtgggtgtatttgtgtgtgtttgggtgcgttgtatagtccatgttcttaatggagtgatatacggttctcatgcgtattcaagaaaaaaggaaaccgggaactgggaaggagaggcggctgcatggattatacttgggatattctcgctcatcagacttcaagctgattaccttctcgttgttggagtttgcttgagcctcagcattgcaaatattattgggttcaccaaatgcaataaagatgcgaagaagaacatccaggattggacaaggagtgcacttctatcaggtagtgtcagatcgcatctgcagtcagcatttggtgtctgaacaataacctacgaccttgttatacgtgtagtgctgtataatttacagataacatgattggttactagagcgcgtctgttttttttttgttggctatgtgcatcttgctaggcagagtcggaagaacattttcagagccgtgtatcaactcgatgtataatgcagcttgaataaaatctttctttaacaaaaaaaaactcttgtccgtcagaa

SEQ ID NO: 29936 - DNA, 2104 bp, Zea Mays
caacaccacccaatccccccaacaacccgtgcctgccgtgatccttccgacgccgttccccggccacctccaccgccaatggcaggcgccatccgcttcacatgacctcactgttacacggctcgagctgcctagctgtggctgtgagccccttctaccttcttggctgtttgctagctagaggccgagaacgaagccagccccgttttctgatccttcgcacagtggcgctgcacgtgcctctctcgatctgtcgccttctcctcttcttcgccttgtaccgtctgctgagcagtgagcacggaacaagatcgaaccacggcctcacatactcgcgcatatggcgacaatggcagggcgtcttgttgcccggacgtcgtcctcctcggccaagcgccagcggttcagctccgctgttctcctcctcgctctcttccagagctcgtggtgctacgacgacgcggcggcgacgacgacggtggattacggttacaacaacgagcacgaggccgaccgggtggcgttcctccccgggcagccgaggagccctccggtgtcgcagttcgccgggtacgtcaccgtgaacgagcgcaacgggagggcgctcttctactggttcttcgaggcccagacgtcgccggcgcacaagcctctcctactctggctcaatggaggacctggttgctcgtccgttgggtacggagctgcttctgagttggggcctctcagagtcaacagacacggggcagggcttgagttcaacaattttgcgtggaacaaagaggccaacttgctcttcctagagtctcctgctggggttggcttctcctacaccaacacatcatccgacctcaccaaactggatgatgctttcgtagctgaagatgcatacagcttcctagtaaattggctcaaaaggtttccgcagtataggagccacgaattttatatctccggggagagctacgcaggtcactatgtgccacaacttgctgaacttgtctatgacaggaacaagggcaacaccaacacacacatcaaccttaaaggtttcatggtcggtaatccactaactgacgactactacgactcaaaggggctggctgaatatgcttggagccactcagtagtgtcagacgaagtttacgagcgcatcaagaaggtctgcgacttcagggtctcaaactggaccgatgactgcgatacagcgatgagcgccgtgttcagccagtaccaggagatcgacatctacaacatctacgcgcccagatgcaacctccctccgtcgtcagctgcacttgcacttgctgttgacaaggcagtcgtagccaacagacaggaacatttcaggcgaaggatcaggatgttctccggatatgacccgtgctactcttcgaacgcggaaaagtacttcaacgatgcaggtgtgcagacggcattccatgcgaatgccagtggagctcggaaatgggaagtttgcagtgattcaattttgaggtcatacaatttctcggtgctttctgtcttaccaatctactctaagctcatcaaagcaggactgagagtgtggctctacagatggtagggtcccggtgatcggatcgcggtattgcgtggaagccctgggcctgcctgtcaagacgcagtggcaaccatggtacctgaacaaacaggttgcgggcagatttgtggagtaccatggcatgacgatggtgacgatcagaggagcagggcatttggtgcctctcaacaaacctgcagaagggctcgcactcatcgacacattccttcagggcaaacagcttcccacacacagatgacaagagtacttagggttgtgattgtgatgagggttattgttttcaaaaaaaaaatcaaggattggacaaactatgtgccccacacacacgggctaatcagtaaggatttcatttccagtttctgcataaattgggttggctacaaatagagctgcggtctgaaatacaattttcagcttacataaaaaatattaaatgaataagtatgataaaaccaaatggaacccttaaatcagtgtcctaagaaccggactgcgccttgattcaataatacctttcttgtg

SEQ ID NO: 29937 - DNA, 2054 bp, Zea Mays
caccacccaatccccccaacaacccgtgcctgccgtgatccttccgacgccgttccccggccacctccaccgccaatggcaggcgccatccgcttcacatgacctcactgttacacggctcgagctgcctagctgtggctgtgagccccttctaccttcttggctgtttgctagctagaggccgagaacgaagccagccccgttttctgatccttcgcacagtggcgctgcacgtgcctctctcgatctgtcgccttctcctcttcttcgccttgtaccgtctgctgagcagtgagcacggaacaagatcgaaccacggcctcacatactcgcgcatatggcgacaatggcagggcgtcttgttgcccggacgtcgtcctcctcggccaagcgccagcggttcagctccgctgttctcctcctcgctctcttccagagctcgtggtgctacgacgacgcggcggcgacgacgacggtggattacggttacaacaacgagcacgaggccgaccgggtggcgttcctccccgggcagccgaggagccctccggtgtcgcagttcgccgggtacgtcaccgtgaacgagcgcaacgggagggcgctcttctactggttcttcgaggcccagacgtcgccggcgcacaagcctctcctactctggctcaatggaggacctggttgctcgtccgttgggtacggagctgcttctgagttggggcctctcagagtcaacagacacggggcagggcttgagttcaacaattttgcgtggaacaaagaggccaacttgctcttcctagagtctcctgctggggttggcttctcctacaccaacacatcatccgacctcaccaaactggatgatgctttcgtagctgaagatgcatacagcttcctagtaaattggctcaaaaggtttccgcagtataggagccacgaattttatatctccggggagagctacgcaggtcactatgtgccacaacttgctgaacttgtctatgacaggaacaagggcaacaccaacacacacatcaaccttaaaggtttcatggtcggtaatccactaactgacgactactacgactcaaaggggctggctgaatatgcttggagccactcagtagtgtcagacgaagtttacgagcgcatcaagaaggtctgcgacttcagggtctcaaactggaccgatgactgcgatacagcgatgagcgccgtgttcagccagtaccaggagatcgacatctacaacatctacgcgcccagatgcaacctccctccgtcgtcagctgcacttgcacttgctgttgacaaggcagtcgtagccaacagacaggaacatttcaggcgaaggatcaggatgttctccggatatgacccgtgctactcttcgaacgcggaaaagtacttcaacgatgcagtgattcaattttgaggtcatacaatttctcggtgctttctgtcttaccaatctactctaagctcatcaaagcaggactgagagtgtggctctacagtggggatgcagatggtagggtcccggtgatcggatcgcggtattgcgtggaagccctgggcctgcctgtcaagacgcagtggcaaccatggtacctgaacaaacaggttgcgggcagatttgtggagtaccatggcatgacgatggtgacgatcagaggagcagggcatttggtgcctctcaacaaacctgcagaagggctcgcactcatcgacacattccttcagggcaaacagcttcccacacacagatgacaagagtacttagggttgtgattgtgatgagggttattgttttcaaaaaaaaaatcaaggattggacaaactatgtgccccacacacacgggctaatcagtaaggatttcatttccagtttctgcataaattgggttggctacaaatagagctgcggtctgaaatacaattttcagcttacataaaaaatattaaatgaataagtatgataaaaccaaatggaacccttaaatcagtgtcctaagaaccggactgcgccttgattcaataatacctttcttgtg

SEQ ID NO: 29938 - DNA, 2097 bp, Zea Mays
caccacccaatccccccaacaacccgtgcctgccgtgatccttccgacgccgttccccggccacctccaccgccaatggcaggcgccatccgcttcacatgacctcactgttacacggctcgagctgcctagctgtggctgtgagccccttctaccttcttggctgtttgctagctagaggccgagaacgaagccagccccgttttctgatccttcgcacagtggcgctgcacgtgcctctctcgatctgtcgccttctcctcttcttcgccttgtaccgtctgctgagcagtgagcacggaacaagatcgaaccacggcctcacatactcgcgcatatggcgacaatggcagggcgtcttgttgcccggacgtcgtcctcctcggccaagcgccagcggttcagctccgctgttctcctcctcgctctcttccagagctcgtggtgctacgacgacgcggcggcgacgacgacggtggattacggttacaacaacgagcacgaggccgaccgggtggcgttcctccccgggcagccgaggagccctccggtgtcgcagttcgccgggtacgtcaccgtgaacgagcgcaacgggagggcgctcttctactggttcttcgaggcccagacgtcgccggcgcacaagcctctcctactctggctcaatggaggacctggttgctcgtccgttgggtacggagctgcttctgagttggggcctctcagagtcaacagacacggggcagggcttgagttcaacaattttgcgtggaacaaagaggccaacttgctcttcctagagtctcctgctggggttggcttctcctacaccaacacatcatccgacctcaccaaactggatgatgctttcctgaagatgcatacagcttcctagtaaattggctcaaaaggtttccgcagtataggagccacgaattttatatctccggggagagctacgcaggtcactatgtgccacaacttgctgaacttgtctatgacaggaacaagggcaacaccaacacacacatcaaccttaaaggtttcatggtcggtaatccactaactgacgactactacgactcaaaggggctggctgaatatgcttggagccactcagtagtgtcagacgaagtttacgagcgcatcaagaaggtctgcgacttcagggtctcaaactggaccgatgactgcgatacagcgatgagcgccgtgttcagccagtaccaggagatcgacatctacaacatctacgcgcccagatgcaacctccctccgtcgtcagctgcacttgcacttgctgttgacaaggcagtcgtagccaacagacaggcgaaggatcaggatgttctccggatatgacccgtgctactcttcgaacgcggaaaagtacttcaacgatgcaggtgtgcagacggcattccatgcgaatgccagtggagctcggaaatgggaagtttgcagtgattcaattttgaggtcatacaatttctcggtgctttctgtcttaccaatctactctaagctcatcaaagcaggactgagagtgtggctctacagtggggatgcagatggtagggtcccggtgatcggatcgcggtattgcgtggaagccctgggcctgcctgtcaagacgcagtggcaaccatggtacctgaacaaacaggttgcgggcagatttgtggagtaccatggcatgacgatggtgacgatcagaggagcagggcatttggtgcctctcaacaaacctgcagaagggctcgcactcatcgacacattccttcagggcaaacagcttcccacacacagatgacaagagtacttagggttgtgattgtgatgagggttattgttttcaaaaaaaaaatcaaggattggacaaactatgtgccccacacacacgggctaatcagtaaggatttcatttccagtttctgcataaattgggttggctacaaatagagctgcggtctgaaatacaattttcagcttacataaaaaatattaaatgaataagtatgataaaaccaaatggaacccttaaatcagtgtcctaagaaccggactgcgccttgattcaataatacctttcttgtg

SEQ ID NO: 29939 - DNA, 1511 bp, Zea Mays
agatgagcaccatccccttcccctccacccatcctcagaagatatcatgctgacggcgtcgacgtggtctccagcagatccgagtggagcgccttcttgtctactcctcaaacattgtcgcagtgcctgggccgtcgcgaggagccccaaacacaatctcctccttagacgtcgtcggtctcctcgctccctcctcaaacgtcgtcgtgctgccgacattgtctgtcacggctccaaccggagcaccatcccacctcccccgtcaaacgacgctgcgatgtttgggccaccgtcgggagtccgaatctgcctcctcagacatcgccacctcgaaacgcacaggtcgcgcggtagggggcactggtggtccggcgcggtcacctggcgaacgatgacggaggaggtgggcaagtctatcaagaagagacactatgaagagcagtcgccatggctgatggatcagttgccggttgcattcatcgaagatttggccctctccaccaccatgtcgctaccccatacccgttgtccctgcatatctgaatgatgcaccttcaatccaccgctgcccaaggagcgaatggggaaggaccgacctgagcattctgtccggtagctggatagcaagaagcaccagtccttccccctcccaagccgtcggatatcatctagatgctggcttctgcaccttttttccccttctcccgataatgtactgtcatttgtgggaggttccagaagctacgagagttatctgatgtccgatgtggtaagttaaaaagaaaaaaggaaggggataaggcagcgctttgtgactggcggcaaagtttgcatcgtgctcttctctagtttgcatcctgctcttctcctttcctttagtctataacatagctctctattcattttctcgcttacttttgctgattaaaaaaatcgcaagttacagaaaatttaggatctagcgatctcgacattctgtccaatacattatattcacctgcaaaaaaggtcgaagcaaatgttgcaatcagtccacaacctcaattctgaaacgccgtcttagaaaaccataaataaggtaattcctactacttcctaatgtgttttctaagtcaatagaagctactactttttatatatcaaaatcatctgagcactacacacagctttactgtttatgttgccttcgcctcaaaatactgattacaacatctttatgtagtatatgccactaatgtattttgtatgatagcatgtatacacctaagacatatgccacatatgtggccatgaacgtgtcaaactgatgtttccataagctttatataatatgccactaaagtattttgtatgcatatgcaccttggacatatgtaaacatggacgaccccttttatatgtatatacatgtcgatcttttagacaactagaacaaacaactttactggagatgtataaatgtttacaaacactgttaacataattttctatgatcttgtttttggaatgtt

SEQ ID NO: 29940 - DNA, 1455 bp, Zea Mays
agatgagcaccatccccttcccctccacccatcctcagaagatatcatgctgacggcgtcgacgtggtctccagcagatccgagtggagcgccttcttgtctactcctcaaacattgtcgcagtgcctgggccgtcgcgaggagccccaaacacaatctcctccttagacgtcgtcggtctcctcgctccctcctcaaacgtcgtcgtgctgccgacattgtctgtcacggctccaaccggagcaccatcccacctcccccgtcaaacgacgctgcgatgtttgggccaccgtcgggagtccgaatctgcctcctcagacatcgccacctcgaaacgcacaggtcgcgcggtagggggcactggtggtccggcgcggtcacctggcgaacgatgacggaggaggtgggcaagtctatcaagaagagacactatgaagagcagtcgccatggctgatggatcagttgccggttgcattcatcgaagatttggccctctccaccaccatgtcgctaccccatacccgttgtccctgcatatctgaatgatgcaccttcaatccaccgctgcccaaggagcgaatggggaaggaccgacctgagcattctgtccggtagctggatagcaagaagcaccagtccttccccctcccaaggtcgaagcaaatgttgcaatcagtccacaacctcaattctgaaacgccgtcttagaaaaccataaataagggcgcacatcatttactagtacaagataatcagaggggtacaacctgtcattgattaatattggtcatctcattcattaatttggtgaaaaaataaatatgacaacctatcattgattaatttaaagcttacacaaaatttgcaaaatataaaaaggaacaaaaaacatatatgtggggttaggtgtaccttgacattatctacgagaccaaatttggtgcattcatctttaacatcaatcccaaaatcagaaagaagctcttcgtcagcccgcagaatactattggttaatccaataagaatgataataaagttgctttgaagcatgaacctcatatgaacaaactgaatgatctaatgtgcaaccaagtacaagagctatctcagatcaaaagagcatataatgcaggaggtgccaagcatatttcaactgcttactatcaactcagcaaggttgaacatgtgccctaatataaattgaaagcaacaaaccacaactgtttgtaacaaagtaaaagcaaacacagtgaatctaaggaaagccacattgaaatgaacacagagggttcatccaaacgccacaaagaaagctacgtaatgaacaagtgttttaatcgtagtgtataacgtcactcgcaaaacagagcatccaaactgtaatctgaattgttgtcttttgctctatctgaaagacgcaagcttcacccaaaaactctaaacaggacatcaac

SEQ ID NO: 29941 - DNA, 1834 bp, Zea Mays
agatgagcaccatccccttcccctccacccatcctcagaagatatcatgctgacggcgtcgacgtggtctccagcagatccgagtggagcgccttcttgtctactcctcaaacattgtcgcagtgcctgggccgtcgcgaggagccccaaacacaatctcctccttagacgtcgtcggtctcctcgctccctcctcaaacgtcgtcgtgctgccgacattgtctgtcacggctccaaccggagcaccatcccacctcccccgtcaaacgacgctgcgatgtttgggccaccgtcgggagtccgaatctgcctcctcagacatcgccacctcgaaacgcacaggtcgcgcggtagggggcactggtggtccggcgcggtcacctggcgaacgatgacggaggaggtgggcaagtctatcaagaagagacactatgaagagcagtcgccatggctgatggatcagttgccggttgcattcatcgaagatttggccctctccaccaccatgtcgctaccccatacccgttgtccctgcatatctgaatgatgcaccttcaatccaccgctgcccaaggagcgaatggggaaggaccgacctgagcattctgtccggtagctggatagcaagaagcaccagtccttccccctcccaagcttaacaagcatggtacgttctaattggtgtcagccgtcggatatcatctagatgctggcttctgcaccttttttccccttctcccgataatgtactgtcatttgtgggaggttccagaagctacgagagttatctgatgtccgatgtggtaagttaaaaagaaaaaaggaaggggataaggcagcgctttgtgactggcggcaaagtttgcatcgtgctcttctctagtttgcatcctgctcttctcctttcctttagtctataacatagctctctattcattttctcgcttacttttgctgattaaaaaaatcgcaagttacagaaaatttaggatctagcgatctcgacattctgtccaatacattatattcacctgcaaaaaaggtcgaagcaaatgttgcaatcagtccacaacctcaattctgaaacgccgtcttagaaaaccataaataaggttgacacaagggatgctgtggtgacctggcgtatttatataagaaataattgggtgactcagcaaatcgaagatggactggtgatttagaagatcgatgagcaagaagcagttgtgattttgtagattgaaatgcaggatggggaagcaggtaataatggggagaaaagtactaaccttagggccatagattgtatacacctaagacatatgctcctcctcagccgaggcggggtcccactcgacagtccagcccggtggcaagatggacggccaagtcaatccagcaaccatgtcctccaaggaacctgtaaaattatgccacaagcaaggctgagtataataatactcagctagacttacccggtgtgaggagtctactcctctacctctagacatgcagctgtttggctgtggggtttggtggccaaaagcactagctgagtttctaagtcaagttttaactttgtcaatttaagtgtgactctcttaaggctaaaagtgtactatctactcatacatagtagcaagcattattagcaatcaacagcttatatcaactcatcacatttccacttgttactcaatgtagcagcatggatcaagcagtctcattagctgcgagaagcagacgactcgaatcgagtttttatccttgcaaggtaaacctaaacacacgacatgcaggggcactccgtccccacacacatcaaccgtcccca

SEQ ID NO: 29942 - DNA, 326 bp, Zea Mays
ctccgcctccggccgtccacgctgcgcccgcccccggccccttccgccgtggccgccctcgcctccggccccgtccgccgcccccggactgaacattgcttgataattaattctgatgcctttaccactgaacttttattcatacactgtttccagtgggctgtgctaattataaagcatgatgaggttgtggttgatgatgaagtggtgttacgagaattccagaagcattgcaggatatttttctttagatcagcttgctgttggtcttgtttcaggctattcttcctgttttatctagtttttcaggttggtatgcaatcaag

SEQ ID NO: 29943 - DNA, 602 bp, Zea Mays
cagtgggctgtgctaattataaagcatgatgaggttgtggttgatgatgaagtggtgttacgagaattccagaagcattgcaggaggagacccttgctggcgggattgggatcgtcctattgtaattcctacggaggcatggaaagcccataactgcataccagatgagcactatgttcagacgttgcttgcattaagtcaatgatcttgatcataacaatattctttgcatagttccctgatcattcagctcttctgcaatgcagcaaagtggtctagaagaagaacttacgcggcaatcacatcacttgctataatgaataaagcaacaagcaccttttataggaaaaggaggtggagtgtcttaaacccgtaacacctgtggtggtaaatacttcatcaatcgaagaaccaatgtcttaaacaaatgtctttttcgaaggctgatgtttttgtaacggggttatcaacatcgattcttgttgtttgctgaggatatattcttctcacttttaggatattgataatatatattacgagaccgaaaatagaagggagtggtgtacaagtaatggaaagccagccccctgccactacaagaa

SEQ ID NO: 29944 - DNA, 681 bp, Zea Mays
cagtgggctgtgctaattataaagcatgatgaggttgtggttgatgatgaagtggtgttacgagaattccagaagcattgcaggagagcagatatttttctttagatcagcttgctgttggtcttgtttcaggctattcttcctgttttatctagtttttcagaggagacccttgctggcgggattgggatcgtcctattgtaattcctacggaggcatggaaagcccataactgcataccagatgagcactatgttcagacgttgcttgcattaagtcaatgatcttgatcataacaatattctttgcatagttccctgatcattcagctcttctgcaatgcagcaaagtggtctagaagaagaacttacgcggcaatcacatcacttgctataatgaataaagcaacaagcaccttttataggaaaaggaggtggagtgtcttaaacccgtaacacctgtggtggtaaatacttcatcaatcgaagaaccaatgtcttaaacaaatgtctttttcgaaggctgatgtttttgtaacggggttatcaacatcgattcttgttgtttgctgaggatatattcttctcacttttaggatattgataatatatattacgagaccgaaaatagaagggagtggtgtacaagtaatggaaagccagccccctgccactacaagaa

SEQ ID NO: 29945 - DNA, 1153 bp, Zea Mays
agaactatgaattacagaattaagggcagtttggttcgtggctaactatgccacactttgtctaaggttagtcgttcgaattgaataactaatcttagacagaaaagtcaggcaaagtgtggcaagtgaggctgcgatccaagcccttagtctatagaaactgacgcgcttcgtgcgattccgctcttgttcgcggaaatcggcatcctcccggctaccccgggccgggaatcgaaaaggctgccgtgttctccacttctccgccttaccctgctctcctggacctccgacgcaccccaaacaccgcagagatgcagaaccctagcggccaccaccccgcgacggccgccccgacgtcggcgccgtccaagggcaagtcgtcggcgccgaaccctagcggcaaccacgctgcgacgccggcgccatcggggacgccttccaagggcaagtcggcggcagcgcaggccgcggctttgggccacggttcctcctcccaccaccactctgccggcggtggcggtggtggcgctgacgcgtccgccaccaccctcaagcgcaagcgcggcgtcttccagaaagacctgcaacacatgatgtatggctttggggatgatccaaataaaccgttgcacttgtggaagacattgttgtggaatatgtcactgacctggtgcacaaggcgcagaacgttgcctcaaagagggggaagctcctgacagaggattttctttatcttatacgcaaggatttacggaaactgcaccgtgctactgaactactgtccatgaatgaagagctcaagcaagcaaggaaagcttttgacgtggatgaagagacgctggctacgactaacatatgatgtcttcctagtcggagaatctgcgtgttactgtaaccagttgtacaatgcactgcatgtgtctgacaattgttggcgtcgacttgtaactgttccgctacagactttagctattttcttgacagttactgcgttaatgtctgtatgccctgctcagtgaagaagtccgctggttccacacattcgcaatgtaaaaatgcacaggttttttttttgcttgttttgaataggacaattcatgaaaattactggtggaggagatatttggaagtaaaattgccagacaatttacag

SEQ ID NO: 29946 - DNA, 1310 bp, Zea Mays
aaaataacaatttttttcggtggaacgtgacattgggcaagtcctttccttcaccgctaccgaagtctacttccattcctctccttcctaaccccgcgtcgcccacgagctcgccgtgccggcagaggcgaggacctcgccgaagcagaggccatggggcgaccgcagccagccagggctggcgccatcaacatcgaggcgtgcgcgcggccgatcgccgtcgaccaccgtatcagtctcccgtactacttccgcatcgcgggcagcctcctccgacaggctaatatatatcggaacgagagtaacttgctcgacctgtatgtcatccttctgagatactcgagcttgctgtgcgagacgattccgaagcatcgtgattaccatgccttcaagttaagagaaaaggcattttttgataaacttattgatattatcaaagagcttgagacattgaagccagttgtgcagcggcaggttgttgagcataacagaggaagtactgtggaatttaatactaatagtctaaatggaaactacggtacaactcgtaggatagagcagtgtactccaagctcttatactccacagacatttgtaggcagcagtaatggagcattgcaaaaacccttccatgctgggagacaagtggcatcattatcaagtgtacagaaacaatttatgaatctaccatatccaaaagaagaaacactagctagacactccatattaggacctaatggtcttaatggccggtggaatgggcctgttactggaatcaaggttcaatatccaagcaattttgaattaacacaaaatggtataacaagtttagtgccatccatcttgaaccaagatgatttgcatggttccaacactgcacctgcacctccacctccaagtagctcctcaaatgacaatgacaatatgaaatctgttctctctcttgatgatggtcgatgttcttgcagaggtacaaagaccaatttctccatcaagagttgccgatccaacaccaggacttccgacctcaggaactgcccgatttcagaacttgcatgttccgatcaagttgatggagtgttttctaagggttgctgagtcaaacaccaaaagaagcttagaaacctgtggggttcttgctggtaccctgaaaaatagaactttttatgtgacaaccttaattattccaaagcagaaatcgacatctgatacgtgtgaagctacaaatgaagaagaactatttgaagttcaggacacatactcattgttcactcttggttggattcatgagttgtaaatatcttttacat

SEQ ID NO: 29947 - DNA, 2080 bp, Zea Mays
aaaataacaatttttttcggtggaacgtgacattgggcaagtcctttccttcaccgctaccgaagtctacttccattcctctccttcctaaccccgcgtcgcccacgagctcgccgtgccggcagaggcgaggacctcgccgaagcagaggccatggggcgaccgcagccagccagggctggcgccatcaacatcgaggcgtgcgcgcggccgatcgccgtcgaccaccgtatcagtctcccgtactacttccgcatcgcgggcagcctcctccgacaggctaatatatatcggaacgagagtaacttgctcgacctgtatgtcatccttctgagatactcgagcttgctgtgcgagacgattccgaagcatcgtgattaccatgccttcaagttaagagaaaaggcattttttgatcggcaggttgttgagcataacagaggaagtactgtggaatttaatactaatagtctaaatggaaactacggtacaactcgtaggatagagcagtgtactccaagctcttatactccacagacatttgtaggcagcagtaatggagcattgcaaaaacccttccatgctgggagacaagtggcatcattatcaagtgtacagaaacaatttatgaatctaccatatccaaaagaagaaacactagctagacactccatattaggacctaatggtcttaatggccggtggaatgggcctgttactggaatcaaggttcaatatccaagcaattttgaattaacacaaaatggtataacaagtttagtgccatccatcttgaaccaagatgatttgcatggttccaacactgcacctgcacctccacctccaagtagctcctcaaatgacaatgacaatatgaaatctgttctctctcttgatgatggtcgatggtctgtaccagcagaagaacacactccacttccttctgctaatttggaagaggagttgttccaattgaatatcaaacaaccttctcctccaccagttcttgcagaggtacaaagaccaatttctccatcaagagttgccgatccaacaccaggacttccgacctcaggaactgcccgatttcagaacttgcatgttccgatcaagttgatggagtgttttctaagggttgctgagtcaaacaccaaaagaagcttagaaacctgtggggttcttgctggtaccctgaaaaatagaactttttatgtgacaaccttaattattccaaagcagaaatcgacatctgatacgtgtgaagctacaaatgaagaagaactatttgaagttcaggacacatactcattgttcactcttggttggattcatacacatccaacacagtcctgcttcctttcttccattgacgtccacaatcattattcttatcaggtcatgctacctgaagcaattgcaatagttatggcacctactgacacaagaaaacatggtatatttcatctcacggatccaggtggcatgggcgtgatccatgattgtcaagagagaggtttccatcctcacaaggcaccacttgatgggtcgccaatatatgagcagtgctcccatgtgtacatggacaccgatataaagttcgatatgattgatctgcgacaaagatgacgaagctcacctttgggtttattttgcaacctatacttctcgcagttaaatcaattgctgccttatttttttcttagctcaagatttgtgaattcttatgtacgctgttgtacatagctattgcgttgtatagggaaaaccattgaggtaataatatcattggtaatgcttcgttgtaattcattccttcaacctcgcaaggcacgtttgtgcggtaagatgaggaagtggtgtctggattttatgccatgccaaatatttgacttaaaagggcatcaaatatcacaaattgttaaaggtctcatttcttagactatcttcattagactatcttcagtagacttcttatcccactctttattttaaacttcactctgcaaatagtgtaatctacagtacaaattttgcacggccgtttatatgacctgctagagatggacttagagacttatga

SEQ ID NO: 29948 - DNA, 2121 bp, Zea Mays
aaaataacaatttttttcggtggaacgtgacattgggcaagtcctttccttcaccgctaccgaagtctacttccattcctctccttcctaaccccgcgtcgcccacgagctcgccgtgccggcagaggcgaggacctcgccgaagcagaggccatggggcgaccgcagccagccagggctggcgccatcaacatcgaggcgtgcgcgcggccgatcgccgtcgaccaccgtatcagtctcccgtactacttccgcatcgcgggcagcctcctccgacaggctaatatatatcggaacgagagtaacttgctcgacctgtatgtcatccttctgagatactcgagcttgctgtgcgagacgattccgaagcatcgtgattaccatgccttcaagttaagagaaaaggcattttttgataaacttattgatattatcaaagagcttgagacattgaagccagttgtgcagcggcaggttgttgagcataacagaggaagtactgtggaatttaatactaatagtctaaatggaaactacggtacaactcgtaggatagagcagtgtactccaagctcttatactccacaggcagcagtaatggagcattgcaaaaacccttccatgctgggagacaagtggcatcattatcaagtgtacagaaacaatttatgaatctaccatatccaaaagaagaaacactagctagacactccatattaggacctaatggtcttaatggccggtggaatgggcctgttactggaatcaaggttcaatatccaagcaattttgaattaacacaaaatggtataacaagtttagtgccatccatcttgaaccaagatgatttgcatggttccaacactgcacctgcacctccacctccaagtagctcctcaaatgacaatgacaatatgaaatctgttctctctcttgatgatggtcgatggtctgtaccagcagaagaacacactccacttccttctgctaatttggaagaggagttgttccaattgaatatcaaacaaccttctcctccaccagttcttgcagaggtacaaagaccaatttctccatcaagagttgccgatccaacaccaggacttccgacctcaggaactgcccgatttcagaacttgcatgttccgatcaagttgatggagtgttttctaagggttgctgagtcaaacaccaaaagaagcttagaaacctgtggggttcttgctggtaccctgaaaaatagaactttttatgtgacaaccttaattattccaaagcagaaatcgacatctgatacgtgtgaagctacaaatgaagaagaactatttgaagttcaggacacatactcattgttcactcttggttggattcatacacatccaacacagtcctgcttcctttcttccattgacgtccacaatcattattcttatcaggtcatgctacctgaagcaattgcaatagttatggcacctactgacacaagaaaacatggtatatttcatctcacggatccaggtggcatgggcgtgatccatgattgtcaagagagaggtttccatcctcacaaggcaccacttgatgggtcgccaatatatgagcagtgctcccatgtgtacatggacaccgatataaagttcgatatgattgatctgcgacaaagatgacgaagctcacctttgggtttattttgcaacctatacttctcgcagttaaatcaattgctgccttatttttttcttagctcaagatttgtgaattcttatgtacgctgttgtacatagctattgcgttgtatagggaaaaccattgaggtaataatatcattggtaatgcttcgttgtaattcattccttcaacctcgcaaggcacgtttgtgcggtaagatgaggaagtggtgtctggattttatgccatgccaaatatttgacttaaaagggcatcaaatatcacaaattgttaaaggtctcatttcttagactatcttcattagactatcttcagtagacttcttatcccactctttattttaaacttcactctgcaaatagtgtaatctacagtacaaattttgcacggccgtttatatgacctgctagagatggacttagagacttatga

SEQ ID NO: 29949 - DNA, 2036 bp, Zea Mays
aaaataacaatttttttcggtggaacgtgacattgggcaagtcctttccttcaccgctaccgaagtctacttccattcctctccttcctaaccccgcgtcgcccacgagctcgccgtgccggcagaggcgaggacctcgccgaagcagaggccatggggcgaccgcagccagccagggctggcgccatcaacatcgaggcgtgcgcgcggccgatcgccgtcgaccaccgtatcagtctcccgtactacttccgcatcgcgggcagcctcctccgacaggctaatatatatcggaacgagagtaacttgctcgacctgtatgtcatccttctgagatactcgagcttgctgtgcgagacgattccgaagcatcgtgattaccatgccttcaagttaagagaaaaggcattttttgataaacttattgatattatcaaagagcttgagacattgaagccagttgtgcagcggcaggttgttgagcataacagaggaagtactgtggaatttaatactaatagtctaaatggaaactacggtacaactcgtaggatagagcagtgtactccaagctcttatactccacagacatttgtaggcagcagtaatggagcattgcaaaaacccttccatgctgggagacaagtggcatcattatcaagtgtacagaaacaatttatgaatctaccatatccaaaagaagaaacactagctagacactccatattaggacctaatggtcttaatggccggtggaatgggcctgttactggaatcaaggttcaatatccaagcaattttgaattaacacaaaatggtataacaagtttagtgccatccatcttgaaccaagatgatttgcatggttccaacactgcacctgcacctccacctccaagtagctcctcaaatgacaatgacaatatgaaatctgttctctctcttgatgatggtcgatgttcttgcagaggtacaaagaccaatttctccatcaagagttgccgatccaacaccaggacttccgacctcaggaactgcccgatttcagaacttgcatgttccgatcaagttgatggagtgttttctaagggttgctgagtcaaacaccaaaagaagcttagaaacctgtggggttcttgctggtaccctgaaaaatagaactttttatgtgacaaccttaattattccaaagcagaaatcgacatctgatacgtgtgaagctacaaatgaagaagaactatttgaagttcaggacacatactcattgttcactcttggttggattcatacacatccaacacagtcctgcttcctttcttccattgacgtccacaatcattattcttatcaggtcatgctacctgaagcaattgcaatagttatggcacctactgacacaagaaaacatggtatatttcatctcacggatccaggtggcatgggcgtgatccatgattgtcaagagagaggtttccatcctcacaaggcaccacttgatgggtcgccaatatatgagcagtgctcccatgtgtacatggacaccgatataaagttcgatatgattgatctgcgacaaagatgacgaagctcacctttgggtttattttgcaacctatacttctcgcagttaaatcaattgctgccttatttttttcttagctcaagatttgtgaattcttatgtacgctgttgtacatagctattgcgttgtatagggaaaaccattgaggtaataatatcattggtaatgcttcgttgtaattcattccttcaacctcgcaaggcacgtttgtgcggtaagatgaggaagtggtgtctggattttatgccatgccaaatatttgacttaaaagggcatcaaatatcacaaattgttaaaggtctcatttcttagactatcttcattagactatcttcagtagacttcttatcccactctttattttaaacttcactctgcaaatagtgtaatctacagtacaaattttgcacggccgtttatatgacctgctagagatggacttagagacttatga

SEQ ID NO: 29950 - DNA, 1475 bp, Zea Mays
ccttaatcatgaaatattatcattttttggaagatttatctcatgtgtaatttatatttgtttctttttttaatattcaatgtttgggtttatattggacttgggcaatataaacgcatgtacgtcctatgcgttctttgatactttgagtactcactctgtttttacaagtttagtgccatccatcttgaaccaagatgatttgcatggttccaacactgcacctgcacctccacctccaagtagctcctcaaatgacaatgacaatatgaaatctgttctctctcttgatgatggtcgatggtctgtaccagcagaagaacacactccacttccttctgctaatttggaagaggagttgttccaattgaatatcaaacaaccttctcctccaccagttcttgcagaggtacaaagaccaatttctccatcaagagttgccgatccaacaccaggacttccgacctcaggaactgcccgatttcagaacttgcatgttccgatcaagttgatggagtgttttctaagggttgctgagtcaaacaccaaaagaagcttagaaacctgtggggttcttgctggtaccctgaaaaatagaactttttatgtgacaaccttaattattccaaagcagaaatcgacatctgatacgtgtgaagctacaaatgaagaagaactatttgaagttcaggacacatactcattgttcactcttggttggattcatacacatccaacacagtcctgcttcctttcttccattgacgtccacaatcattattcttatcaggtcatgctacctgaagcaattgcaatagttatggcacctactgacacaagaaaacatggtatatttcatctcacggatccaggtggcatgggcgtgatccatgattgtcaagagagaggtttccatcctcacaaggcaccacttgatgggtcgccaatatatgagcagtgctcccatgtgtacatggacaccgatataaagttcgatatgattgatctgcgacaaagatgacgaagctcacctttgggtttattttgcaacctatacttctcgcagttaaatcaattgctgccttatttttttcttagctcaagatttgtgaattcttatgtacgctgttgtacatagctattgcgttgtatagggaaaaccattgaggtaataatatcattggtaatgcttcgttgtaattcattccttcaacctcgcaaggcacgtttgtgcggtaagatgaggaagtggtgtctggattttatgccatgccaaatatttgacttaaaagggcatcaaatatcacaaattgttaaaggtctcatttcttagactatcttcattagactatcttcagtagacttcttatcccactctttattttaaacttcactctgcaaatagtgtaatctacagtacaaattttgcacggccgtttatatgacctgctagagatggacttagagacttatga

SEQ ID NO: 29951 - DNA, 947 bp, Zea Mays
cttgtacacggcaattaaccattcctttccatcccttattccctgctcgtggacagcacctggtcatgtgaggatattgtcttcctcctcgccaagccggccgccaggaacacagcacggtctccactacgcgcagtgcacgtccttgctctctcactcctctagccacagcccacagactccatggagcagcagcaggcgcccagctccttgcatcaagcaagcccggtgccagttccctctcccagccgagcttctccccttccagtagatgagcacgccgtcgctccctgttccagctcgccatcgccatggtcgtggactctcctcaggtgccgccgcggagacagaccgctggagctcggtggaggtccgctcgccgttgtctgcatccagcgccgaccctcgccttggctccttgctcggactctgtccgtgccagaacacgccaacatccaagccgcttcccccaacgtgcccgtcgaccttgacgatctatctttcaactgcacgctacttgcatcgggatccaaagctctctgtcatactcgatcttacaagtctccaactcgtcgacatcccttgcgtcgtcgaaaaatcctgagaatttggataaaacaacaaatcccgcgtggtgctcaccacgtgctcgacataatggcagaatcaaaaatcgtagctgtgctcgtggccttcaagacggattaaattactggtatgttaaataatcgcgtgatgcgaaagatgacccaagttgaccccaagcgcgggctattccgcatggtgatgctgatgaacggacctgcctgatcaagtgctagggcaaggatgatcgtcaagtggacatcccctaacaaacactaacctagtgttatccaggcaagccccggtgcatgcaaccctttccttgtgtttttaaattgtttttacacactttaagtctagcg

SEQ ID NO: 29952 - DNA, 716 bp, Zea Mays
ctcgtggacagcacctggtcatgtgaggatattgtcttcctcctcgccaagccggccgccaggaacacagcacggtctccactacgcgcagtgcacgtccttgctctctcactcctctagccacagcccacagactccatggagcagcagcaggcgcccagctccttgcatcaagcaagcccggtgccagttccctctcccagccgagcttctccccttccagtagatgagcacgccgtcgctccctgttccagctcgccatcgccatggtcgtggactctcctcaggtgccgccgcggagacagaccgctggagctcggtggaggtccgctcgccgttgtctgcatccagcgccgaccctcgccttggctccttgctcggactctgtccgtgccagaacacgccaacatccaagccgcttcccccaacgtgcccgtcgaccttgacgatctatctttcaactgcacgctacttgcatcgggatccaaagctctctgtcatactcgatcttacaagtctccaactcgtcgacatcccttgcgtcgtcgaaaaatcctgagaatttggataaaacaacaaatcccgcgtggtgctcaccacgtgctcgacataatggcagaatcaaaaatcgtagctgtgctcgtggccttcaagacggattaaattactggttatagttttgtgctgctgatgatggtgttaagtgctggtgggca

SEQ ID NO: 29953 - DNA, 1647 bp, Zea Mays
gtctcttctttattaaatactcaacttttgtgctgatcctcaggccgttggccacctcttgtacacggcaattaaccattcctttccatcccttattccctgctcgtggatagcacctggtcatgtgcggatattatcttcctcctcgccaagccggccgccaggaacacagctcggtctccactacgcgcagtgcacgtccttgctctctcactcctctagccacaggctccatggagcagcagcaggcgcccagctccttgcatcaagcaagcccgtttccagttacctctcccagccgagcttctccccttccagtagatgagcacgccgtctctccctgttccaacttgccatcgccatggtcgtggactctccgcaggtgccgccgcggagacagaccgctggagctcggtggaggtccgctcgccgttgtctgcatgcagcgccgaccctcgtcttggctccttgctcggactctgtccgtgccagaacacgccaacatccaagccgcttcccccaacgtgtttgtcgaccccgacgatctatctttcaactgcacgctacttgcgtcgagatccgaagctctctgtcatgctcgaccttacaagtctctaactcgttgacatcacttgcgtcgtcgaaaaatcctgaaagtttggataaagcaacaaatcccgcgtagtgctcaccacgtgctcgacataatggcagaatcagaaatcgtagttgtgctcgtgaccttcaagacggattaaattactggtatgttaaataatcgcgtgatgcgaaagatgagccaagtcgacccaagcgcgggctactccgcatggtgatgctgatgaacggacctgcgtgatcaagtgctagggcaaggatgatcgtcaagtggacatcgcctaacaaacactaacctagtgttgaaagggaaatgtgcccttaggccatttctaagtattttggtgatttagtgtccaacacaagtgcttaagtgataaaccatgtcaaatgatggataaggtgcaaatcaatacaaaggtatgattctagacttagtacattggtttttgtgtactaacatgtttgtctaagtgttagaatcagagaaaatgcaattgaaaaagagtggctcgaagcagccaagagtgtgctcagtctaggtgcaccggacagtgtccggtgcgccaggctggcatccgtcaactagctgctctcgggacttcgtcggcggcgtacggctaaaattcaccggactgtccgatggtgcaccggactgtccagtgagtcaacagtcggccgggccaacggtcggccgcagaatccgcgcgcgacgcgtggcaagtgccaacggtcggatggggcaccggactgtccggtgtgcaccggacagtgtccggtgcgcccacggctcccaagtgccaacggtcggcttcgccaaataaggaaagagatccgcaccggacagtgtccggtggtgcaccggactgtccggtgcgccaggcgacagaaggcaggaattgccttcctggaatgcactcaacggctcctagctgccttggggctataaaagggacccctaggcgcatggaggagtacaccaagaattctctaagcattcctaagcaccaaggtttcgattccgcgcat

SEQ ID NO: 29954 - DNA, 1546 bp, Zea Mays
gagcggctggaggagggggatgagcagggaggggagcagccgtcgggggaggagaactcaccggcgggggagcaggaaggggagcagccggcgggggagtagccggaggccaaagacccagccatggcgatctcccagatctcacgcatattcctggccatccttctcctggccgccgccttcgccgccgccccagctgcgcttgcggacggcgacgacgtggtggcccttaccgaatccacgttcgagaaggaggtcggaaaggaccgcggcgccctcgtcgagttctacgccccctggtgtggtcactgcaagaagcttgctcctgagtatgaaagacttggtgcaagttttaagaaagctaaatctgtcttgattgctaaggttgattgtgatgagcacaagagtttgtgcagcaagtatggagtttccgggtatccaacaatccaatggttcccgaaaggatccttggagcccaaaaagtatgaaggacaacgcactgcagaagcccttgctgaatttctcaatactgaaggaggcacaaatgtaaagctggcaaccattccttcaagtgttgtggttctcaccccagagacctttgactcaattgtccttgatgaaaccaaagatgtccttgttgagttctatgccccatggtgtggtcactgcaagagtcttgcaccgacgtatgagaaggtggcttctgttttcaagttggatgaaggagttgttattgctaaccttgacgctgacaaacacagggatttggctgagaagtatggagttagtggatttcctaccttgaagtttttcccaaagggaaacaaagctggtgaagattatgatggcgatagggacttggttgactttgtcaagttcattaacgagaagagtggtaccagccgtgacacaaagggtcaactaacctcagaggctggccgtatagcaagtctggatgtcctggctaaggagttccttggtgcttccggtgacaagcgaaaggaagtcctctccagtatggaggaggaggcagataagctcagtggttctgctgcaaggcatggaaaggtctatgtaaccatcgcaaagaagattctagagaaaggcaacgagtatactgagaaggaaaccaagaggcttgatcgcatcttggagaagtccatcagcccctccaaggccgacgagtttatcatcaagaagaacgttctttcgactttctcatcctaaggcatctgctagctccattttcacgtttcagatataggcgacaaaaactgcaggattataagtgtgataatgagagttaaatggtgctagaactaattttggggctttccctcgaggatatgtaatactcgtacgtcttgcgaattagttcttttccttgtgcttctggatttattccgtagcaccatagtttattttttggtttgacatggaggacattgtgactacagaactgagttttactatccaataacactgctcacttgatggggcttatgcgaacctgttctggtacgtgctttgggaatacatgatcacg

SEQ ID NO: 29955 - DNA, 1662 bp, Zea Mays
gctcaacaccatcgttgtcgacctctttttcttcatacttgtagtgttagtctaatctaccgtatgttcgagtggcaccatatgttagtgtgattaaaaaggaaagagaaaacaatatggtcgagtgagataccactcacacgcacgaaatcacgggcatgtgacaacctaaaacaaggacacaagtggggacgaagtagcagaagacttcccttcgtctgcttcccagagacccagccatggcgatctcccagatctcacgcatattcctggccatccttctcctggccgccgccttcgccgccgccccagctgcgcttgcggacggcgacgacgtggtggcccttaccgaatccacgttcgagaaggaggtcggaaaggaccgcggcgccctcgtcgagttctacgccccctggtgtggtcactgcaagaagcttgctcctgagtatgaaagacttggtgcaagttttaagaaagctaaatctgtcttgattgctaaggttgattgtgatgagcacaagagtttgtgcagcaagtatggagtttccgggtatccaacaatccaatggttcccgaaaggatccttggagcccaaaaagtatgaaggacaacgcactgcagaagcccttgctgaatttctcaatactgaaggaggcacaaatgtaaagctggcaaccattccttcaagtgttgtggttctcaccccagagacctttgactcaattgtccttgatgaaaccaaagatgtccttgttgagttctatgccccatggtgtggtcactgcaagagtcttgcaccgacgtatgagaaggtggcttctgttttcaagttggatgaaggagttgttattgctaaccttgacgctgacaaacacagggatttggctgagaagtatggagttagtggatttcctaccttgaagtttttcccaaagggaaacaaagctggtgaagattatgatggcgatagggacttggttgactttgtcaagttcattaacgagaagagtggtaccagccgtgacacaaagggtcaactaacctcagaggctggccgtatagcaagtctggatgtcctggctaaggagttccttggtgcttccggtgacaagcgaaaggaagtcctctccagtatggaggaggaggcagataagctcagtggttctgctgcaaggcatggaaaggtctatgtaaccatcgcaaagaagattctagagaaaggcaacgagtatactgagaaggaaaccaagaggcttgatcgcatcttggagaagtccatcagcccctccaaggccgacgagtttatcatcaagaagaacgttctttcgactttctcatcctaaggcatctgctagctccattttcacgtttcagatataggcgacaaaaactgcaggattataagtgtgataatgagagttaaatggtgctagaactaattttggggctttccctcgaggatatgtaatactcgtacgtcttgcgaattagttcttttccttgtgcttctggatttattccgtagcaccatagtttattttttggtttgacatggaggacattgtgactacagaactgagttttactatccaataacactgctcacttgatggggcttatgcgaacctgttctggtacgtgctttgggaatacatgatcacg

SEQ ID NO: 29956 - DNA, 245 bp, Zea Mays
aaccatatctttctcgtcttgtcgtgcccatgtttctcgcctacgagtacgccagttcccttcactctattcctgcgcatgaaggagttacccagatcagaagttccccaggcgctgcagcaacaggagaggaggagcacggttcctcgtgcgcagattgcgatgtattcctgagcttcaaggagtcggcgatcaagttttggcgaccaagtgatcaggctcttcgagttttacgaggctgaaga

SEQ ID NO: 29957 - DNA, 1220 bp, Zea Mays
ctcggcttatcttccactcgcatacgtgttgggacgtcacggcacagccctccctccccattccgagttctgacccacgctcagaatccatccatttctatcccccacacacaaatacacatcccccttcccttccccgcaactactctgtgctctctactacacgcttctatctaagagaacagaccagaccacgcacgccggcagagaaaaaccagaattctccaagcaatcctatcgccaacccggccacggatcggggctgccgtctgttgccgccggcgctggcgccgacgccgatgggctccgccgatcgcagtaagatcgacgggatcgtggtgccggagaaaggcgccaggagctgcgtcgaatgccgcgccaccaccacgcccatgtggcgcagcggccccaccgggcccaggtcactttgcaacgcttgcgggattcggtaccgaaagaagaggaggcaagagcttggcctagagcacaacaagcagcagcagcaacaacaaaataatggcgaggcgaagactggagtaaaagacagctctagcaacagcagtagcgggagcagcaactttcacgtggtgcagaaacggaggctcctaatggaagtggaggaggctgctctgctgctgatgaccctatcttcttcgcccgcatccacattgctacatggctaggaaccctgcaacaccaaatcaacgatgtacatacacacacaggcttccccaccccacaccttgcacagtcaccatccaacgattccagtccaaatcgtacatgtttctcacaccagtctgagatagggaaggagggggcctatctcgggattgtgtgatcttctgataggggtggatgattagtgccaacctaatcactccattgatcgtcttcttctctgtttccgtcctacctgtagaccttgatgtatctgctatgtgagttgtggtaggctccataacaagaggtcctgttgatctcacttccccacacatctttttctctgtccttttctctctctttttttatgttctccctctttcggttttgtatgtactttgatgttgcccctttgtgagggatggatgatcaaaaggagacgccatcctttctcattctggaataatcaaggatgtgagctctttcatttcattaaatagatggcgagaatgtgacggcgcgatttatgcaaccctcggatagctgttcttagtgac

SEQ ID NO: 29958 - DNA, 845 bp, Zea Mays
cttgacaatggaggaactgtttgcaactgagataaatgaaaccatatgcgtgctctattacttttcatgtcactttgcaacgcttgcgggattcggtaccgaaagaagaggaggcaagagcttggcctagagcacaacaagcagcagcagcaacaacaaaataatggcgaggcgaagactggagtaaaagacagctctagcaacagcagtagcgggagcagcaactttcacgtggtgcagaaacggaggctcctaatggaagtggaggaggctgctctgctgctgatgaccctatcttcttcgcccgcatccacattgctacatggctaggaaccctgcaacaccaaatcaacgatgtacatacacacacaggcttccccaccccacaccttgcacagtcaccatccaacgattccagtccaaatcgtacatgtttctcacaccagtctgagatagggaaggagggggcctatctcgggattgtgtgatcttctgataggggtggatgattagtgccaacctaatcactccattgatcgtcttcttctctgtttccgtcctacctgtagaccttgatgtatctgctatgtgagttgtggtaggctccataacaagaggtcctgttgatctcacttccccacacatctttttctctgtccttttctctctctttttttatgttctccctctttcggttttgtatgtactttgatgttgcccctttgtgagggatggatgatcaaaaggagacgccatcctttctcattctggaataatcaaggatgtgagctctttcatttcagtaagttcgtgttgctgtgtcatgaacaagaaaaaatgcagtt

SEQ ID NO: 29959 - DNA, 1550 bp, Zea Mays
atttttgaaaaaggaaattggttaattggtgttgactccagtgggtcaagattcgagtaccaataggaagcagcatatccattcccccaaattcccacacaagaacaacccaaggaggagggtcctcccctccaagattcaagcttctctcttggtttcctccgcagttgcgattctgcggagcgctgaatactacggtaatggattccaagaagatgtatgtttgctccctgcctttgatgccatacgtcgtcttcggattcgtcggctcccaactgccgtcagctcccaactggcagtcctataaagtggatgatccgaatgcgccgagaatgattcttctcgttattttgtacatctacgtcatcttgctggctaaaattaagaacgacaggatctacatcgagacggcaactgccgtggtgatatcttacgtgtcgctacttcaaatcagctggagctacatctggctcgttcccttccccattgtcgcgatcggcttcatcgttgctctgtgcaaggagctcagtcacgaggacgaggccggtggatcacattcacaggagcagagcaatgaaggtgaaggcgaagctactacgtcttcatgggaaaagttcctcctcttcttcagtttcatgctgggggcactgaccatgatgatgactcggctggtggagacggggcgggccattgcccaccgcggcatcgtgccggcgtccgagctgctttggaaagcctcgctcgtggtgctgctggtggcggtgcacgcagtggcggcagagctgctgggagagaacgcgttactcctgtgcatgccggaaatcctgccggtgctgctgtggctcagcgttcgccttgacactgctgacgacaggatcaagctggtcctggacagtaatctgctccccgcagcactacctgcagtcctcgccatgctagcgaagggcgagcccctgctctactggtgcagaaaggcgttggtgtcttgtgttgtttcggcgcttcttaccttctacgtttatttcatgctgtgccagtggccgggaggacaacgcgatcgcacgctcacagttctactgcaagaaccggtggtctcatcatcagccgaccaaatcttcgatgtgtagcatgtacttttcaggggcacatactggatgagacaatggatgctgctgctaaaggaagaagaaaaattacaagtaaagcagggatgcaggctgcttgaagttgcaatgatgcaaatctttgctaaaaatggttggaactttagtaatcgattgtgcttgtaatctgtaatgttatggtggcatctatgtttcgagtatggttttgttcctgtttgaacccagtatttttgatgtattggacagctatatgcccaatatttttgatgtattggacagctatatgcatattgtcatgcagaggttggaataatcaagttattcccttttctaaaaaatatgtaaaaaagatcctccagttcataatttgactgcgaaatgaatattttcataatctgttcccctgttagacatatggtttatccc

SEQ ID NO: 29960 - DNA, 4008 bp, Zea Mays
ctacatttgtcttaagtcaaactatctaaatcttaatgttgataaaaatatgtacactagaatacttgtgtttacattacaaaataagatcattagattcatcatgtaacatatattttcatattatacctatttgttgtcacaaatgttgcaaatttctctatagatgatcacacttaaattgcaaccatacactcctagtagtagtataaattactgtgcttacttgttttggaaataattaacttcaaatgaaccacttgctggactccaaaaggaactgaggtgccgtttggttcagatgttggtaacgtaatgggtaaccgataacgttaaatgatgtttgtttaagtccaaccgtaatcgaataccacactagaaatggataccggcctattcaaacttgttaccgccgttactcaagtttgaatcattatcattactatttacgttacaaaatgtgaaccaaacaacacctgacttctgccgaactcagctgcttttgccccttcaacacttctcaccaagtgctccatctgaaatttctttcgctctgcaggagagctactccgcatactgcacgtcgaggtttggacgcctcatcaaccgtccatcaatttttgatatggagaatgaagagtatgctgaggatctttgtcgagatgtctgggctactcatttcccatccgagccatttgaccttgactcgaatgagattggtggaaacagtgttgataatataacatgtgacaatgtcaatggtgaaattgtcaaaatggtgagacagtacgctggcctagcagaccgttttgcctcactctttgtgcaggaaggtgtctaccatgttgctgctaggcggcgatatgtgcgtttcctggaccttatgaagaaggttgcgtgtgcaacccaagagtgcacacggcttgtgcctagcctagacatattactgatgtggcttgctcaccaggtatacgtagaccttagattcaattgaacatgtaatttgttctcacaagtattttagtttccacaattgcgatgaatccatgccagagttttcctgtgtgttatgccacggatatggtagcgatgggcatcagtgacaatgttgcaaaagtgggtgtttgttatggcgaagtggtgagcaatgaggcggtaaggaggacaaaggaactgtgggaggatgcatatgatgaaccatatgatatggctggatcagaggttgatgtgggagcagttagcacagcaagggaggcattttactgggtgccagcagcatcagaggaggatgccaaccggctatacaagagtttgcagccaagattccttattgaggtatatgtgttcttgaagggagaatttgataaggagcccaccagcaaggagttcctacgattgcgaacacagaggtgtcacagatcactaaagctcaacatatcgatgtccaatttatcctgcaaaagctggcagaaagtatggcacttgtattgtgaatttgcaactcggggcctcttcattgagttcaggcgcacccttagtgggtgcttcaggaaaagcaagttcctcaagaacatctcattctcatggagcgatgtgttgcatgagaaagcacttgctctcacagaagaacttgatgtcaggatgagagcgatggcatcaattacccctccagttcaagcaccatacttgttgaagtgtgtgcctgatcgagtaactgatgatggtggggccatgatttctgatgtcatattgcgcatgagaaattaccgtccccaagaaggacgttggctgacacgcactgtacttgatcacagtgggagagaatgttttgtcatccggatgaggcagagggatttggcggagaggtgctgaaactcccatggcagtgaaatgggaggataggagcattgaggttcgagaaggatcatggtcatacattgccagtacaagctctgttggttatgctcctgatagtgggcacaggaacagtgatgaaagatcatcaggagaataaggtagtttggagcttatcaacaggagatacgctgacaatacgtttgggagatgaactcagctttcagttaaaaaatgacagctcagaagaggaggtatgatcagtacatttatgtaggggttagggtgcatatggattgtacttcctccaccctgaaaaaaatgcaattctacttctatttttagtcaaactattcttagcaacagtgatattttttacacaaataggtatattatggaaacatattccatgatgaatctaacaatgcttatctgatattataaatattaatatactttttgtataaacttggtcaaactctatatggtttgactccgtactatgttataattagaattaaattgttttcatgggggagtaataaacaaagaaccattattggtgctcacagctgaaagaactggcagcacaagaatcttgatttctatagtaaacaagtttttctatgcaatatacaaatgagtgcatgctgtagagttcatcattttccttttcaaaaatgtaacaccgcattggcaacctctgaagagaagattgaagacatatggtaactgtattatcacaaacttaatttgcaccattatgtttgttgtttaactttgttcttaaaaaggtagtattctagaatttcatatagacacattccttagcaacgaggtccgctgattaaactgtagaatagcctttgtattggtccctaagtttcagtttcatatgattttcatgtgtcatttaaatgtaattgaaacattctgttctattaaaatgtaaaatataagttggtttactacactgttgatatatgacttcattttttgtcactgttctaaaaatatacaaagccatttcatgccttttagatgcactgcgatgtactatttaccaggcaaggctgcttgtcgggaggaggttgagctacagagtaaacacagataatgcgtcgagcaacctagtcgaggaggagcaatacctgacacttgttcgtaagtcaccgtatcatcatggtgacagagcaaccgtgcttctaaactggaaattacttgctgtggagttcttacctgaagaggatgcagtttttgttcttctcctatgcatggtgattgcacggaccatgacagagatcaggagagaagatgtggctgggcttttagtgcggcggaggataagtgaagcaagggccgggcagagagactggggttcggtgatgcttcctggctcgctttcaccggatcctcatctgcagccttggtaccggaacgcaacgcaggttttgagctctgcggagacaggaccagtgctcacaaagtactcacctgctgacgggaaggacatgttgtacaggcaagctcttataccctgatgaagccctaatagagattattaccataccatcaggacttgcctgatagataaaaaaaacgaacccaatcttcctgggtatcgcagggaaattatttcatttcctcaatgctatgacatacgacatttgtacatgacaattttttgtggttcgagctgttgtttcactaatgatgattgtcctttgatacgaatccaatgattgctgtcatatattgtttgtactgagaattttacacatttcatttcaagtttgtctggtttctgtagtttgacaatgaactaaaagaagagcttatgtccatttgaacaaactgattatagaggataaaggattcagaatctgatatccgaagagtctgaatgttcatctcgtgcatatttcttcaggaaaaaaaaaatagaatggcaccattctagccgaaaaggactcagtgagaatgtaagatggaagatgaaaatccttcgacgtgtgatagtgctttgtgcgttggggtgtgactgtgactgccgctccagccggctttgattgcctctattgctttttgtatctcctcaatgaggatggcaatgggcactgtctacgctcccagtcttcccagatgatatcttct

SEQ ID NO: 29961 - DNA, 2787 bp, Zea Mays
ctacatttgtcttaagtcaaactatctaaatcttaatgttgataaaaatatgtacactagaatacttgtgtttacattacaaaataagatcattagattcatcatgtaacatatattttcatattatacctatttgttgtcacaaatgttgcaaatttctctatagatgatcacacttaaattgcaaccatacactcctagtagtagtataaattactgtgcttacttgttttggaaataattaacttcaaatgaaccacttgctggactccaaaaggaactgaggtgccgtttggttcagatgttggtaacgtaatgggtaaccgataacgttaaatgatgtttgtttaagtccaaccgtaatcgaataccacactagaaatggataccggcctattcaaacttgttaccgccgttactcaagtttgaatcattatcattactatttacgttacaaaatgtgaaccaaacaacacctgacttctgccgaactcagctgcttttgccccttcaacacttctcaccaagtgctccatctgaaatttctttcgctctgcaggagagctactccgcatactgcacgtcgaggtttggacgcctcatcaaccgtccatcaatttttgatatggagaatgaagagtatgctgaggatctttgtcgagatgtctgggctactcatttcccatccgagccatttgaccttgactcgaatgagattggtggaaacagtgttgataatataacatgtgacaatgtcaatggtgaaattgtcaaaatggtgagacagtacgctggcctagcagaccgttttgcctcactctttgtgcaggaaggtgtctaccatgttgctgctaggcggcgatatgtgcgtttcctggaccttatgaagaaggttgcgtgtgcaacccaagagtgcacacggcttgtgcctagcctagacatattactgatgtggcttgctcaccaggtatacgtagaccttagattcaattgaacatgtaatttgttctcacaagtattttagtttccacaattgcgatgaatccatgccagagttttcctgtgtgttatgccacggatatggtagcgatgggcatcagtgacaatgttgcaaaagtgggtgtttgttatggcgaagtggtgagcaatgaggcggtaaggaggacaaaggaactgtgggaggatgcatatgatgaaccatatgatatggctggatcagaggttgatgtgggagcagttagcacagcaagggaggcattttactgggtgccagcagcatcagaggaggatgccaaccggctatacaagagtttgcagccaagattccttattgaggtatatgtgttcttgaagggagaatttgataaggagcccaccagcaaggagttcctacgattgcgaacacagaggtgtcacagatcactaaagctcaacatatcgatgtccaatttatcctgcaaaagctggcagaaagtatggcacttgtattgtgaatttgcaactcggggcctcttcattgagttcaggcgcacccttagtgggtgcttcaggaaaagcaagttcctcaagaacatctcattctcatggagcgatgtgttgcatgagaaagcacttgctctcacagaagaacttgatgtcaggatgagagcgatggcatcaattacccctccagttcaagcaccatacttgttgaagtgtgtgcctgatcgagtaactgatgatggtggggccatgatttctgatgtcatattgcgcatgagaaattaccgtccccaagaaggacgttggctgacacgcactgtacttgatcacagtgggagagaatgttttgtcatccggatgaggcagagggatttggcggagaggtgctgaaactcccatggcagtgaaatgggaggataggagcattgaggttcgagaaggatcatggtcatacattgccagtacaagctctgttggttatgctcctgatagtgggcacaggaacagtgatgaaagatcatcaggagaataaggtagtttggagcttatcaacaggagatacgctgacaatacgtttgggagatgaactcagctttcagttaaaaaatgacagctcagaagaggaggcaaggctgcttgtcgggaggaggttgagctacagagtaaacacagataatgcgtcgagcaacctagtcgaggaggagcaatacctgacacttgttcgtaagtcaccgtatcatcatggtgacagagcaaccgtgcttctaaactggaaattacttgctgtggagttcttacctgaagaggatgcagtttttgttcttctcctatgcatggtgattgcacggaccatgacagagatcaggagagaagatgtggctgggcttttagtgcggcggaggataagtgaagcaagggccgggcagagagactggggttcggtgatgcttcctggctcgctttcaccggatcctcatctgcagccttggtaccggaacgcaacgcaggttttgagctctgcggagacaggaccagtgctcacaaagtactcacctgctgacgggaaggacatgttgtacaggaaaaaaaaaatagaatggcaccattctagccgaaaaggactcagtgagaatgtaagatggaagatgaaaatccttcgacgtgtgatagtgctttgtgcgttggggtgtgactgtgactgccgctccagccggctttgattgcctctattgctttttgtatctcctcaatgaggatggcaatgggcactgtctacgctcccagtcttcccagatgatatcttct

SEQ ID NO: 29962 - DNA, 2792 bp, Zea Mays
ctacatttgtcttaagtcaaactatctaaatcttaatgttgataaaaatatgtacactagaatacttgtgtttacattacaaaataagatcattagattcatcatgtaacatatattttcatattatacctatttgttgtcacaaatgttgcaaatttctctatagatgatcacacttaaattgcaaccatacactcctagtagtagtataaattactgtgcttacttgttttggaaataattaacttcaaatgaaccacttgctggactccaaaaggaactgaggtgccgtttggttcagatgttggtaacgtaatgggtaaccgataacgttaaatgatgtttgtttaagtccaaccgtaatcgaataccacactagaaatggataccggcctattcaaacttgttaccgccgttactcaagtttgaatcattatcattactatttacgttacaaaatgtgaaccaaacaacacctgacttctgccgaactcagctgcttttgccccttcaacacttctcaccaagtgctccatctgaaatttctttcgctctgcaggagagctactccgcatactgcacgtcgaggtttggacgcctcatcaaccgtccatcaatttttgatatggagaatgaagagtatgctgaggatctttgtcgagatgtctgggctactcatttcccatccgagccatttgaccttgactcgaatgagattggtggaaacagtgttgataatataacatgtgacaatgtcaatggtgaaattgtcaaaatggtgagacagtacgctggcctagcagaccgttttgcctcactctttgtgcaggaaggtgtctaccatgttgctgctaggcggcgatatgtgcgtttcctggaccttatgaagaaggttgcgtgtgcaacccaagagtgcacacggcttgtgcctagcctagacatattactgatgtggcttgctcaccaggtatacgtagaccttagattcaattgaacatgtaatttgttctcacaagtattttagtttccacaattgcgatgaatccatgccagagttttcctgtgtgttatgccacggatatggtagcgatgggcatcagtgacaatgttgcaaaagtgggtgtttgttatggcgaagtggtgagcaatgaggcggtaaggaggacaaaggaactgtgggaggatgcatatgatgaaccatatgatatggctggatcagaggttgatgtgggagcagttagcacagcaagggaggcattttactgggtgccagcagcatcagaggaggatgccaaccggctatacaagagtttgcagccaagattccttattgaggtatatgtgttcttgaagggagaatttgataaggagcccaccagcaaggagttcctacgattgcgaacacagaggtgtcacagatcactaaagctcaacatatcgatgtccaatttatcctgcaaaagctggcagaaagtatggcacttgtattgtgaatttgcaactcggggcctcttcattgagttcaggcgcacccttagtgggtgcttcaggaaaagcaagttcctcaagaacatctcattctcatggagcgatgtgttgcatgagaaagcacttgctctcacagaagaacttgatgtcaggatgagagcgatggcatcaattacccctccagttcaagcaccatacttgttgaagtgtgtgcctgatcgagtaactgatgatggtggggccatgatttctgatgtcatattgcgcatgagaaattaccgtccccaagaaggacgttggctgacacgcactgtacttgatcacagtgggagagaatgttttgtcatccggatgagagtaggcagagggatttggcggagaggtgctgaaactcccatggcagtgaaatgggaggataggagcattgaggttcgagaaggatcatggtcatacattgccagtacaagctctgttggttatgctcctgatagtgggcacaggaacagtgatgaaagatcatcaggagaataaggtagtttggagcttatcaacaggagatacgctgacaatacgtttgggagatgaactcagctttcagttaaaaaatgacagctcagaagaggaggcaaggctgcttgtcgggaggaggttgagctacagagtaaacacagataatgcgtcgagcaacctagtcgaggaggagcaatacctgacacttgttcgtaagtcaccgtatcatcatggtgacagagcaaccgtgcttctaaactggaaattacttgctgtggagttcttacctgaagaggatgcagtttttgttcttctcctatgcatggtgattgcacggaccatgacagagatcaggagagaagatgtggctgggcttttagtgcggcggaggataagtgaagcaagggccgggcagagagactggggttcggtgatgcttcctggctcgctttcaccggatcctcatctgcagccttggtaccggaacgcaacgcaggttttgagctctgcggagacaggaccagtgctcacaaagtactcacctgctgacgggaaggacatgttgtacaggaaaaaaaaaatagaatggcaccattctagccgaaaaggactcagtgagaatgtaagatggaagatgaaaatccttcgacgtgtgatagtgctttgtgcgttggggtgtgactgtgactgccgctccagccggctttgattgcctctattgctttttgtatctcctcaatgaggatggcaatgggcactgtctacgctcccagtcttcccagatgatatcttct

SEQ ID NO: 29963 - DNA, 3610 bp, Zea Mays
ctacatttgtcttaagtcaaactatctaaatcttaatgttgataaaaatatgtacactagaatacttgtgtttacattacaaaataagatcattagattcatcatgtaacatatattttcatattatacctatttgttgtcacaaatgttgcaaatttctctatagatgatcacacttaaattgcaaccatacactcctagtagtagtataaattactgtgcttacttgttttggaaataattaacttcaaatgaaccacttgctggactccaaaaggaactgaggtgccgtttggttcagatgttggtaacgtaatgggtaaccgataacgttaaatgatgtttgtttaagtccaaccgtaatcgaataccacactagaaatggataccggcctattcaaacttgttaccgccgttactcaagtttgaatcattatcattactatttacgttacaaaatgtgaaccaaacaacacctgacttctgccgaactcagctgcttttgccccttcaacacttctcaccaagtgctccatctgaaatttctttcgctctgcaggagagctactccgcatactgcacgtcgaggtttggacgcctcatcaaccgtccatcaatttttgatatggagaatgaagagtatgctgaggatctttgtcgagatgtctgggctactcatttcccatccgagccatttgaccttgactcgaatgagattggtggaaacagtgttgataatataacatgtgacaatgtcaatggtgaaattgtcaaaatggtgagacagtacgctggcctagcagaccgttttgcctcactctttgtgcaggaaggtgtctaccatgttgctgctaggcggcgatatgtgcgtttcctggaccttatgaagaaggttgcgtgtgcaacccaagagtgcacacggcttgtgcctagcctagacatattactgatgtggcttgctcaccaggtatacgtagaccttagattcaattgaacatgtaatttgttctcacaagtattttagtttccacaattgcgatgaatccatgccagagttttcctgtgtgttatgccacggatatggtagcgatgggcatcagtgacaatgttgcaaaagtgggtgtttgttatggcgaagtggtgagcaatgaggcggtaaggaggacaaaggaactgtgggaggatgcatatgatgaaccatatgatatggctggatcagaggttgatgtgggagcagttagcacagcaagggaggcattttactgggtgccagcagcatcagaggaggatgccaaccggctatacaagagtttgcagccaagattccttattgaggtatatgtgttcttgaagggagaatttgataaggagcccaccagcaaggagttcctacgattgcgaacacagaggtgtcacagatcactaaagctcaacatatcgatgtccaatttatcctgcaaaagctggcagaaagtatggcacttgtattgtgaatttgcaactcggggcctcttcattgagttcaggcgcacccttagtgggtgcttcaggaaaagcaagttcctcaagaacatctcattctcatggagcgatgtgttgcatgagaaagcacttgctctcacagaagaacttgatgtcaggatgagagcgatggcatcaattacccctccagttcaagcaccatacttgttgaagtgtgtgcctgatcgagtaactgatgatggtggggccatgatttctgatgtcatattgcgcatgagaaattaccgtccccaagaaggacgttggctgacacgcactgtacttgatcacagtgggagagaatgttttgtcatccggatgagagtaggcagagggatttggcggagaggtgctgaaactcccatggcagtgaaatgggaggataggagcattgaggttcgagaaggatcatggtcatacattgccagtacaagctctgttggttatgctcctgaaaagatagtgggcacaggaacagtgatgaaagatcatcaggagaataaggtagtttggagcttatcaacaggagatacgctgacaatacgtttgggagatgaactcagctttcagttaaaaaatgacagctcagaagaggaggtatgatcagtacatttatgtaggggttagggtgcatatggattgtacttcctccaccctgaaaaaaatgcaattctacttctatttttagtcaaactattcttagcaacagtgatattttttacacaaataggtatattatggaaacatattccatgatgaatctaacaatgcttatctgatattataaatattaatatactttttgtataaacttggtcaaactctatatggtttgactccgtactatgttataattagaattaaattgttttcatgggggagtaataaacaaagaaccattattggtgctcacagctgaaagaactggcagcacaagaatcttgatttctatagtaaacaagtttttctatgcaatatacaaatgagtgcatgctgtagagttcatcattttccttttcaaaaatgtaacaccgcattggcaacctctgaagagaagattgaagacatatggtaactgtattatcacaaacttaatttgcaccattatgtttgttgtttaactttgttcttaaaaaggtagtattctagaatttcatatagacacattccttagcaacgaggtccgctgattaaactgtagaatagcctttgtattggtccctaagtttcagtttcatatgattttcatgtgtcatttaaatgtaattgaaacattctgttctattaaaatgtaaaatataagttggtttactacactgttgatatatgacttcattttttgtcactgttctaaaaatatacaaagccatttcatgccttttagatgcactgcgatgtactatttaccaggcaaggctgcttgtcgggaggaggttgagctacagagtaaacacagataatgcgtcgagcaacctagtcgaggaggagcaatacctgacacttgttcgtaagtcaccgtatcatcatggtgacagagcaaccgtgcttctaaactggaaattacttgctgtggagttcttacctgaagaggatgcagtttttgttcttctcctatgcatggtgattgcacggaccatgacagagatcaggagagaagatgtggctgggcttttagtgcggcggaggataagtgaagcaagggccgggcagagagactggggttcggtgatgcttcctggctcgctttcaccggatcctcatctgcagccttggtaccggaacgcaacgcaggttttgagctctgcggagacaggaccagtgctcacaaagtactcacctgctgacgggaaggacatgttgtacaggaaaaaaaaaatagaatggcaccattctagccgaaaaggactcagtgagaatgtaagatggaagatgaaaatccttcgacgtgtgatagtgctttgtgcgttggggtgtgactgtgactgccgctccagccggctttgattgcctctattgctttttgtatctcctcaatgaggatggcaatgggcactgtctacgctcccagtcttcccagatgatatcttct

SEQ ID NO: 29964 - DNA, 3605 bp, Zea Mays
ctacatttgtcttaagtcaaactatctaaatcttaatgttgataaaaatatgtacactagaatacttgtgtttacattacaaaataagatcattagattcatcatgtaacatatattttcatattatacctatttgttgtcacaaatgttgcaaatttctctatagatgatcacacttaaattgcaaccatacactcctagtagtagtataaattactgtgcttacttgttttggaaataattaacttcaaatgaaccacttgctggactccaaaaggaactgaggtgccgtttggttcagatgttggtaacgtaatgggtaaccgataacgttaaatgatgtttgtttaagtccaaccgtaatcgaataccacactagaaatggataccggcctattcaaacttgttaccgccgttactcaagtttgaatcattatcattactatttacgttacaaaatgtgaaccaaacaacacctgacttctgccgaactcagctgcttttgccccttcaacacttctcaccaagtgctccatctgaaatttctttcgctctgcaggagagctactccgcatactgcacgtcgaggtttggacgcctcatcaaccgtccatcaatttttgatatggagaatgaagagtatgctgaggatctttgtcgagatgtctgggctactcatttcccatccgagccatttgaccttgactcgaatgagattggtggaaacagtgttgataatataacatgtgacaatgtcaatggtgaaattgtcaaaatggtgagacagtacgctggcctagcagaccgttttgcctcactctttgtgcaggaaggtgtctaccatgttgctgctaggcggcgatatgtgcgtttcctggaccttatgaagaaggttgcgtgtgcaacccaagagtgcacacggcttgtgcctagcctagacatattactgatgtggcttgctcaccaggtatacgtagaccttagattcaattgaacatgtaatttgttctcacaagtattttagtttccacaattgcgatgaatccatgccagagttttcctgtgtgttatgccacggatatggtagcgatgggcatcagtgacaatgttgcaaaagtgggtgtttgttatggcgaagtggtgagcaatgaggcggtaaggaggacaaaggaactgtgggaggatgcatatgatgaaccatatgatatggctggatcagaggttgatgtgggagcagttagcacagcaagggaggcattttactgggtgccagcagcatcagaggaggatgccaaccggctatacaagagtttgcagccaagattccttattgaggtatatgtgttcttgaagggagaatttgataaggagcccaccagcaaggagttcctacgattgcgaacacagaggtgtcacagatcactaaagctcaacatatcgatgtccaatttatcctgcaaaagctggcagaaagtatggcacttgtattgtgaatttgcaactcggggcctcttcattgagttcaggcgcacccttagtgggtgcttcaggaaaagcaagttcctcaagaacatctcattctcatggagcgatgtgttgcatgagaaagcacttgctctcacagaagaacttgatgtcaggatgagagcgatggcatcaattacccctccagttcaagcaccatacttgttgaagtgtgtgcctgatcgagtaactgatgatggtggggccatgatttctgatgtcatattgcgcatgagaaattaccgtccccaagaaggacgttggctgacacgcactgtacttgatcacagtgggagagaatgttttgtcatccggatgagagtaggcagagggatttggcggagaggtgctgaaactcccatggcagtgaaatgggaggataggagcattgaggttcgagaaggatcatggtcatacattgccagtacaagctctgttggttatgctcctgatagtgggcacaggaacagtgatgaaagatcatcaggagaataaggtagtttggagcttatcaacaggagatacgctgacaatacgtttgggagatgaactcagctttcagttaaaaaatgacagctcagaagaggaggtatgatcagtacatttatgtaggggttagggtgcatatggattgtacttcctccaccctgaaaaaaatgcaattctacttctatttttagtcaaactattcttagcaacagtgatattttttacacaaataggtatattatggaaacatattccatgatgaatctaacaatgcttatctgatattataaatattaatatactttttgtataaacttggtcaaactctatatggtttgactccgtactatgttataattagaattaaattgttttcatgggggagtaataaacaaagaaccattattggtgctcacagctgaaagaactggcagcacaagaatcttgatttctatagtaaacaagtttttctatgcaatatacaaatgagtgcatgctgtagagttcatcattttccttttcaaaaatgtaacaccgcattggcaacctctgaagagaagattgaagacatatggtaactgtattatcacaaacttaatttgcaccattatgtttgttgtttaactttgttcttaaaaaggtagtattctagaatttcatatagacacattccttagcaacgaggtccgctgattaaactgtagaatagcctttgtattggtccctaagtttcagtttcatatgattttcatgtgtcatttaaatgtaattgaaacattctgttctattaaaatgtaaaatataagttggtttactacactgttgatatatgacttcattttttgtcactgttctaaaaatatacaaagccatttcatgccttttagatgcactgcgatgtactatttaccaggcaaggctgcttgtcgggaggaggttgagctacagagtaaacacagataatgcgtcgagcaacctagtcgaggaggagcaatacctgacacttgttcgtaagtcaccgtatcatcatggtgacagagcaaccgtgcttctaaactggaaattacttgctgtggagttcttacctgaagaggatgcagtttttgttcttctcctatgcatggtgattgcacggaccatgacagagatcaggagagaagatgtggctgggcttttagtgcggcggaggataagtgaagcaagggccgggcagagagactggggttcggtgatgcttcctggctcgctttcaccggatcctcatctgcagccttggtaccggaacgcaacgcaggttttgagctctgcggagacaggaccagtgctcacaaagtactcacctgctgacgggaaggacatgttgtacaggaaaaaaaaaatagaatggcaccattctagccgaaaaggactcagtgagaatgtaagatggaagatgaaaatccttcgacgtgtgatagtgctttgtgcgttggggtgtgactgtgactgccgctccagccggctttgattgcctctattgctttttgtatctcctcaatgaggatggcaatgggcactgtctacgctcccagtcttcccagatgatatcttct

SEQ ID NO: 29965 - DNA, 1896 bp, Zea Mays
gttcctacattcatatgattcagcaggtatatgtgttcttgaagggagaatttgataaggagcccaccagcaaggagttcctacgattgcgaacacagaggtgtcacagatcactaaagctcaacatatcgatgtccaatttatcctgcaaaagctggcagaaagtatggcacttgtattgtgaatttgcaactcggggcctcttcattgagttcaggcgcacccttagtgggtgcttcaggaaaagcaagttcctcaagaacatctcattctcatggagcgatgtgttgcatgagaaagcacttgctctcacagaagaacttgatgtcaggatgagagcgatggcatcaattacccctccagttcaagcaccatacttgttgaagtgtgtgcctgatcgagtaactgatgatggtggggccatgatttctgatgtcatattgcgcatgagaaattaccgtccccaagaaggacgttggctgacacgcactgtacttgatcacagtgggagagaatgttttgtcatccggatgagagtaggcagagggatttggcggagaggtgctgaaactcccatggcagtgaaatgggaggataggagcattgaggttcgagaaggatcatggtcatacattgccagtacaagctctgttggttatgctcctgaaaagatagtgggcacaggaacagtgatgaaagatcatcaggagaataaggtagtttggagcttatcaacaggagatacgctgacaatacgtttgggagatgaactcagctttcagttaaaaaatgacagctcagaagaggaggcaaggctgcttgtcgggaggaggttgagctacagagtaaacacagataatgcgtcgagcaacctagtcgaggaggagcaatacctgacacttgttcgtaagtcaccgtatcatcatggtgacagagcaaccgtgcttctaaactggaaattacttgctgtggagttcttacctgaagaggatgcagtttttgttcttctcctatgcatggtgattgcacggaccatgacagagatcaggagagaagatgtggctgggcttttagtgcggcggaggataagtgaagcaagggccgggcagagagactggggttcggtgatgcttcctggctcgctttcaccggatcctcatctgcagccttggtaccggaacgcaacgcaggttttgagctctgcggagacaggaccagtgctcacaaagtactcacctgctgacgggaaggacatgttgtacaggcaagctcttataccctgatgaagccctaatagagattattaccataccatcaggacttgcctgatagataaaaaaaacgaacccaatcttcctgggtatcgcagggaaattatttcatttcctcaatgctatgacatacgacatttgtacatgacaattttttgtggttcgagctgttgtttcactaatgatgattgtcctttgatacgaatccaatgattgctgtcatatattgtttgtactgagaattttacacatttcatttcaagtttgtctggtttctgtagtttgacaatgaactaaaagaagagcttatgtccatttgaacaaactgattatagaggataaaggattcagaatctgatatccgaagagtctgaatgttcatctcgtgcatatttcttcaggaaaaaaaaaatagaatggcaccattctagccgaaaaggactcagtgagaatgtaagatggaagatgaaaatccttcgacgtgtgatagtgctttgtgcgttggggtgtgactgtgactgccgctccagccggctttgattgcctctattgctttttgtatctcctcaatgaggatggcaatgggcactgtctacgctcccagtcttcccagatgatatcttct

SEQ ID NO: 29966 - DNA, 3484 bp, Zea Mays
gtcagtttcgtgttatgtcgggagattaatcctaatctcagatgctcagtaaaaatttctatttctcgatcgtgcctatctctgtttatcaggctttctcttggaagttcaccgaattcagagttaatcgatcgcgagaaacagccaattttggagcgtgttaaaacttttaattctcggaactaatgcagactcgaagatcattctcgaattttagatctcatctgaagccctttaaatcaaactctcggtgactattatctgatctgagctcgaatccaattcctcgaacttcgatcgatgttcgactattttaatccgaatccgtatctcaaaagaaatactcagtatgtcatcctctaattaatttctatccgattcggcttaatatctctgtatccaattcgatttcaaaatcagcatcgacagcaattttaaaatgccacgattcaccttctccgactaaaaatccaaagccgatcaaatctcaggacgatttattttcaaatcacgcgtagggaattattttcgagcggaatctaattagactctcggccgaattaattgctcaatcgtcagttcaccgaaatctctttcgctctgttctgtgtacaaacaaattccgcgggaacattttattccggaaaatatttagcgcagcccgtttggcattttgggccaagcccatttaaaacccagcccattaggcccactaagaaaccctaaccctagggcttcttctataaataggggtgttcacttggtcattttccactcccacccctccatttttccctagccgccaccagcagctcttctctgtttcctggacgtgcgcagggagctgagctccttctcccatggcgcctccacacttccagccgccctcctctgcccagcagccgagcgcccagctcctcccctcggcagccatggcgtcctccccttcctcccgccctctgctgtccacggcgagctacagcagggagccgagctccaagctcccacggcgctcgagctccactcctccctgttcgtcttcaacccaagtcggcgccctctcgctggctctcctcccctcggcagccatggcatccttccccttctcccgccatatactgtcacggcgagatacagcagggagccgagctccaagctcacacggcgctcgagctccactcctccctgttagtcttcaacccaagtcggcgccctctcgctggctgtcctctccgtcgcgcccatactggccgtgcccctcacgctggcacacaggcgcccaggcaagcttccccatggcgctcgactccctgttccatggtgccctgtggtcgcccccttcttccccttgtggctgcgctcctctgctccctccatggcgccccctgctccttcctcgacgcgctgtaggtgttcggcaaatgcgcagctccatttctcccatggccgtggcctgcttttcccggcgccctgcgcagcatctccctcccccaagtccctgcgcgcgcacagcagcagctcgccccaccttccctcgctgcgcagcccctcggcgaaacgccgctgttcctgcagccccgacaccttccctggcttcctcactgctagcgctgcgcgcgtgccacgtgttcggcgatctgtccaagtggggtgttgagcagtgagcagcaagccgtcaacgcccgccgtgtgctcgctgttttgcgcagcccatccgcgacgccgtcgaaaaaccgtgctagccgtcaatcgccattcgtcgcgcacgcgcgttcaatacaagaccggtcgggtgaaccacgtgcttgcataactcaaatccgatcccgctcaggttgattgatttatagtttaccatacgtatgatttggttgatgtcatgcagtgcacgtatatgtatggatatgtgtaaaatgttttggttatacgcattagtaggttcgcatttgcggttggagaacaagaagttgtttgctgtgtgcgatttgtagtttgtctaaatacgttttggtcgatgtggtgtgtattggtgtttgaatatatgtggctgcgatgattcgtttatgtgtcacgaggatggttcgtggatggtattagtcgtttgttaaaatactttgtcataaagtagtgtgttagttgtggtaaattaaataaagcgtaaaacatacttagtaatttccatagttagctaatgagttagtctatgttcaatatattttatgtattcatcgtggtgtaggatagagtgggtcgaagatatgaattatgagacatgtgatttgtgtttaagaacgagaggttcgaataatcggttagtgtttcacttgtctagtcgctaagtattgtcataaataattgtgcaaaaattggttataagaatgcagtggtcacgtggtgtggttggatgcgataagtagacgagaagggtgggtttgtctgagcacgatgttgtcgaacgtgtgtatcgaaatgtgatgtagtagcgattgcgttgaattaaacggtaatgtctcgggtgcacgccgcaatatggttgcatgcgagacggggtaaaagaaagtgtgctcgacataaatgttgggtcgttgtaggtagaaattgtcttggcttaaatagaaaggtggtgacatgccagagtagtcatcgctttcctatatttataggtcaagtcatggcgatgcgtattatgcgttcattaaattatgtttcgcatatagcgtatgattgtactcacgatttcgaatagacacttcaaataagtcaagtaggttcataatgaaagatgtgtgatgaagttagttgttttaggatattgttgaaatgctccattcatgtgatagacatgtgtggataatttaaatcgagtcgatgtgtgtgacgatgatattcatgaattaagtagatgtcctaaaattgtgtagtgaagcttaggttaagttgcaagcgatgtggaaatgttttggtaaagatgtatgtgaattgtgaacgagtcattcgatgtatcatgtcgtgtcgtggtggtatgaaaaatgggttaggaatcgatcggctaaataccaagttcggttagagttattttgttacttgggattgtggggtgaagtgatggtgtgactatgtagccgtcacgtcatctattgtgcgactatgcttaagtgtgccttgctataagttagaataaatcgagtccctagaacgcgacaattttagaagtaaatagaagctgaattttgaggattgctgttttggactgcatgcgctgttttagttgtgctgtatgttgggtgaactgaattatgttttctgtagatatgtgctatagaaaagttgtagataacatgattatcttgcttgtacaaaaatttgacagccataagcctgatcgtttaggagttgtgtttttcgcaagcccagcatctgaatctgtcgaatttctggacagatttcagaaattgcaatggttgcttaagttaatgttgaaata

SEQ ID NO: 29967 - DNA, 1679 bp, Zea Mays
tgacaaaaatgtagaatgtttcaaaaaataatggtaactgttatggacattataaaagtatcttttagagagttatcatcaaatagttcttttagagagttatcatcaaatagttaaattttccctagcctagagctagcaagaaacgtccttgagctggcggctgcttctccagattggacgagcgactagcctgcatatctggccttgagctaaccggaatcgcccctcgagctggtgcctgcttctacataccctgtcacgactcacgataaactttttcatggtattccttcctttcaaattaaaattcattttatgtttttaatggattcatacaatacttgatgtatatgttttatatatgtctagatttatatcatctatttgattatagacataaatactaagagctaaaacaaatactaatttgagacggagggagtattatttttattcactaattctagcttcacacactatagcaaaaacaatttggtaccttaccaaacagggcccctgctactctccctttcttcattactacagggaccagtatgtccctgtccaagagcaaaaaattatatggagtcaacatcgtttgtaagtataacaaagccattggaaacataaagtttggcataaaaacactttactaaactcgcatgtacaacgatgttatccaaaatctcccaaatatcggattatccaaaattgacggtgaagattgcattgagtgatgctttgccaaatgctacagaattgatatccatttaaccatttctagataaaattcatttagccaatggagtcaagacatccatgcgataatgctagtaaaaaatgcaacttttaggacttgtttgggagccatggaatgcagggttttagcccatccaatcaatttcattcccattgctcccaaactttgtttttctgtgagtactacctccgttatcgaatatttgccgtccgctagttcattttttaactaaaacacggcaaatgaaaaagaaaggagtgagcacaagtttacttacactgcacacggaaagatatatatatacaacgttacatgacacaaaataagggtgcatatgccaatgaatagagcgagcaagaaatcggaaacaaggaaataagaaaaacactatataactaaatatagaaatgaataaaaatatctaccgtagcttgcctacctgtccttcccaatacttgttttgcgatcaacattttcctaaacaagttgttagaagagttcttctgagttgaattttttccaggcttcctgtttgcatcagagacatgtaagcaaaggtctcacagaataaaaccattgcttataagtcgtgagatattttatgacactatgaatgtcaatcatgaaaaggttttcgtagtgtaaaaactaacaatgaattagaagcgcagcagcagcaatgagcttttgtagctgaaatgtaggaaaaactggctagaatgacattgagtagccataccttcagaaggtcaaataccttttctgcaatgtatttctgttgaagatttgcacccttctgctgcaccttatcaggatggatacacaatgttgctttcctgtattctttcttgacagatgctgctgtaatcagatcagtcaatgatacaggtcgccagccacattcaggccaaagaat

SEQ ID NO: 29968 - DNA, 633 bp, Zea Mays
tatgccttgacagatcatgttcttgttgattcctacttccccaacgacacagcatgggatcgcatggacaacattgttttgtcttggatccttggcaccgtctccatcaagttgcaggagcaccatggcacaacttgccaggcttggcatgctctagagaaccatttcattggtaatcgtgagacgcgtgctctccatcccgacaccaccttccgcaacttcgtccaaggcgatctcattgttggtgagtattgtcggaagatgaaaggcttcattgatgctctctcagacctcgacgccccggtcaccgaccgcatcctggtactcaatgtccttcgaggcctgagtcccaagtatgctaatctccagaccatcatcactcgttttgttcccttcccgacatttcacaaagttcgggatgatttggtcttggaagagattgtcgtagggactgctccacctgactctgcggccagcgccctgtacacctccactaaagctctgttggcttcctcatctgctcgtcctcctgtccagggaactcggccacctgcccagggaggtgcgtcgggttcaagtgctggttgtcccaacaagaatcgttgtcacgacaatggtcatggtggtggctct

SEQ ID NO: 29969 - DNA, 983 bp, Zea Mays
ctgtgctcgtgggctgaattccctaggcctcagcccatgtaacccgtgcgccagccaactgcgggcactgacgaacagtccccacgcgtcatatgcctctctccccacatccgcaccacgcgcaccatgtcatcgacgcgtagggcacgcgcgtcagccgttctccactctacacgccaagatcgttcgcaggctccgcaggcgctgtcatgtgggcctaggggatcgaagccatattcctcccggaccacgcgactgtggtggttggggattagttgaaccccgcaaatcatacggaggcgcccgggatttcacctgggtatataagcatgtcatgcgcccctctttcgattcaagttgagggaaccgaccgccgtgggatgtcgaggtgctctggtcgagagaagtggggggtcggagatgtgagcagagatccgccgtgcgctagaaccggtcacgccgtcgtcaaaccctcgggaatttctccccggaatcaagccgccaccgcagtaccgcgcgtggccatggtcagaattcagtgttgtgccgtagctggtcaaggacaggtaccacaggatgaggcgcatgaaggatgatatgatgagttcgtgagtggtctaggctgtcgtctcccagtcaactatggttgttggatcgttgtcttcgtatgatgtaattatttaactattttgtacatagcttcgttatatacaaatgatgtgacattcgtttatgtaccatgagtcatcatatgtgtgatacttgatcctagcacacttggtaaagttcgcgctcgggttttggaccccctaaaatccgggtgtaacaacttacgtataggaattgtttggaaccctagatgcatgaacttaggttccttttttagatggatactagtatgctaggtcgagtagttgcgctgctaaataaggatctctgtagaagtcgagtgatttttctagcactcgcgcgaggttaggaat

SEQ ID NO: 29970 - DNA, 3074 bp, Zea Mays
ctgtgctcgtgggctgaattccctaggcctcagcccatgtaacccgtgcgccagccaactgcgggcactgacgaacagtccccacgcgtcatatgcctctctccccacatccgcaccacgcgcaccatgtcatcgacgcgtagggcacgcgcgtcagccgttctccactctacacgccaagatcgttcgcaggctccgcaggcgctgtcatgtgggcctaggggatcgaagccatattcctcccggaccacgcgactgtggtggttggggattagttgaaccccgcaaatcatacggaggcgcccgggatttcacctgggtatataagcatgtcatgcgcccctctttcgattcaagttgagggaaccgaccgccgtgggatgtcgaggtgctctggtcgagagaagtggggggtcggagatgtgagcagagatccgccgtgcgctagaaccggtcacgccgtcgtcaaaccctcgggaatttctccccggaatcaagccgccaccgcagtaccgcgcgtggccatggtcagaattcagtgttgtgccgtagctggtgagtatccacccatctgtttcctcgtctccctcgtgttctttttcagttaactgtagtcggaggggattgccgatgcgacatagggagcctgctccggtgagttgtcgggtaaagtttgggcgacgccaccgtggtagtgaacgggtggccagagagtagaagacagcgccgtggtcgtagatcttggagtgtacgactgtgattagaacgcgggtaccgtttcgatctgctcattccgttccatccgatcgtaatcctgcgtctcaaattcaatatcaagtattttaaatcgtgcccgtcgatcggtgattcgagggctcgtattgcataccggttcaggaaggtttggatctaatctgatttgtagattggtgatccaatagccgggatatgaccataccccttcgcagtggccgttttcttaaaaagaccctcagttcctttgaaactaacccgcggtccacgcgagtacaaagaaccttgcaatccagtcctgtttttacgacttagcccatgatttcctgaaaatggtgtccccaatcctaggtgttgtgatattcataaaaattaaataaagaaattgattttaagtatgaaaatgatacactaaatttagttaaatcatatcttctctgtttgtactccgatttgatgagttcgaattgcgttggatcataccaatattgcctacacaatataacactaatttttaccatatcgcatacttttgtaactaggtactcatttatcctatgtatagcagattaatctatctaattaaaataatatgtttataattatagttcgaatagaaaatgatctttaactaatatatgacttatattatagttaatctttaaatgtatatctcacatgatttataaaaatcaatctaaggcctatgttagttatttaatcatggaaatattctgaaaaccatatcttttccactgtaactccgatttttggtggttctcgaacctacgatctcgatacgatgcgtagatcattaatatgcggtttgttcttatgtttggtgtgatgttaactttgtctataccatatttatttatattgctacgactagcagcgaggttacgagtcacttgaagaccaagttggtacctgggaatctcgagtctaaggcaagttgtgctcttgatcacttttctttacctaataatgttcctgttaatcactatgacatgatcaggttaatttgatgggacccaatagattttcctagcattatttatcccctaccttgcaaatagaagcactattgggtagttttgctattgttctacctggttttgggaaattaatgttatattatgattatgttctagttatattgttgttttaattattgttcatgacaagatcattgtgttaattggaacatggagcgaccacctgggaaaactagtgctaccacaagggtatgggacgcccttgtctgactaattagaaaagctagtagaagactaacttacccgaaagaggcaagggcggtagaggagcatgcgtatagggaggttctcgggtcgatcatgctgcgatggcttttcagacgagggattcctatattgttcttctcagaaaccgtagctggttttcggaagacagtggaactttgtaaaggcctcgtagtgttaccctgcctcgtctcctaggcaaagatgaatgggaagttgcgatctcttggcaaatgggtaacacgacttgtgggtaaagacgtgcaacctctacagagtgtaaaactggtatatcagtcgtgctcatggtcatgagcagctcggaccctcacatgagtaatttatgaaactaaatttaatttgttatatgcattgcattgtgggtgttattattaatcttgatctcttatttatatctatttatacttagtaactgctaataaatttttgaccaactataaaagcaatgctcatctttaaccatctcctttggtaagccttacacttcacatgagctcccacctttggtgagtttatgcacattgttccccacatcttgttgagcgatgaacatatgtgagctcacccttgctgtactcacatcccccaggtcaaggacaggtaccacaggatgaggcgcatgaaggatgatatgatgagttcgtgagtggtctaggctgtcgtctcccagtcaactatggttgttggatcgttgtcttcgtatgatgtaattatttaactattttgtacatagcttcgttatatacaaatgatgtgacattcgtttatgtaccatgagtcatcatatgtgtgatacttgatcctagcacacttggtaaagttcgcgctcgggttttggaccccctaaaatccgggtgtaacaacttacgtataggaattgtttggaaccctagatgcatgaacttaggttccttttttagatggatactagtatgctaggtcgagtagttgcgctgctaaataaggatctctgtagaagtcgagtgatttttctagcactcgcgcgaggttaggaat

SEQ ID NO: 29971 - DNA, 592 bp, Zea Mays
ctgtgctcgtgggctgaattccctaggcctcagcccatgtaacccgtgcgccagccaactgcgggcactgacgaacagtccccacgcgtcatatgcctctctccccacatccgcaccacgcgcaccatgtcatcgacgcgtagggcacgcgcgtcagccgttctccactctacacgccaagatcgttcgcaggctccgcaggcgctgtcatgtgggcctaggggatcgaagccatattcctcccggaccacgcgactgtggtggttggggattagttgaaccccgcaaatcatacggaggcgcccgggatttcacctgggtatataagcatgtcatgcgcccctctttcgattcaagttgagggaaccgaccgccgtgggatgtcgaggtgctctggtcgagagaagtggggggtcggagatgtgagcagagatccgccgtgcgctagaaccggtcacgccgtcgtcaaaccctcgggaatttctccccggaatcaagccgccaccgcagtaccgcgcgtggccatggtcagaattcagtgttgtgccgtagctgaaaacgaagaaaaagtggtagtcgaagaagaagctgc

SEQ ID NO: 29972 - DNA, 764 bp, Zea Mays
ctgtgctcgtgggctgaattccctaggcctcagcccatgtaacccgtgcgccagccaactgcgggcactgacgaacagtccccacgcgtcatatgcctctctccccacatccgcaccacgcgcaccatgtcatcgacgcgtagggcacgcgcgtcagccgttctccactctacacgccaagatcgttcgcaggctccgcaggcgctgtcatgtgggcctaggggatcgaagccatattcctcccggaccacgcgactgtggtggttggggattagttgaaccccgcaaatcatacggaggcgcccgggatttcacctgggtatataagcatgtcatgcgcccctctttcgattcaagttgagggaaccgaccgccgtgggatgtcgaggtgctctggtcgagagaagtggggggtcggagatgtgagcagagatccgccgtgcgctagaaccggtcacgccgtcgtcaaaccctcgggaatttctccccggaatcaagccgccaccgcagtaccgcgcgtggccatggtcagaattcagtgttgtgccgtagctggtgatgaaacagcgaagttttgctgtttctgctcgaaggtggtaccaaaggaagaggtaaatcagtgaacgtgttggtgggaggatgttttacctcccagttttgtaataataagttatgcactcataacacccggtactgtaataatactctcactatattttattaatgtaaattatgttattgtaatccgcttccgctatttcctt

SEQ ID NO: 29973 - DNA, 848 bp, Zea Mays
  misc_feature (1)..(1): n is a, c, g, or t
ntaggtgaggaagcgacaaatttttgttgcttttgctccaaggtggtaccaaatgaggaaaaacaagactgaagtgcgggaggactcggtcctccacataggatcttttgtttatagcttatcgggaggagtttgtgcctcccttggtttgtaaaatattactactctgcactcgcttttagttctggtctgtaataagtaacttgatcttacattctatataaatgtaagtttatgtaaaagcttccgcatttctttatctccgatgttctgtaatgtctgcaagacgggtgaaacgttcctggtaaggtaagaaagaagataccgaacttgtcgagtgattcaggaacatctacagggttgtctgatgtctgttggataaggacaactgtaggtgggcctaattacttgggaggttccgtcacagttcttgtgttgtgaacatagccaaaggtaactataacaccccagtgttacttagggtttttcccagtaccccatcttgtgaccattatcacatgtggctttaataaggcaagagacaccaaagcttcagggattaaaagcctaagttaagtatttttcaactcaagaaacatactctaaatacatcatgcacctcaagtgagaaaagcatccaaaacactaacactatccaatttggccatttaagcacaaaaagggaattagaaaaaagattttggaaaatacaaaatcttaatatggaccaattgacaaagttatagttcattaaataaactacaaagtgtagtaagcaagattgatcattgggattttgtaaaatttccaaaacagcccgttaagcaaaacctttataggaaattcag

SEQ ID NO: 29974 - DNA, 434 bp, Zea Mays
tcgcgggcgcttcaaccgaactctgggcaattcgccccagctggctaccgaccctccctagtatttaggtgttgcgtaccttgcggcgttcctaaaccctgagttccacgaacccttcatgccatcacaaccatcgccagtggggtgaaattgggagagagggagaagaggtcgccgccgcaccgattccttggatcaccgtcgtctggactaccagaaaggtgcgattggctagcgcggtggtgcgtagattgtctgtgagccaacctcttggcgcggggtcatcgggactccactaaattcgtcgccggaatatcctacgctactaccccgggcgggcggatgtggacaacccacctggacacccatatggctgatgagtcggctactgaggatccaggggttcagcaggtggagactgctgagcaggagct

SEQ ID NO: 29975 - DNA, 2592 bp, Zea Mays
gtgttttttaatcaatcgtccactgcctgctccctacgcagctacgctttactcccttcccctgcttcgtcctcgtttctcctcgaacccacccagcagcgccttcttccttcttcccgcccaacctcggccatgcccgtagcggcgctccgtcctcccccggtcgctgtcggcgcgggacgccgcagcgcccgactccaggcgcggttcgccctccgcgcgagctccctcgaggcgtcggcggcagtgacggtgacagtgaacgggtctgcagaggccgcggtggagaggaaggagaaggtgcaggaggataaggacaacgagggactgccggtgaaggaggagcaggagagggggctggaggtcctctacgacgacggcttcggctccgtgaccgtcaaggactacttcgcggcggccaaggtcctgtgccgggacgacggtgggccgccgcgctggttctctcccgtcgagtgcggccacccggccgtggaccaagcgccgctgctgctcttcttgccaggaatggatggcgtcggcacgggactcatcctgcaccacaagtctttgggcaaagtgttcgaggttcggtgcttgcatataccagtcaatgatcgtacaccatttgaaggactagtacaaatcgttgaaaatttgatcaagcacgagcatgatttatccccggacagaccgatatatcttgtcggagattcatttggcggatccctggcactggcagtggcagctcgtaatccgcagattgatttggttctcatactagtaaacccagctacatcatttgcaaagactccattgcagccagtattgcctctactggaatcagtgccaagcgagtttcatgctacagtgccgtatcttctcagttttgtcatgggtgacccactgaagatggctgcagttagcattgaaaacaacctatctcctccagaaactctgcagaaattgtcagacagtctcacatcaatgcttcctttgctttcagaactgtctgatattataccaagggatactcttctatggaagctcaaacttctcaaggcaggagcagcctatgcaaattctcgtctccatgccgtgcaagccgaggttctacttcttgccagtggtaaggacaatcttctaccaagcggagaagaagcggatcgactcttcaaggcactgaaaaactgcagagttcgatacttcaaggacaatggccatacactactgctggaggatggcgtcaacctgttaactgtcataaaaggagcgaacatgtatcggcgtggaaggcaaagggattctgtaaccgattatctcccgcctactctaagtgaattcaggcaaacatttgatgtggatcacaggctgttccaccttgcactgagcccagtcatgatgtccaccctgaaggatgggaaaatcgtccgcgggcttgccggtgtccctgacaaaggcccagtcttgttcgtgggctaccacgcgctcatgggcattgagctgagtcctctgtacgaggagttcctgagggagaagaggacagtcgtccgcggcatggcgcacccgttcctgtttgggaaaaagttcgagtcgtcgcgccaggagacgtcccgtttcgacactgtttctatgtacggtggactgccggtgaccccgatcaatatgtacaggttgttccagaggaaccaatttgttctgctctaccccggcggcgttcgggaagctctgcacaggaagggtgaagagtataagttgttctggccagatcagccagaattcgtaaggatggcggcgcgctttggtgtaactatcataccctttgggtgtgttggagaagacgacgttctcgagttggttctggactacaacgatcagaagaacattcccgggctccgggaatggatacagtcgatcaacaaagaagccgagagagtgagggacagcgtaaaaggagaggatgggaaccaggacatgtacctgccagctcttctcccaaaagtgcctggccgattctactacctgttcgggcagccgattgagatgaaagggatgggcaaccttgtcagagataggaagagcgcgaacgaggtgtatctacgcatcaaatcgcaggtggaggagatcatgtcgtatctcaagaggaagagggaggaagacccttacaggagcctaccgcagcgtgcactgtaccaggcaacatggggcgcctccgctcaggtccccacttttgagccatgaagattgggagtagggaagggcgtctgcgagcggactgcaattctttgacaagatgcaatgcgttctcatttctgaggagatctccctccctcatacgctgattacatatacggactacggactagtataccgcaaatattgtacatttttaggaaaaatatgaaatgatgtttttaaacaaaaaaaacgcactcagcacattatcttaaaacagatgcgttgagcacacaaaacgtcctcgcggacagtccgcggtccggacggtccacggtggtgacgcggacagtccgcgcgtgcgcagaatcaattagggtttcgagtttcttgcgggatttgttagctgaaaccacagga

SEQ ID NO: 29976 - DNA, 2033 bp, Zea Mays
cctgctccctacgcagctacgctttactcccttcccctgcttcgtcctcgtttctcctcgaacccacccagcagcgccttcttccttcttcccgcccaacctcggccatgcccgtagcggcgctccgtcctcccccggtcgctgtcggcgcgggacgccgcagcgcccgactccaggcgcggttcgccctccgcgcgagctccctcgaggcgtcggcggcagtgacggtgacagtgaacgggtctgcagaggccgcggtggagaggaaggagaaggtgcaggaggataaggacaacgagggactgccggtgaaggaggagcaggagagggggctggaggtcctctacgacgacggcttcggctccgtgaccgtcaaggactacttcgcggcggccaaggtcctgtgccgggacgacggtgggccgccgcgctggttctctcccgtcgagtgcggccacccggccgtggaccaagcgccgctgctgctcttcttgccaggaatggatggcgtcggcacgggactcatcctgcaccacaagtctttgggcaaagtgttcgaggttcggtgcttgcatataccagtcaatgatcgtacaccatttgaagcggatcgactcttcaaggcactgaaaaactgcagagttcgatacttcaaggacaatggccatacactactgctggaggatggcgtcaacctgttaactgtcataaaaggagcgaacatgtatcggcgtggaaggcaaagggattctgtaaccgattatctcccgcctactctaagtgaattcaggcaaacatttgatgtggatcacaggctgttccaccttgcactgagcccagtcatgatgtccaccctgaaggatgggaaaatcgtccgcgggcttgccggtgtccctgacaaaggcccagtcttgttcgtgggctaccacgcgctcatgggcattgagctgagtcctctgtacgaggagttcctgagggagaagaggacagtcgtccgcggcatggcgcacccgttcctgtttgggaaaaagttcgagtcgtcgcgccaggagacgtcccgtttcgacactgtttctatgtacggtggactgccggtgaccccgatcaatatgtacaggttgttccagaggaaccaatttgttctgctctaccccggcggcgttcgggaagctctgcacaggaagggtgaagagtataagttgttctggccagatcagccagaattcgtaaggatggcggcgcgctttggtgtaactatcataccctttgggtgtgttggagaagacgacgttctcgagttggttctggactacaacgatcagaagaacattcccgggctccgggaatggatacagtcgatcaacaaagaagccgagagagtgagcgtaaaaggagaggatgggaaccaggacatgtacctgccagctcttctcccaaaagtgcctggccgattctactacctgttcgggcagccgattgagatgaaagggatgggcaaccttgtcagagataggaagagcgcgaacgaggtgtatctacgcatcaaatcgcaggtggaggagatcatgtcgtatctcaagaggaagagggaggaagacccttacaggagcctaccgcagcgtgcactgtaccaggcaacatggggcgcctccgctcaggtccccacttttgagccatgaagattgggagtagggaagggcgtctgcgagcggactgcaattctttgacaagatgcaatgcgttctcatttctgaggagatctccctccctcatacgctgattacatatacggactacggactagtataccgcaaatattgtacatttttaggaaaaatatgaaatgatgtttttaaacaaaaaaaacgcactcagcacattatcttaaaacagatgcgttgagcacacaaaacgtcctcgcggacagtccgcggtccggacggtccacggtggtgacgcggacagtccgcgcgtgcgcagaatcaattagggtttcgagtttcttgcgggatttgttagctgaaaccacagga

SEQ ID NO: 29977 - DNA, 2588 bp, Zea Mays
ctccctacgcagctacgctttactcccttcccctgcttcgtcctcgtttctcctcgaacccacccagcagcgccttcttccttcttcccgcccaacctcggccatgcccgtagcggcgctccgtcctcccccggtcgctgtcggcgcgggacgccgcagcgcccgactccaggcgcggttcgccctccgcgcgagctccctcgaggcgtcggcggcagtgacggtgacagtgaacgggtctgcagaggccgcggtggagaggaaggagaaggtgcaggaggataaggacaacgagggactgccggtgaaggaggagcaggagagggggctggaggtcctctacgacgacggcttcggctccgtgaccgtcaaggactacttcgcggcggccaaggtcctgtgccgggacgacggtgggccgccgcgctggttctctcccgtcgagtgcggccacccggccgtggaccaagcgccgctgctgctcttcttgccaggaatggatggcgtcggcacgggactcatcctgcaccacaagtctttgggcaaagtgttcgaggttcggtgcttgcatataccagtcaatgatcgtacaccatttgaaggactagtacaaatcgttgaaaatttgatcaagcacgagcatgatttatccccggacagaccgatatatcttgtcggagattcatttggcggatccctggcactggcagtggcagctcgtaatccgcagattgatttggttctcatactagtaaacccagctacatcatttgcaaagactccattgcagccagtattgcctctactggaatcagtgccaagcgagtttcatgctacagtgccgtatcttctcagttttgtcatgggtgacccactgaagatggctgcagttagcattgaaaacaacctatctcctccagaaactctgcagaaattgtcagacagtctcacatcaatgcttcctttgctttcagaactgtctgatattataccaagggatactcttctatggaagctcaaacttctcaaggcaggagcagcctatgcaaattctcgtctccatgccgtgcaagccgaggttctacttcttgccagagcacagatcaataatgttacctgtattcagtggtaaggacaatcttctaccaagcggagaagaagcggatcgactcttcaaggcactgaaaaactgcagagttcgatacttcaaggacaatggccatacactactgctggaggatggcgtcaacctgttaactgtcataaaaggagcgaacatgtatcggcgtggaaggcaaagggattctgtaaccgattatctcccgcctactctaagtgaattcaggcaaacatttgatgtggatcacaggctgttccaccttgcactgagcccagtcatgatgtccaccctgaaggatgggaaaatcgtccgcgggcttgccggtgtccctgacaaaggcccagtcttgttcgtgggctaccacgcgctcatgggcattgagctgagtcctctgtacgaggagttcctgagggagaagaggacagtcgtccgcggcatggcgcacccgttcctgtttgggaaaaagttcgagtcgtcgcgccaggagacgtcccgtttcgacactgtttctatgtacggtggactgccggtgaccccgatcaatatgtacaggttgttccagaggaaccaatttgttctgctctaccccggcggcgttcgggaagctctgcacaggaagggtgaagagtataagttgttctggccagatcagccagaattcgtaaggatggcggcgcgctttggtgtaactatcataccctttgggtgtgttggagaagacgacgttctcgagttggttctggactacaacgatcagaagaacattcccgggctccgggaatggatacagtcgatcaacaaagaagccgagagagtgagcgtaaaaggagaggatgggaaccaggacatgtacctgccagctcttctcccaaaagtgcctggccgattctactacctgttcgggcagccgattgagatgaaagggatgggcaaccttgtcagagataggaagagcgcgaacgaggtgtatctacgcatcaaatcgcaggtggaggagatcatgtcgtatctcaagaggaagagggaggaagacccttacaggagcctaccgcagcgtgcactgtaccaggcaacatggggcgcctccgctcaggtccccacttttgagccatgaagattgggagtagggaagggcgtctgcgagcggactgcaattctttgacaagatgcaatgcgttctcatttctgaggagatctccctccctcatacgctgattacatatacggactacggactagtataccgcaaatattgtacatttttaggaaaaatatgaaatgatgtttttaaacaaaaaaaacgcactcagcacattatcttaaaacagatgcgttgagcacacaaaacgtcctcgcggacagtccgcggtccggacggtccacggtggtgacgcggacagtccgcgcgtgcgcagaatcaattagggtttcgagtttcttgcgggatttgttagctgaaaccacagga

SEQ ID NO: 29978 - DNA, 2447 bp, Zea Mays
ccttcccctgcttcgtcctcgtttctcctcgaacccacccagcagcgccttcttccttcttcccgcccaacctcggccatgcccgtagcggcgctccgtcctcccccggtcgctgtcggcgcgggacgccgcagcgcccgactccaggcgcggttcgccctccgcgcgagctccctcgaggcgtcggcggcagtgacggtgacagtgaacgggtctgcagaggccgcggtggagaggaaggagaaggtgcaggaggataaggacaacgagggactgccggtgaaggaggagcaggagagggggctggaggtcctctacgacgacggcttcggctccgtgaccgtcaaggactacttcgcggcggccaaggtcctgtgccgggacgacggtgggccgccgcgctggttctctcccgtcgagtgcggccacccggccgtggaccaagcgccgctgctgctcttcttgccaggaatggatggcgtcggcacgggactcatcctgcaccacaagtctttggagtgttcgaggttcggtgcttgcatataccagtcaatgatcgtacaccatttgaaggactagtacaaatcgttgaaaatttgatcaagcacgagcatgatttatccccggacagaccgatatatcttgtcggagattcatttggcggatccctggcactggcagtggcagctcgtaatccgcagattgatttggttctcatactagtaaacccagctacatcatttgcaaagactccattgcagccagtattgcctctactggaatcagtgccaagcgagtttcatgctacagtgccgtatcttctcagttttgtcatgggtgacccactgaagatggctgcagttagcattgaaaacaacctatctcctccagaaactctgcagaaattgtcagacagtctcacatcaatgcttcctttgctttcagaactgtctgatattataccaagggatactcttctatggaagctcaaacttctcaaggcaggagcagcctatgcaaattctcgtctccatgccgtgcaagccgaggttctacttcttgccagtggtaaggacaatcttctaccaagcggagaagaagcggatcgactcttcaaggcactgaaaaactgcagagttcgatacttcaaggacaatggccatacactactgctggaggatggcgtcaacctgttaactgtcataaaaggagcgaacatgtatcggcgtggaaggcaaagggattctgtaaccgattatctcccgcctactctaagtgaattcaggcaaacatttgatgtggatcacaggctgttccaccttgcactgagcccagtcatgatgtccaccctgaaggatgggaaaatcgtccgcgggcttgccggtgtccctgacaaaggcccagtcttgttcgtgggctaccacgcgctcatgggcattgagctgagtcctctgtacgaggagttcctgagggagaagaggacagtcgtccgcggcatggcgcacccgttcctgtttgggaaaaagttgttccagaggaaccaatttgttctgctctaccccggcggcgttcgggaagctctgcacaggaagggtgaagagtataagttgttctggccagatcagccagaattcgtaaggatggcggcgcgctttggtgtaactatcataccctttgggtgtgttggagaagacgacgttctcgagttggttctggactacaacgatcagaagaacattcccgggctccgggaatggatacagtcgatcaacaaagaagccgagagagtgagggacagcgtaaaaggagaggatgggaaccaggacatgtacctgccagctcttctcccaaaagtgcctggccgattctactacctgttcgggcagccgattgagatgaaagggatgggcaaccttgtcagagataggaagagcgcgaacgaggtgtatctacgcatcaaatcgcaggtggaggagatcatgtcgtatctcaagaggaagagggaggaagacccttacaggagcctaccgcagcgtgcactgtaccaggcaacatggggcgcctccgctcaggtccccacttttgagccatgaagattgggagtagggaagggcgtctgcgagcggactgcaattctttgacaagatgcaatgcgttctcatttctgaggagatctccctccctcatacgctgattacatatacggactacggactagtataccgcaaatattgtacatttttaggaaaaatatgaaatgatgtttttaaacaaaaaaaacgcactcagcacattatcttaaaacagatgcgttgagcacacaaaacgtcctcgcggacagtccgcggtccggacggtccacggtggtgacgcggacagtccgcgcgtgcgcagaatcaattagggtttcgagtttcttgcgggatttgttagctgaaaccacagga

SEQ ID NO: 29979 - DNA, 2086 bp, Zea Mays
gttatcctcggtgtcgttacccccaccatggccatcgtgctgctggcccttctcctcttcccgtccgcctatgcccaaccatggtcagtttgcggcaacacgggcaactacacggcggccagcacctaccaggacaacctcagccagctcgcggcaagccttcccaagaaagcctcttcgaacacgagtcccctcttcgccacgggtaccgcgggtgcagtgccggacctggtgtacgctcttgcactctgccgtggggacatcaacgcctccgcctgcaaggactgcgtcaccataggcttcgaggacgcgcagcagctctgcgcgttcaacaaggaagccaccgtgtactacgatagctgcctcgtcagcttctccaacgaagacttcctgtcgactaccgtcaacggcaacgagaacgaggtcaccgtcctcatggacgcccagaacttcacggagagcgcggactacatcaggctcctcttgttcactctgctgaacgacacgtccgagtccgcgatcaacagcatcaggaggttcacgaccgcgcggatggacattagctccctgccgacgatttactgcgctgtgcagtgcacgcctgacctcaccgccgacgagtgcgccgcctgtttgcaagacttcccgcaggtgacgctccagtacctcgacgggcagcgaggaggtcgacttctcggggtgcggtgtaacatgaggtacgagatctacaaattttaccaaggggaccccatgcttcgtattatctctttggcttcggcagtgccaacgatcggtaaaacccctcccggaacaccagtcacggtgtatccgcagcctccacctgcagcgccaccagcgccgcagatgataaccacgcctatcgcagcacaagaagagacaggacgcaaaggtaaactgtggattattggtatagctattccactggtagcaattctgctatgttcaacctttacctttctgtggctgaggaggccaaagaaaggagtgctgagttcgcaggacagagctggtgctaataggattgaagaaaacgccttggtttggacaattgaacagaagagttcagagtttactctttttgacctttctgagttactggaggccacaaaatcctttgcagaagaaaatagacttggacagggaggtttcggccctgtgtacaaggggcaattatcagatggtcaggaaattgcagttaaaaggcttgcttcgcattcaggacagggtttcacggagttcaggaatgaagttgaacttatagctaagctacaacacacaaatttggatatggaccctaaaatttcagattttgggttggcaagaatctgtagctccaatgatgctgaaggaaacacaaagagggtagtcggaacatatggctacatgtctccggagtatgcctctgaaggcatctactcggtcaaatctgatgtgttcagctttggtgttctacttcttgagatccttagcgcgaaaaggaattcaggttttcaccaatatggagactttcttaaccttctcggatatacatggcacctgtgggagataggaagatggcttgatcttgtagaagcatccatttcgaaagagatgcatgaagcagaggctaggcggtacattaacatcgcactaatgtgcgtccaagaaaatgcggacgatcggcccaccatgtccgacgtagttgctgcgctaaatagtgagagtgtggttctacctgagccaaagcatccggcttacttcaacctcagagtatctaaatctgtggaatcagcagttgttgttgaggcgtgcagtctgaatgagatgaccatcacccaagatccccaaggcagataggtcttccacctgatttcgtttcgctggtcattattgtacatgataatgtggacgtgaatggctatccttgttccagctttgaaactaatcattatggtcttcatagtgtcttattttaaggtgttgctttttcaatgccttagtctaagttattttagtatcctataaaatataaatacaaacaatatcaaacacattagtctcaaacatcaaaattatttagttaaat

SEQ ID NO: 29980 - DNA, 2054 bp, Zea Mays
gttatcctcggtgtcgttacccccaccatggccatcgtgctgctggcccttctcctcttcccgtccgcctatgcccaaccatggtcagtttgcggcaacacgggcaactacacggcggccagcacctaccaggacaacctcagccagctcgcggcaagccttcccaagaaagcctcttcgaacacgagtcccctcttcgccacgggtaccgcgggtgcagtgccggacctggtgtacgctcttgcactctgccgtggggacatcaacgcctccgcctgcaaggactgcgtcaccataggcttcgaggacgcgcagcagctctgcgcgttcaacaaggaagccaccgtgtactacgatagctgcctcgtcagcttctccaacgaagacttcctgtcgactaccgtcaacggcaacgagaacgaggtcaccgtcctcatggacgcccagaacttcacggagagcgcggactacatcaggctcctcttgttcactctgctgaacgacacgtccgagtccgcgatcaacagcatcaggaggttcacgaccgcgcggatggacattagctccctgccgacgatttactgcgctgtgcagtgcacgcctgacctcaccgccgacgagtgcgccgcctgtttgcaagacttcccgcaggtgacgctccagtacctcgacgggcagcgaggaggtcgacttctcggggtgcggtgtaacatgaggtacgagatctacaaattttaccaaggggaccccatgcttcgtattatctctttggcttcggcagtgccaacgatcggtaaaacccctcccggaacaccagtcacggtgtatccgcagcctccacctgcagcgccaccagcgccgcagatgataaccacgcctatcgcagcacaagaagagacaggacgcaaaggtttcgacggaacagttattctaccaaactaatgctagatttatgtacgcttacaattcaggagtgctgagttcgcaggacagagctggtgctaataggattgaagaaaacgccttggtttggacaattgaacagaagagttcagagtttactctttttgacctttctgagttactggaggccacaaaatcctttgcagaagaaaatagacttggacagggaggtttcggccctgtgtacaaggggcaattatcagatggtcaggaaattgcagttaaaaggcttgcttcgcattcaggacagggtttcacggagttcaggaatgaagttgaacttatagctaagctacaacacacaaatttggatatggaccctaaaatttcagattttgggttggcaagaatctgtagctccaatgatgctgaaggaaacacaaagagggtagtcggaacatatggctacatgtctccggagtatgcctctgaaggcatctactcggtcaaatctgatgtgttcagctttggtgttctacttcttgagatccttagcgcgaaaaggaattcaggttttcaccaatatggagactttcttaaccttctcggatatacatggcacctgtgggagataggaagatggcttgatcttgtagaagcatccatttcgaaagagatgcatgaagcagaggctaggcggtacattaacatcgcactaatgtgcgtccaagaaaatgcggacgatcggcccaccatgtccgacgtagttgctgcgctaaatagtgagagtgtggttctacctgagccaaagcatccggcttacttcaacctcagagtatctaaatctgtggaatcagcagttgttgttgaggcgtgcagtctgaatgagatgaccatcacccaagatccccaaggcagataggtcttccacctgatttcgtttcgctggtcattattgtacatgataatgtggacgtgaatggctatccttgttccagctttgaaactaatcattatggtcttcatagtgtcttattttaaggtgttgctttttcaatgccttagtctaagttattttagtatcctataaaatataaatacaaacaatatcaaacacattagtctcaaacatcaaaattatttagttaaat

SEQ ID NO: 29981 - DNA, 2109 bp, Zea Mays
gttatcctcggtgtcgttacccccaccatggccatcgtgctgctggcccttctcctcttcccgtccgcctatgcccaaccatggtcagtttgcggcaacacgggcaactacacggcggccagcacctaccaggacaacctcagccagctcgcggcaagccttcccaagaaagcctcttcgaacacgagtcccctcttcgccacgggtaccgcgggtgcagtgccggacctggtgtacgctcttgcactctgccgtggggacatcaacgcctccgcctgcaaggactgcgtcaccataggcttcgaggacgcgcagcagctctgcgcgttcaacaaggaagccaccgtgtactacgatagctgcctcgtcagcttctccaacgaagacttcctgtcgactaccgtcaacggcaacgagaacgaggtcaccgtcctcatggacgcccagaacttcacggagagcgcggactacatcaggctcctcttgttcactctgctgaacgacacgtccgagtccgcgatcaacagcatcaggaggttcacgaccgcgcggatggacattagctccctgccgacgatttactgcgctgtgcagtgcacgcctgacctcaccgccgacgagtgcgccgcctgtttgcaagacttcccgcaggtgacgctccagtacctcgacgggcagcgaggaggtcgacttctcggggtgcggtgtaacatgaggtacgagatctacaaattttaccaaggggaccccatgcttcgtattatctctttggcttcggcagtgccaacgatcggtaaaacccctcccggaacaccagtcacggtgtatccgcagcctccacctgcagcgccaccagcgccgcagatgataaccacgcctatcgcagcacaagaagagacaggacgcaaaggtaaactgtggattattggtatagctattccactggtagcaattctgctatgttcaacctttacctttctgtggctgaggaggccaaagaaagatttatgtacgcttacaattcaggagtgctgagttcgcaggacagagctggtgctaataggattgaagaaaacgccttggtttggacaattgaacagaagagttcagagtttactctttttgacctttctgagttactggaggccacaaaatcctttgcagaagaaaatagacttggacagggaggtttcggccctgtgtacaaggggcaattatcagatggtcaggaaattgcagttaaaaggcttgcttcgcattcaggacagggtttcacggagttcaggaatgaagttgaacttatagctaagctacaacacacaaatttggatatggaccctaaaatttcagattttgggttggcaagaatctgtagctccaatgatgctgaaggaaacacaaagagggtagtcggaacatatggctacatgtctccggagtatgcctctgaaggcatctactcggtcaaatctgatgtgttcagctttggtgttctacttcttgagatccttagcgcgaaaaggaattcaggttttcaccaatatggagactttcttaaccttctcggatatacatggcacctgtgggagataggaagatggcttgatcttgtagaagcatccatttcgaaagagatgcatgaagcagaggctaggcggtacattaacatcgcactaatgtgcgtccaagaaaatgcggacgatcggcccaccatgtccgacgtagttgctgcgctaaatagtgagagtgtggttctacctgagccaaagcatccggcttacttcaacctcagagtatctaaatctgtggaatcagcagttgttgttgaggcgtgcagtctgaatgagatgaccatcacccaagatccccaaggcagataggtcttccacctgatttcgtttcgctggtcattattgtacatgataatgtggacgtgaatggctatccttgttccagctttgaaactaatcattatggtcttcatagtgtcttattttaaggtgttgctttttcaatgccttagtctaagttattttagtatcctataaaatataaatacaaacaatatcaaacacattagtctcaaacatcaaaattatttagttaaat

SEQ ID NO: 29982 - DNA, 2420 bp, Zea Mays
gttatcctcggtgtcgttacccccaccatggccatcgtgctgctggcccttctcctcttcccgtccgcctatgcccaaccatggtcagtttgcggcaacacgggcaactacacggcggccagcacctaccaggacaacctcagccagctcgcggcaagccttcccaagaaagcctcttcgaacacgagtcccctcttcgccacgggtaccgcgggtgcagtgccggacctggtgtacgctcttgcactctgccgtggggacatcaacgcctccgcctgcaaggactgcgtcaccataggcttcgaggacgcgcagcagctctgcgcgttcaacaaggaagccaccgtgtactacgatagctgcctcgtcagcttctccaacgaagacttcctgtcgactaccgtcaacggcaacgagaacgaggtcaccgtcctcatggacgcccagaacttcacggagagcgcggactacatcaggctcctcttgttcactctgctgaacgacacgtccgagtccgcgatcaacagcatcaggaggttcacgaccgcgcggatggacattagctccctgccgacgatttactgcgctgtgcagtgcacgcctgacctcaccgccgacgagtgcgccgcctgtttgcaagacttcccgcaggtgacgctccagtacctcgacgggcagcgaggaggtcgacttctcggggtgcggtgtaacatgaggtacgagatctacaaattttaccaaggggaccccatgcttcgtattatctctttggcttcggcagtgccaacgatcggtaaaacccctcccggaacaccagtcacggtgtatccgcagcctccacctgcagcgccaccagcgccgcagatgataaccacgcctatcgcagcacaagaagagacaggacgcaaaggtaaactgtggattattggtatagctattccactggtagcaattctgctatgttcaacctttacctttctgtggctgaggaggccaaagaaaggagtgctgagttcgcaggacagagctggtgctaataggattgaagaaaacgccttggtttggacaattgaacagaagagttcagagtttactctttttgacctttctgagttactggaggccacaaaatcctttgcagaagaaaatagacttggacagggaggtttcggccctgtgtacaaggggcaattatcagatggtcaggaaattgcagttaaaaggcttgcttcgcattcaggacagggtttcacggagttcaggaatgaagttgaacttatagctaagctacaacacacaaatttggttaggctcttgggatgctgcattcaagccgaggaaaaaattttggtgtatgaatatttgccgaataaaagcctggacttctttatctttgatgaaagacaaagcagtttgcttaattggtataaacggcgtgccataattgaaggcgtagcgcaaggtctcctgtacctgcacaagcactctcggctgcgcgtggtacatagagaccttaaagctagtaacattctcttggaccaggatatggaccctaaaatttcagattttgggttggcaagaatctgtagctccaatgatgctgaaggaaacacaaagagggtagtcggaacatatggctacatgtctccggagtatgcctctgaaggcatctactcggtcaaatctgatgtgttcagctttggtgttctacttcttgagatccttagcgcgaaaaggaattcaggttttcaccaatatggagactttcttaaccttctcggatatgtaagtatatgttttctccgcaaaatgcacgcaagttgttatggcacaacagctgtacagatcatggaggcttgatgagctttctgctgttctgcagacatggcacctgtgggagataggaagatggcttgatcttgtagaagcatccatttcgaaagagatgcatgaagcagaggctaggcggtacattaacatcgcactaatgtgcgtccaagaaaatgcggacgatcggcccaccatgtccgacgtagttgctgcgctaaatagtgagagtgtggttctacctgagccaaagcatccggcttacttcaacctcagagtatctaaatctgtggaatcagcagttgttgttgaggcgtgcagtctgaatgagatgaccatcacccaagatccccaaggcagataggtcttccacctgatttcgtttcgctggtcattattgtacatgataatgtggacgtgaatggctatccttgttccagctttgaaactaatcattatggtcttcatagtgtcttattttaaggtgttgctttttcaatgccttagtctaagttattttagtatcctataaaatataaatacaaacaatatcaaacacattagtctcaaacatcaaaattatttagttaaat

SEQ ID NO: 29983 - DNA, 2084 bp, Zea Mays
gttatcctcggtgtcgttacccccaccatggccatcgtgctgctggcccttctcctcttcccgtccgcctatgcccaaccatggtcagtttgcggcaacacgggcaactacacggcggccagcacctaccaggacaacctcagccagctcgcggcaagccttcccaagaaagcctcttcgaacacgagtcccctcttcgccacgggtaccgcgggtgcagtgccggacctggtgtacgctcttgcactctgccgtggggacatcaacgcctccgcctgcaaggactgcgtcaccataggcttcgaggacgcgcagcagctctgcgcgttcaacaaggaagccaccgtgtactacgatagctgcctcgtcagcttctccaacgaagacttcctgtcgactaccgtcaacggcaacgagaacgaggtcaccgtcctcatggacgcccagaacttcacggagagcgcggactacatcaggctcctcttgttcactctgctgaacgacacgtccgagtccgcgatcaacagcatcaggaggttcacgaccgcgcggatggacattagctccctgccgacgatttactgcgctgtgcagtgcacgcctgacctcaccgccgacgagtgcgccgcctgtttgcaagacttcccgcaggtgacgctccagtacctcgacgggcagcgaggaggtcgacttctcggggtgcggtgtaacatgaggtacgagatctacaaattttaccaaggggaccccatgcttcgtattatctctttggcttcggcagtgccaacgatcggtaaaacccctcccggaacaccagtcacggtgtatccgcagcctccacctgcagcgccaccagcgccgcagatgataaccacgcctatcgcagcacaagaagagacaggggcaattatcagatggtcaggaaattgcagttaaaaggcttgcttcgcattcaggacagggtttcacggagttcaggaatgaagttgaacttatagctaagctacaacacacaaatttggttaggctcttgggatgctgcattcaagccgaggaaaaaattttggtgtatgaatatttgccgaataaaagcctggacttctttatctttgatgaaagacaaagcagtttgcttaattggtataaacggcgtgccataattgaaggcgtagcgcaaggtctcctgtacctgcacaagcactctcggctgcgcgtggtacatagagaccttaaagctagtaacattctcttggaccaggatatggaccctaaaatttcagattttgggttggcaagaatctgtagctccaatgatgctgaaggaaacacaaagagggtagtcggaacatatggctacatgtctccggagtatgcctctgaaggcatctactcggtcaaatctgatgtgttcagctttggtgttctacttcttgagatccttagcgcgaaaaggaattcaggttttcaccaatatggagactttcttaaccttctcggatatctgtacagatcatggaggcttgatgagctttctgctgttctgcagacatggcacctgtgggagataggaagatggcttgatcttgtagaagcatccatttcgaaagagatgcatgaagcagaggctaggcggtacattaacatcgcactaatgtgcgtccaagaaaatgcggacgatcggcccaccatgtccgacgtagttgctgcgctaaatagtgagagtgtggttctacctgagccaaagcatccggcttacttcaacctcagagtatctaaatctgtggaatcagcagttgttgttgaggcgtgcagtctgaatgagatgaccatcacccaagatccccaaggcagataggtcttccacctgatttcgtttcgctggtcattattgtacatgataatgtggacgtgaatggctatccttgttccagctttgaaactaatcattatggtcttcatagtgtcttattttaaggtgttgctttttcaatgccttagtctaagttattttagtatcctataaaatataaatacaaacaatatcaaacacattagtctcaaacatcaaaattatttagttaaat

SEQ ID NO: 29984 - DNA, 1901 bp, Zea Mays
gttatcctcggtgtcgttacccccaccatggccatcgtgctgctggcccttctcctcttcccgtccgcctatgcccaaccatggtcagtttgcggcaacacgggcaactacacggcggccagcacctaccaggacaacctcagccagctcgcggcaagccttcccaagaaagcctcttcgaacacgagtcccctcttcgccacgggtaccgcgggtgcagtgccggacctggtgtacgctcttgcactctgccgtggggacatcaacgcctccgcctgcaaggactgcgtcaccataggcttcgaggacgcgcagcagctctgcgcgttcaacaaggaagccaccgtgtactacgatagctgcctcgtcagcttctccaacgaagacttcctgtcgactaccgtcaacggcaacgagaacgaggtcaccgtcctcatggacgcccagaacttcacggagagcgcggactacatcaggctcctcttgttcactctgctgaacgacacgtccgagtccgcgatcaacagcatcaggaggttcacgaccgcgcggatggacattagctccctgccgacgatttactgcgctgtgcagtgcacgcctgacctcaccgccgacgagtgcgccgcctgtttgcaagacttcccgcaggtgacgctccagtacctcgacgggcagcgaggaggtcgacttctcggggtgcggtgtaacatgaggacgcaaaggtaaactgtggattattggtatagctattccactggtagcaattctgctatgttcaacctttacctttctgtggctgaggaggccaaagaaaggagtgctgagttcgcaggacagagctggtgctaataggattgaagaaaacgccttggtttggacaattgaacagaagagttcagagtttactctttttgacctttctgagttactggaggccacaaaatcctttgcagaagaaaatagacttggacagggaggtttcggccctgtgtacaaggggcaattatcagatggtcaggaaattgcagttaaaaggcttgcttcgcattcaggacagggtttcacggagttcaggaatgaagttgaacttatagctaagctacaacacacaaatttggatatggaccctaaaatttcagattttgggttggcaagaatctgtagctccaatgatgctgaaggaaacacaaagagggtagtcggaacatatggctacatgtctccggagtatgcctctgaaggcatctactcggtcaaatctgatgtgttcagctttggtgttctacttcttgagatccttagcgcgaaaaggaattcaggttttcaccaatatggagactttcttaaccttctcggatatacatggcacctgtgggagataggaagatggcttgatcttgtagaagcatccatttcgaaagagatgcatgaagcagaggctaggcggtacattaacatcgcactaatgtgcgtccaagaaaatgcggacgatcggcccaccatgtccgacgtagttgctgcgctaaatagtgagagtgtggttctacctgagccaaagcatccggcttacttcaacctcagagtatctaaatctgtggaatcagcagttgttgttgaggcgtgcagtctgaatgagatgaccatcacccaagatccccaaggcagataggtcttccacctgatttcgtttcgctggtcattattgtacatgataatgtggacgtgaatggctatccttgttccagctttgaaactaatcattatggtcttcatagtgtcttattttaaggtgttgctttttcaatgccttagtctaagttattttagtatcctataaaatataaatacaaacaatatcaaacacattagtctcaaacatcaaaattatttagttaaat

SEQ ID NO: 29985 - DNA, 4074 bp, Zea Mays
cgatatgcatctttcacgtacttaaacacacatcaagaggttccttaaatctttcatttggatagatcatctcatagggtcaggatgcgaaaggggatggtgaactagactaatataaaatttctcacaataatttaatcctactgaataaccaacttcacacttttgtccttaattgtgttctatccttgttacatatatttcacatcaaaggttccaatgatgttcaggcatgacaattctagtaatgtagatataatattttaactgcacaaaagaaaatgttcaaagtgtaggaagagttagaaatatagcatgtttttaggcatcaaagagtcgacactcctgactagttattgttggagcacccacgcaagggtgtgggccccacttaggcctagtttgtatactttagtattgaccccaatccacatgtattaaggtggattggggtgtaacttaaactaatttacaccccaatccgcctcaacacatgtggattgaggttaatactagagtaccccaaacaaagcattaatacgctcaaatatcaagtgctctctacatgtcgattattaaacactctagcatagtcaataaccaactaccatttacaccatgagttgggccacccacactctccatcgagtgatcaccaaactctcgatcgccaccaaactgtgtaggtgatgtcgatctcgaagagtaataagaacaaaatctcacttgacctgaacaaacctaatgagaatcataaatgcacacttgtcactctctatgcactaatgaggtccctagtctcgcgattatcaaagctcaaacacgtcactagacaaaggctctctctttctcttcaaagggtttcttgtactaaacaaatggatgacatggattggtatttatagccctcaggtaaaggactagcgattacccatcgactcaagagaatcgagggtatcgagtgtgttcagtgcaccacttcttcccacaccaaacacatctgatgagtctataatggctagtttccaaactagtcattaatatatgacacatccagtgaataccatactcatccagtgaaccatgctagtctcttgggttctccatctacaaatagatcgatttagtgatgagcccagtgcactactaggtacgttcgatgagtgcactgactccctagtcaaagtctttaacttgcaatgatgcatgtacgatgggagatctagtgcatcaccagatacattcaatgactccaaagcctccccaactacttagagttagcatagtaactctcgtatggtgcacaccagactcaacagtgtcgcattgaatgaaaccaatcgagataaggtgttatgcatgtcttgtgcatagacaacatatccaactctatctagttcaaacaatcttcaagttggctttgatctcaataatattttggcttccatagagcaagctagcactggattttagaagactcaactagatcaagctacccaatcatgcccctttatagtatggtaaaagggaaaagtaaggaatttaagtgtccctcactcaactccaaggacaattagaactagtcatccattaatctttatgctcatctttataaactagaattgaattccatcaatagggacatgagtagcacatatgcccaagaaataactagtaccatgacctaatttataatgtttttgcaaaacatatattaaccataatagtctagcgtattcattaatcattaaaacccaactaggacctagatgctttcaatctcccctttttggcaattgatgaaaacacaacctcaagtattttgtataatagtggaattgaggtttgcaaacatcatttgcatggacttgtgacaataagagcaaaaaggatatggcatgttcatacaaaccaagtccataacttctattgaaaagatatgtgttaagtgtgagtattttattaagaactcgtttgtcataagaattaatataggtgcaacaaataagcactgacaacatgatatatagaagacataaatcattatatatatatatatatatatatatatatatatatatatatatatatatatatatatatatatatgcaaggacatagtgtatcatacaatgcataaagataaacatgcatgaaaaatgtgtgtatcaactataaagatatcaaatccttctcggctctctcctctcccctttcatgccaagcacttaaacctaagagtcttgtggatggatggtagcaatcatgttaggaactaaggtatgtcgagctgttgaactggtctcaatgtctctcaatggctaatactataattgtcgcctttctagtaatagaggacggagaagacttactcatggttatctgctactatgggtctgatgacgtgatcgaggaaggtaatgtcttgatggtactagtcataggggttgtaggagttagaaatggtgaagactctcttttgacctaactcatgtggcttaagcgccctaaggagttagagcatcatagggtggggcaggacacttaatggtgagttgttgagatacacccatggcctctagtgccactccctatcttggtgaattggacgcaaaggtaaactgtggattattggtatagctattccactggtagcaattctgctatgttcaacctttacctttctgtggctgaggaggccaaagaaaggagtgctgagttcgcaggacagagctggtgctaataggattgaagaaaacgccttggtttggacaattgaacagaagagttcagagtttactctttttgacctttctgagttactggaggccacaaaatcctttgcagaagaaaatagacttggacagggaggtttcggccctgtgtacaaggggcaattatcagatggtcaggaaattgcagttaaaaggcttgcttcgcattcaggacagggtttcacggagttcaggaatgaagttgaacttatagctaagctacaacacacaaatttggttaggctcttgggatgctgcattcaagccgaggaaaaaattttggtgtatgaatatttgccgaataaaagcctggacttctttatctttgatgaaagacaaagcagtttgcttaattggtataaacggcgtgccataattgaaggcgtagcgcaaggtctcctgtacctgcacaagcactctcggctgcgcgtggtacatagagaccttaaagctagtaacattctcttggaccaggatatggaccctaaaatttcagattttgggttggcaagaatctgtagctccaatgatgctgaaggaaacacaaagagggtagtcggaacatatggctacatgtctccggagtatgcctctgaaggcatctactcggtcaaatctgatgtgttcagctttggtgttctacttcttgagatccttagcgcgaaaaggaattcaggttttcaccaatatggagactttcttaaccttctcggatatctgtacagatcatggaggcttgatgagctttctgctgttctgcagacatggcacctgtgggagataggaagatggcttgatcttgtagaagcatccatttcgaaagagatgcatgaagcagaggctaggcggtacattaacatcgcactaatgtgcgtccaagaaaatgcggacgatcggcccaccatgtccgacgtagttgctgcgctaaatagtgagagtgtggttctacctgagccaaagcatccggcttacttcaacctcagagtatctaaatctgtggaatcagcagttgttgttgaggcgtgcagtctgaatgagatgaccatcacccaagatccccaaggcagataggtcttccacctgatttcgtttcgctggtcattattgtacatgataatgtggacgtgaatggctatccttgttccagctttgaaactaatcattatggtcttcatagtgtcttattttaaggtgttgctttttcaatgccttagtctaagttattttagtatcctataaaatataaatacaaacaatatcaaacacattagtctcaaacatcaaaattatttagttaaat

SEQ ID NO: 29986 - DNA, 1902 bp, Zea Mays
agataaacatgcatgaaaaatgtgtgtatcaactataaagatatcaaatccttctcggctctctcctctcccctttcatgccaagcacttaaacctaagagtcttgtggatggatggtagcaatcatgttaggaactaaggtatgtcgagctgttgaactggtctcaatgtctctcaatggctaatactataattgtcgcctttctagtaatagaggacggagaagacttactcatggttatctgctactatgggtctgatgacgtgatcgaggaaggtaatgtcttgatggtactagtcataggggttgtaggagttagaaatggtgaagactctcttttgacctaactcatgtggcttaagcgccctaaggagttagagcatcatagggtggggcaggacacttaatggtgagttgttgagatacacccatggcctctagtgccactccctatcttggtgaattggacgcaaaggtttcgacggaacagttattctaccaaactaatgctagatttatgtacgcttacaattcaggagtgctgagttcgcaggacagagctggtgctaataggattgaagaaaacgccttggtttggacaattgaacagaagagttcagagtttactctttttgacctttctgagttactggaggccacaaaatcctttgcagaagaaaatagacttggacagggaggtttcggccctgtgtacaaggggcaattatcagatggtcaggaaattgcagttaaaaggcttgcttcgcattcaggacagggtttcacggagttcaggaatgaagttgaacttatagctaagctacaacacacaaatttggttaggctcttgggatgctgcattcaagccgaggaaaaaattttggtgtatgaatatttgccgaataaaagcctggacttctttatctttgatgaaagacaaagcagtttgcttaattggtataaacggcgtgccataattgaaggcgtagcgcaaggtctcctgtacctgcacaagcactctcggctgcgcgtggtacatagagaccttaaagctagtaacattctcttggaccaggatatggaccctaaaatttcagattttgggttggcaagaatctgtagctccaatgatgctgaaggaaacacaaagagggtagtcggaacatatggctacatgtctccggagtatgcctctgaaggcatctactcggtcaaatctgatgtgttcagctttggtgttctacttcttgagatccttagcgcgaaaaggaattcaggttttcaccaatatggagactttcttaaccttctcggatatctgtacagatcatggaggcttgatgagctttctgctgttctgcagacatggcacctgtgggagataggaagatggcttgatcttgtagaagcatccatttcgaaagagatgcatgaagcagaggctaggcggtacattaacatcgcactaatgtgcgtccaagaaaatgcggacgatcggcccaccatgtccgacgtagttgctgcgctaaatagtgagagtgtggttctacctgagccaaagcatccggcttacttcaacctcagagtatctaaatctgtggaatcagcagttgttgttgaggcgtgcagtctgaatgagatgaccatcacccaagatccccaaggcagataggtcttccacctgatttcgtttcgctggtcattattgtacatgataatgtggacgtgaatggctatccttgttccagctttgaaactaatcattatggtcttcatagtgtcttattttaaggtgttgctttttcaatgccttagtctaagttattttagtatcctataaaatataaatacaaacaatatcaaacacattagtctcaaacatcaaaattatttagttaaat

SEQ ID NO: 29987 - DNA, 1617 bp, Zea Mays
taaacatgcatgaaaaatgtgtgtatcaactataaagatatcaaatccttctcggctctctcctctcccctttcatgccaagcacttaaacctaagagtcttgtggatggatggtagcaatcatgttaggaactaaggtatgtcgagctgttgaactggtctcaatgtctctcaatggctaatactataattgtcgcctttctagtaatagaggacggagaagacttactcatggttatctgctactatgggtctgatgacgtgatcgaggaaggtaatgtcttgatggtactagtcataggggttgtaggagttagaaatggtgaagactctcttttgacctaactcatgtggcttaagcgccctaaggagttagagcatcatagggtggggcaggacacttaatggtgagttgttgagatacacccatggcctctagtgccactccctatcttggtgaattggacgcaaaggtttcgacggaacagttattctaccaaactaatgctagatttatgtacgcttacaattcaggagtgctgagttcgcaggacagagctggtgctaataggattgaagaaaacgccttggtttggacaattgaacagaagagttcagagtttactctttttgacctttctgagttactggaggccacaaaatcctttgcagaagaaaatagacttggacagggaggtttcggccctgtgtacaaggggcaattatcagatggtcaggaaattgcagttaaaaggcttgcttcgcattcaggacagggtttcacggagttcaggaatgaagttgaacttatagctaagctacaacacacaaatttggatatggaccctaaaatttcagattttgggttggcaagaatctgtagctccaatgatgctgaaggaaacacaaagagggtagtcggaacatatggctacatgtctccggagtatgcctctgaaggcatctactcggtcaaatctgatgtgttcagctttggtgttctacttcttgagatccttagcgcgaaaaggaattcaggttttcaccaatatggagactttcttaaccttctcggatatacatggcacctgtgggagataggaagatggcttgatcttgtagaagcatccatttcgaaagagatgcatgaagcagaggctaggcggtacattaacatcgcactaatgtgcgtccaagaaaatgcggacgatcggcccaccatgtccgacgtagttgctgcgctaaatagtgagagtgtggttctacctgagccaaagcatccggcttacttcaacctcagagtatctaaatctgtggaatcagcagttgttgttgaggcgtgcagtctgaatgagatgaccatcacccaagatccccaaggcagataggtcttccacctgatttcgtttcgctggtcattattgtacatgataatgtggacgtgaatggctatccttgttccagctttgaaactaatcattatggtcttcatagtgtcttattttaaggtgttgctttttcaatgccttagtctaagttattttagtatcctataaaatataaatacaaacaatatcaaacacattagtctcaaacatcaaaattatttagttaaat

SEQ ID NO: 29988 - DNA, 1625 bp, Zea Mays
atcaactataaagatatcaaatccttctcggctctctcctctcccctttcatgccaagcacttaaacctaagagtcttgtggatggatggtagcaatcatgttaggaactaaggtatgtcgagctgttgaactggtctcaatgtctctcaatggctaatactataattgtcgcctttctagtaatagaggacggagaagacttactcatggttatctgctactatgggtctgatgacgtgatcgaggaaggtaatgtcttgatggtactagtcataggggttgtaggagttagaaatggtgaagactctcttttgacctaactcatgtggcttaagcgccctaaggagttagagcatcatagggtggggcaggacacttaatggtgagttgttgagatacacccatggcctctagtgccactccctatcttggtgaattggacgcaaaggtaaactgtggattattggtatagctattccactggtagcaattctgctatgttcaacctttacctttctgtggctgaggaggccaaagaaaggagtgctgagttcgcaggacagagctggtgctaataggattgaagaaaacgccttggtttggacaattgaacagaagagttcagagtttactctttttgacctttctgagttactggaggccacaaaatcctttgcagaagaaaatagacttggacagggaggtttcggccctgtgtacaaggggcaattatcagatggtcaggaaattgcagttaaaaggcttgcttcgcattcaggacagggtttcacggagttcaggaatgaagttgaacttatagctaagctacaacacacaaatttggatatggaccctaaaatttcagattttgggttggcaagaatctgtagctccaatgatgctgaaggaaacacaaagagggtagtcggaacatatggctacatgtctccggagtatgcctctgaaggcatctactcggtcaaatctgatgtgttcagctttggtgttctacttcttgagatccttagcgcgaaaaggaattcaggttttcaccaatatggagactttcttaaccttctcggatatacatggcacctgtgggagataggaagatggcttgatcttgtagaagcatccatttcgaaagagatgcatgaagcagaggctaggcggtacattaacatcgcactaatgtgcgtccaagaaaatgcggacgatcggcccaccatgtccgacgtagttgctgcgctaaatagtgagagtgtggttctacctgagccaaagcatccggcttacttcaacctcagagtatctaaatctgtggaatcagcagttgttgttgaggcgtgcagtctgaatgagatgaccatcacccaagatccccaaggcagataggtcttccacctgatttcgtttcgctggtcattattgtacatgataatgtggacgtgaatggctatccttgttccagctttgaaactaatcattatggtcttcatagtgtcttattttaaggtgttgctttttcaatgccttagtctaagttattttagtatcctataaaatataaatacaaacaatatcaaacacattagtctcaaacatcaaaattatttagttaaat

SEQ ID NO: 29989 - DNA, 1648 bp, Zea Mays
atcaactataaagatatcaaatccttctcggctctctcctctcccctttcatgccaagcacttaaacctaagagtcttgtggatggatggtagcaatcatgttaggaactaaggtatgtcgagctgttgaactggtctcaatgtctctcaatggctaatactataattgtcgcctttctagtaatagaggacggagaagacttactcatggttatctgctactatgggtctgatgacgtgatcgaggaaggtaatgtcttgatggtactagtcataggggttgtaggagttagaaatggtgaagactctcttttgacctaactcatgtggcttaagcgccctaaggagttagagcatcatagggtggggcaggacacttaatggtgagttgttgagatacacccatggcctctagtgccactccctatcttggtgaattggacgcaaaggtaaactgtggattattggtatagctattccactggtagcaattctgctatgttcaacctttacctttctgtggctgaggaggccaaagaaagatttatgtacgcttacaattcaggagtgctgagttcgcaggacagagctggtgctaataggattgaagaaaacgccttggtttggacaattgaacagaagagttcagagtttactctttttgacctttctgagttactggaggccacaaaatcctttgcagaagaaaatagacttggacagggaggtttcggccctgtgtacaaggggcaattatcagatggtcaggaaattgcagttaaaaggcttgcttcgcattcaggacagggtttcacggagttcaggaatgaagttgaacttatagctaagctacaacacacaaatttggatatggaccctaaaatttcagattttgggttggcaagaatctgtagctccaatgatgctgaaggaaacacaaagagggtagtcggaacatatggctacatgtctccggagtatgcctctgaaggcatctactcggtcaaatctgatgtgttcagctttggtgttctacttcttgagatccttagcgcgaaaaggaattcaggttttcaccaatatggagactttcttaaccttctcggatatacatggcacctgtgggagataggaagatggcttgatcttgtagaagcatccatttcgaaagagatgcatgaagcagaggctaggcggtacattaacatcgcactaatgtgcgtccaagaaaatgcggacgatcggcccaccatgtccgacgtagttgctgcgctaaatagtgagagtgtggttctacctgagccaaagcatccggcttacttcaacctcagagtatctaaatctgtggaatcagcagttgttgttgaggcgtgcagtctgaatgagatgaccatcacccaagatccccaaggcagataggtcttccacctgatttcgtttcgctggtcattattgtacatgataatgtggacgtgaatggctatccttgttccagctttgaaactaatcattatggtcttcatagtgtcttattttaaggtgttgctttttcaatgccttagtctaagttattttagtatcctataaaatataaatacaaacaatatcaaacacattagtctcaaacatcaaaattatttagttaaat

SEQ ID NO: 29990 - DNA, 2966 bp, Zea Mays
cactattttatgttgttgagagactcatcgtacacaacttttagtagtagtatcctcttcataagtgcatgaaggatcctcactacaggtggaatgttcactacagctctatatgattgctcaacaaacaactagtgagatagagaggttacatgggttgtagggggtatcacttgttgtgtagtctattgggtgggtcagcgaaaccataataaacattatgtatccttgttagtgacactataaaatcagataactctgatgtccttggcatagatcctatagtggtacccttagaatatgaaccaaaaccacttgtagtcctagtcaatccaatggtgactgagagatcccacatgatagaggaacttaatgttcttatcatcaccgcattggcaattttcttaactagtctatgcaaatcctaactacaaaagcaagataatttaacatggttgtaagttaaaatgcattcaaagggacaacacaagctcatattttagtgaaattacttagatcaagaacattgagcttgttcctcaacttaaaaatgcatgcctcatctaaaggttttgttttagatatctataattgatctgttgtcctcactcctagtaaaatgtcaccttttgctacatgatctctaaggaactgatggtggatatctttgtgcatggtgcgagagtaatgaattgggttgttggcaagttttacgatgcattattatcacccaaaaggggtaacttttcaagaattacaccacaatctagaaggttttgcttcatgtaaagaatttatgcatgacaggtacccatcatgatgtactctatctcatcggtggacatggcaacactatttttcttggggaaattccctgtatgccatcggaaaatatacttattccttgtgtgccactggccccacatgtcatacacacaaaaaaattacgtatataccactcagtggcacacaaggatgagtataagatctgatggtgtacagggattttttccatttttcttctagatgtgagatgcccttgacactagtgatttaacaagcatatgacaccctttggtagtgcttttcctattaatcttgaaacccgtgtaatccaaattgaaatagccaacaagttggaaactagctcctttaggacaccaaaggcaatgtttggtatgggtttaaggcaccaaaagaatttattaactacaactaactgaacctctttaggatttgtttggaatctagcacatatacacacactaaacattatgttaggcatagatacagtcaaatataacaagctactaattataaaatggttgagagtttgatcaattaatttatctcctcatctaggtcgagattagcattgatgtcttgattggcttacattgatccatgcatattgaacctcttggaaagatccttgttatacattttttttagagatagatatttggaatcactgctgacttttcatttattatgcgtaggacgcaaaggtaaactgtggattattggtatagctattccactggtagcaattctgctatgttcaacctttacctttctgtggctgaggaggccaaagaaaggagtgctgagttcgcaggacagagctggtgctaataggattgaagaaaacgccttggtttggacaattgaacagaagagttcagagtttactctttttgacctttctgagttactggaggccacaaaatcctttgcagaagaaaatagacttggacagggaggtttcggccctgtgtacaaggggcaattatcagatggtcaggaaattgcagttaaaaggcttgcttcgcattcaggacagggtttcacggagttcaggaatgaagttgaacttatagctaagctacaacacacaaatttggttaggctcttgggatgctgcattcaagccgaggaaaaaattttggtgtatgaatatttgccgaataaaagcctggacttctttatctttgatgaaagacaaagcagtttgcttaattggtataaacggcgtgccataattgaaggcgtagcgcaaggtctcctgtacctgcacaagcactctcggctgcgcgtggtacatagagaccttaaagctagtaacattctcttggaccaggatatggaccctaaaatttcagattttgggttggcaagaatctgtagctccaatgatgctgaaggaaacacaaagagggtagtcggaacatatggctacatgtctccggagtatgcctctgaaggcatctactcggtcaaatctgatgtgttcagctttggtgttctacttcttgagatccttagcgcgaaaaggaattcaggttttcaccaatatggagactttcttaaccttctcggatatctgtacagatcatggaggcttgatgagctttctgctgttctgcagacatggcacctgtgggagataggaagatggcttgatcttgtagaagcatccatttcgaaagagatgcatgaagcagaggctaggcggtacattaacatcgcactaatgtgcgtccaagaaaatgcggacgatcggcccaccatgtccgacgtagttgctgcgctaaatagtgagagtgtggttctacctgagccaaagcatccggcttacttcaacctcagagtatctaaatctgtggaatcagcagttgttgttgaggcgtgcagtctgaatgagatgaccatcacccaagatccccaaggcagataggtcttccacctgatttcgtttcgctggtcattattgtacatgataatgtggacgtgaatggctatccttgttccagctttgaaactaatcattatggtcttcatagtgtcttattttaaggtgttgctttttcaatgccttagtctaagttattttagtatcctataaaatataaatacaaacaatatcaaacacattagtctcaaacatcaaaattatttagttaaat

SEQ ID NO: 29991 - DNA, 2573 bp, Zea Mays
tgcaaatcctaactacaaaagcaagataatttaacatggttgtaagttaaaatgcattcaaagggacaacacaagctcatattttagtgaaattacttagatcaagaacattgagcttgttcctcaacttaaaaatgcatgcctcatctaaaggttttgttttagatatctataattgatctgttgtcctcactcctagtaaaatgtcaccttttgctacatgatctctaaggaactgatggtggatatctttgtgcatggtgcgagagtaatgaattgggttgttggcaagttttacgatgcattattatcacccaaaaggggtaacttttcaagaattacaccacaatctagaaggttttgcttcatgtaaagaatttatgcatgacaggtacccatcatgatgtactctatctcatcggtggacatggcaacactatttttcttggggaaattccctgtatgccatcggaaaatatacttattccttgtgtgccactggccccacatgtcatacacacaaaaaaattacgtatataccactcagtggcacacaaggatgagtataagatctgatggtgtacagggattttttccatttttcttctagatgtgagatgcccttgacactagtgatttaacaagcatatgacaccctttggtagtgcttttcctattaatcttgaaacccgtgtaatccaaattgaaatagccaacaagttggaaactagctcctttaggacaccaaaggcaatgtttggtatgggtttaaggcaccaaaagaatttattaactacaactaactgaacctctttaggatttgtttggaatctagcacatatacacacactaaacattatgttaggcatagatacagtcaaatataacaagctactaattataaaatggttgagagtttgatcaattaatttatctcctcatctaggtcgagattagcattgatgtcttgattggcttacattgatccatgcatattgaacctcttggaaagatccttgttatacattttttttagagatagatatttggaatcactgctgacttttcatttattatgcgtaggacgcaaaggtaaactgtggattattggtatagctattccactggtagcaattctgctatgttcaacctttacctttctgtggctgaggaggccaaagaaagatttatgtacgcttacaattcaggagtgctgagttcgcaggacagagctggtgctaataggattgaagaaaacgccttggtttggacaattgaacagaagagttcagagtttactctttttgacctttctgagttactggaggccacaaaatcctttgcagaagaaaatagacttggacagggaggtttcggccctgtgtacaaggggcaattatcagatggtcaggaaattgcagttaaaaggcttgcttcgcattcaggacagggtttcacggagttcaggaatgaagttgaacttatagctaagctacaacacacaaatttggttaggctcttgggatgctgcattcaagccgaggaaaaaattttggtgtatgaatatttgccgaataaaagcctggacttctttatctttgatgaaagacaaagcagtttgcttaattggtataaacggcgtgccataattgaaggcgtagcgcaaggtctcctgtacctgcacaagcactctcggctgcgcgtggtacatagagaccttaaagctagtaacattctcttggaccaggatatggaccctaaaatttcagattttgggttggcaagaatctgtagctccaatgatgctgaaggaaacacaaagagggtagtcggaacatatggctacatgtctccggagtatgcctctgaaggcatctactcggtcaaatctgatgtgttcagctttggtgttctacttcttgagatccttagcgcgaaaaggaattcaggttttcaccaatatggagactttcttaaccttctcggatatctgtacagatcatggaggcttgatgagctttctgctgttctgcagacatggcacctgtgggagataggaagatggcttgatcttgtagaagcatccatttcgaaagagatgcatgaagcagaggctaggcggtacattaacatcgcactaatgtgcgtccaagaaaatgcggacgatcggcccaccatgtccgacgtagttgctgcgctaaatagtgagagtgtggttctacctgagccaaagcatccggcttacttcaacctcagagtatctaaatctgtggaatcagcagttgttgttgaggcgtgcagtctgaatgagatgaccatcacccaagatccccaaggcagataggtcttccacctgatttcgtttcgctggtcattattgtacatgataatgtggacgtgaatggctatccttgttccagctttgaaactaatcattatggtcttcatagtgtcttattttaaggtgttgctttttcaatgccttagtctaagttattttagtatcctataaaatataaatacaaacaatatcaaacacattagtctcaaacatcaaaattatttagttaaat

SEQ ID NO: 29992 - DNA, 2236 bp, Zea Mays
tgcaaatcctaactacaaaagcaagataatttaacatggttgtaagttaaaatgcattcaaagggacaacacaagctcatattttagtgaaattacttagatcaagaacattgagcttgttcctcaacttaaaaatgcatgcctcatctaaaggttttgttttagatatctataattgatctgttgtcctcactcctagtaaaatgtcaccttttgctacatgatctctaaggaactgatggtggatatctttgtgcatggtgcgagagtaatgaattgggttgttggcaagttttacgatgcattattatcacccaaaaggggtaacttttcaagaattacaccacaatctagaaggttttgcttcatgtaaagaatttatgcatgacaggtacccatcatgatgtactctatctcatcggtggacatggcaacactatttttcttggggaaattccctgtatgccatcggaaaatatacttattccttgtgtgccactggccccacatgtcatacacacaaaaaaattacgtatataccactcagtggcacacaaggatgagtataagatctgatggtgtacagggattttttccatttttcttctagatgtgagatgcccttgacactagtgatttaacaagcatatgacaccctttggtagtgcttttcctattaatcttgaaacccgtgtaatccaaattgaaatagccaacaagttggaaactagctcctttaggacaccaaaggcaatgtttggtatgggtttaaggcaccaaaagaatttattaactacaactaactgaacctctttaggatttgtttggaatctagcacatatacacacactaaacattatgttaggcatagatacagtcaaatataacaagctactaattataaaatggttgagagtttgatcaattaatttatctcctcatctaggtcgagattagcattgatgtcttgattggcttacattgatccatgcatattgaacctcttggaaagatccttgttatacattttttttagagatagatatttggaatcactgctgacttttcatttattatgcgtaggacgcaaaggtttcgacggaacagttattctaccaaactaatgctagatttatgtacgcttacaattcaggagtgctgagttcgcaggacagagctggtgctaataggattgaagaaaacgccttggtttggacaattgaacagaagagttcagagtttactctttttgacctttctgagttactggaggccacaaaatcctttgcagaagaaaatagacttggacagggaggtttcggccctgtgtacaaggggcaattatcagatggtcaggaaattgcagttaaaaggcttgcttcgcattcaggacagggtttcacggagttcaggaatgaagttgaacttatagctaagctacaacacacaaatttggatatggaccctaaaatttcagattttgggttggcaagaatctgtagctccaatgatgctgaaggaaacacaaagagggtagtcggaacatatggctacatgtctccggagtatgcctctgaaggcatctactcggtcaaatctgatgtgttcagctttggtgttctacttcttgagatccttagcgcgaaaaggaattcaggttttcaccaatatggagactttcttaaccttctcggatatacatggcacctgtgggagataggaagatggcttgatcttgtagaagcatccatttcgaaagagatgcatgaagcagaggctaggcggtacattaacatcgcactaatgtgcgtccaagaaaatgcggacgatcggcccaccatgtccgacgtagttgctgcgctaaatagtgagagtgtggttctacctgagccaaagcatccggcttacttcaacctcagagtatctaaatctgtggaatcagcagttgttgttgaggcgtgcagtctgaatgagatgaccatcacccaagatccccaaggcagataggtcttccacctgatttcgtttcgctggtcattattgtacatgataatgtggacgtgaatggctatccttgttccagctttgaaactaatcattatggtcttcatagtgtcttattttaaggtgttgctttttcaatgccttagtctaagttattttagtatcctataaaatataaatacaaacaatatcaaacacattagtctcaaacatcaaaattatttagttaaat

SEQ ID NO: 29993 - DNA, 1755 bp, Zea Mays
ccggtggcttctcattcattgttgattgattgatcctccccgcctcactcctttgtctcctcgcctcgtgctcgctcgctcccctcgccctggcgaggagggcagcagaaaccctagcggctcaggccgggcgggggttagatgctccaaggttcgagagggaagggtaggttagtggtgcgccatcgactatgggctgcgtcttcggccgggcggctgcgtcgtcctctgcagcgccgaagaagaagtggggcaaggggaggtcgtccccgcagcccgaagcggggtcgccctccgcagtcgccgccaccgacggggacgggaggccgcggcggcggctcgggggccgcagggcgtcgggacccaggcagggttgcgtccccgctgctgccgcggcggagcagctcgccgccggttggccaccgtggctcgtcgcagtcgccggggaggccctccgcggctgggcgccgcgccgcgccgacacgttcgagaagcttaataaggtggaacagttgcacaagattttcaagctatgtggttccccttctgaggagtactggaagaagtctaaattgccacacgcaacaatattcaaacctcaacaaccctataaacgttgcatcagggagacatttaaagattttcctacatcggctctgccattggttgaaactctgcttgcaattgatccagctgagcgacaaactgcctcagctgcattacacagtgattttttttcaaccgagccttatgcttgtaacccttcaagtctgccaacatatccaccaagcaaggagatggatgccaagttaagagacgaggaggctagaagactacgagcggctgcaaaggccaagggagaacagaaaaggactcgaccacgtgatcgatctcggagggctggaccagcaccagaagctaatgcagagattcaagcaaacttagacaggcgacgaatgataactcatgcaaatgcaaagagtaaaagtgagaagtttcctcctccgcatcaggatggaggtacgggtaatccgcttggatcctatcatcatatggagcctatgttcgagcaccaggatgcttccttcagtacagtagtccccatagagaaggggacctcacaaacatggtccgggccgttgtttgatccagcagctctcgggcagtcgaggcggaagaagcaaactaccctagatgctaaggctgctgcttactcaaagcagctccaaaaggaaaagggagggatacgagcccgataacaaaatgtcgttttcctggtgagcatgtggagggaccgtgggaaaggttcatcgcctacggatgaattttcttgttttgttcctctggtggttggaaacaggcaacaatgcgctgctgtagggtgaagtcttccggattgtgtacatgtcatgtggtagcgtttccaagtactgtttagatgcttctgaacaagctgccgtcacccggacgggactttaggggtttgagactcgtatttgtgctctttatggcaattcagttgcccatgtgtatatatggagcaattctttcttgtgtatgtacagagacggcggtagctttgatttcttaataatgaatcaagtgtgatggcgaccttcctcacgtaacagtggtccagtaattgttggttgttaaacttgctgcggtggattgcttcgccttgtgattctcaacaagaaggcaatgttctttcagttttcttgtctgtaggtgctaccgtaaacaataaacagg

SEQ ID NO: 29994 - DNA, 1990 bp, Zea Mays
ccggtggcttctcattcattgttgattgattgatcctccccgcctcactcctttgtctcctcgcctcgtgctcgctcgctcccctcgccctggcgaggagggcagcagaaaccctagcggctcaggccgggcgggggttagatgctccaaggttcgagagggaagggtaggttagtggtgcgccatcgactatgggctgcgtcttcggccgggcggctgcgtcgtcctctgcagcgccgaagaagaagtggggcaaggggaggtcgtccccgcagcccgaagcggggtcgccctccgcagtcgccgccaccgacggggacgggaggccgcggcggcggctcgggggccgcagggcgtcgggacccaggcagggttgcgtccccgctgctgccgcggcggagcagctcgccgccggttggccaccgtggctcgtcgcagtcgccggggaggccctccgcggctgggcgccgcgccgcgccgacacgttcgagaagcttaataagataaaatgttacatacagcagctgttgtcagggcttgagcattgtcatgacaataatgtattgcaccgggatatcaaggggtcaaacttgttgttggataataatgggattcttaagattgcggattttgggctggcaacattctttgatccacgacataaacgaccaatgacgagccgagtggtcacgctatgagctcctgtatggaaagcccataatgcctgggcgcactgaggtggaacagttgcacaagattttcaagctatgtggttccccttctgaggagtactggaagaagtctaaattgccacacgcaacaatattcaaacctcaacaaccctataaacgttgcatcagggagacatttaaagattttcctacatcggctctgccattggttgaaactctgcttgcaattgatccagctgagcgacaaactgcctcagctgcattacacagtgattttttttcaaccgagccttatgcttgtaacccttcaagtctgccaacatatccaccaagcaaggagatggatgccaagttaagagacgaggaggctagaagactacgagcggctgcaaaggccaagggagaacagaaaaggactcgaccacgtgatcgatctcggagggctggaccagcaccagaagctaatgcagagattcaagcaaacttagacaggcgacgaatgataactcatgcaaatgcaaagagtaaaagtgagaagtttcctcctccgcatcaggatggaggtacgggtaatccgcttggatcctatcatcatatggagcctatgttcgagcaccaggatgcttccttcagtacagtagtccccatagagaaggggacctcacaaacatggtccgggccgttgtttgatccagcagctctcgggcagtcgaggcggaagaagcaaactaccctagatgctaaggctgctgcttactcaaagcagctccaaaaggaaaagggagggatacgagcccgataacaaaatgtcgttttcctggtgagcatgtggagggaccgtgggaaaggttcatcgcctacggatgaattttcttgttttgttcctctggtggttggaaacaggcaacaatgcgctgctgtagggtgaagtcttccggattgtgtacatgtcatgtggtagcgtttccaagtactgtttagatgcttctgaacaagctgccgtcacccggacgggactttaggggtttgagactcgtatttgtgctctttatggcaattcagttgcccatgtgtatatatggagcaattctttcttgtgtatgtacagagacggcggtagctttgatttcttaataatgaatcaagtgtgatggcgaccttcctcacgtaacagtggtccagtaattgttggttgttaaacttgctgcggtggattgcttcgccttgtgattctcaacaagaaggcaatgttctttcagttttcttgtctgtaggtgctaccgtaaacaataaacagg

SEQ ID NO: 29995 - DNA, 2357 bp, Zea Mays
ccggtggcttctcattcattgttgattgattgatcctccccgcctcactcctttgtctcctcgcctcgtgctcgctcgctcccctcgccctggcgaggagggcagcagaaaccctagcggctcaggccgggcgggggttagatgctccaaggttcgagagggaagggtaggttagtggtgcgccatcgactatgggctgcgtcttcggccgggcggctgcgtcgtcctctgcagcgccgaagaagaagtggggcaaggggaggtcgtccccgcagcccgaagcggggtcgccctccgcagtcgccgccaccgacggggacgggaggccgcggcggcggctcgggggccgcagggcgtcgggacccaggcagggttgcgtccccgctgctgccgcggcggagcagctcgccgccggttggccaccgtggctcgtcgcagtcgccggggaggccctccgcggctgggcgccgcgccgcgccgacacgttcgagaagcttaataaggatcgggcacgtacagcaacgtgtaccgggcgagggacaccgtctctggccggatcgtcgctcttaaaaaggtccgcttcgataacctcgagccagaaagcgtcaagtttatggcccgggaaatactgatcctaaggagactcgaccaccccaacatcatcaaattagagggcttggtcacctccaggatgtcatgcagcctttaccttgtcttcgagtacatggagcatgatcttgctggtcttgcggcaagttgtgatgtcaagttcacgttgcctcagataaaatgttacatacagcagctgttgtcagggcttgagcattgtcatgacaataatgtattgcaccgggatatcaaggggtcaaacttgttgttggataataatgggattcttaagattgcggattttgggctggcaacattctttgatccacgacataaacgaccaatgacgagccgagtggtcacgctatggtaccgtccaccagaattgttacttggtgccactgagtatagtgtaggtgttgatttgtggagtgctggatgcattcttgcagagctcctgtatggaaagcccataatgcctgggcgcactgaggtggaacagttgcacaagattttcaagctatgtggttccccttctgaggagtactggaagaagtctaaattgccacacgcaacaatattcaaacctcaacaaccctataaacgttgcatcagggagacatttaaagattttcctacatcggctctgccattggttgaaactctgcttgcaattgatccagctgagcgacaaactgcctcagctgcattacacagtgattttttttcaaccgagccttatgcttgtaacccttcaagtctgccaacatatccaccaagcaaggagatggatgccaagttaagagacgaggaggctagaagactacgagcggctgcaaaggccaagggagaacagaaaaggactcgaccacgtgatcgatctcggagggctggaccagcaccagaagctaatgcagagattcaagcaaacttagaccagaggcgacgaatgataactcatgcaaatgcaaagagtaaaagtgagaagtttcctcctccgcatcaggatggaggtacgggtaatccgcttggatcctatcatcatatggagcctatgttcgagcaccaggatgcttccttcagtacagtagtccccatagagaaggggacctcacaaacatggtccgggccgttgtttgatccagcagctctcgggcagtcgaggcggaagaagcaaactaccctagatgctaaggctgctgcttactcaaagcagctccaaaaggaaaagggagggatacgagcccgataacaaaatgtcgttttcctggtgagcatgtggagggaccgtgggaaaggttcatcgcctacggatgaattttcttgttttgttcctctggtggttggaaacaggcaacaatgcgctgctgtagggtgaagtcttccggattgtgtacatgtcatgtggtagcgtttccaagtactgtttagatgcttctgaacaagctgccgtcacccggacgggactttaggggtttgagactcgtatttgtgctctttatggcaattcagttgcccatgtgtatatatggagcaattctttcttgtgtatgtacagagacggcggtagctttgatttcttaataatgaatcaagtgtgatggcgaccttcctcacgtaacagtggtccagtaattgttggttgttaaacttgctgcggtggattgcttcgccttgtgattctcaacaagaaggcaatgttctttcagttttcttgtctgtaggtgctaccgtaaacaataaacagg

SEQ ID NO: 29996 - DNA, 2271 bp, Zea Mays
ccggtggcttctcattcattgttgattgattgatcctccccgcctcactcctttgtctcctcgcctcgtgctcgctcgctcccctcgccctggcgaggagggcagcagaaaccctagcggctcaggccgggcgggggttagatgctccaaggttcgagagggaagggtaggttagtggtgcgccatcgactatgggctgcgtcttcggccgggcggctgcgtcgtcctctgcagcgccgaagaagaagtggggcaaggggaggtcgtccccgcagcccgaagcggggtcgccctccgcagtcgccgccaccgacggggacgggaggccgcggcggcggctcgggggccgcagggcgtcgggacccaggcagggttgcgtccccgctgctgccgcggcggagcagctcgccgccggttggccaccgtggctcgtcgcagtcgccggggaggccctccgcggctgggcgccgcgccgcgccgacacgttcgagaagcttaataaggatcgggcacgtacagcaacgtgtaccgggcgagggacaccgtctctggccggatcgtcgctcttaaaaaggtccgcttcgataacctcgagccagaaagcgtcaagtttatggcccgggaaatactgatcctaaggagactcgaccaccccaacatcatcaaattagagggcttggtcacctccaggatgtcatgcagcctttaccttgtcttcgagtacatggagcatgatcttgctggtcttgcggcaagttgtgatgtcaagttcacgttgcctcagataaaatgttacatacagcagctgttgtcagggcttgagcattgtcatgacaataatgtattgcaccgggatatcaaggggtcaaacttgttgttggataataatgggattcttaagattgcggattttgggctggcaacattctttgatccacgacataaacgaccaatgacgagccgagtggtcacgctatgagctcctgtatggaaagcccataatgcctgggcgcactgaggtggaacagttgcacaagattttcaagctatgtggttccccttctgaggagtactggaagaagtctaaattgccacacgcaacaatattcaaacctcaacaaccctataaacgttgcatcagggagacatttaaagattttcctacatcggctctgccattggttgaaactctgcttgcaattgatccagctgagcgacaaactgcctcagctgcattacacagtgattttttttcaaccgagccttatgcttgtaacccttcaagtctgccaacatatccaccaagcaaggagatggatgccaagttaagagacgaggaggctagaagactacgagcggctgcaaaggccaagggagaacagaaaaggactcgaccacgtgatcgatctcggagggctggaccagcaccagaagctaatgcagagattcaagcaaacttagacaggcgacgaatgataactcatgcaaatgcaaagagtaaaagtgagaagtttcctcctccgcatcaggatggaggtacgggtaatccgcttggatcctatcatcatatggagcctatgttcgagcaccaggatgcttccttcagtacagtagtccccatagagaaggggacctcacaaacatggtccgggccgttgtttgatccagcagctctcgggcagtcgaggcggaagaagcaaactaccctagatgctaaggctgctgcttactcaaagcagctccaaaaggaaaagggagggatacgagcccgataacaaaatgtcgttttcctggtgagcatgtggagggaccgtgggaaaggttcatcgcctacggatgaattttcttgttttgttcctctggtggttggaaacaggcaacaatgcgctgctgtagggtgaagtcttccggattgtgtacatgtcatgtggtagcgtttccaagtactgtttagatgcttctgaacaagctgccgtcacccggacgggactttaggggtttgagactcgtatttgtgctctttatggcaattcagttgcccatgtgtatatatggagcaattctttcttgtgtatgtacagagacggcggtagctttgatttcttaataatgaatcaagtgtgatggcgaccttcctcacgtaacagtggtccagtaattgttggttgttaaacttgctgcggtggattgcttcgccttgtgattctcaacaagaaggcaatgttctttcagttttcttgtctgtaggtgctaccgtaaacaataaacagg

SEQ ID NO: 29997 - DNA, 2323 bp, Zea Mays
ccggtggcttctcattcattgttgattgattgatcctccccgcctcactcctttgtctcctcgcctcgtgctcgctcgctcccctcgccctggcgaggagggcagcagaaaccctagcggctcaggccgggcgggggttagatgctccaaggttcgagagggaagggtaggttagtggtgcgccatcgactatgggctgcgtcttcggccgggcggctgcgtcgtcctctgcagcgccgaagaagaagtggggcaaggggaggtcgtccccgcagcccgaagcggggtcgccctccgcagtcgccgccaccgacggggacgggaggccgcggcggcggctcgggggccgcagggcgtcgggacccaggcagggttgcgtccccgctgctgccgcggcggagcagctcgccgccggttggccaccgtggctcgtcgcagtcgccggggaggccctccgcggctgggcgccgcgccgcgccgacacgttcgagaagcttaataagataggatcgggcacgtacagcaacgtgtaccgggcgagggacaccgtctctggccggatcgtcgctcttaaaaaggtccgcttcgataacctcgagccagaaagcgtcaagtttatggcccgggaaatactgatcctaaggagactcgaccaccccaacatcatcaaattagagggcttggtcacctccaggatgtcatgcagcctttaccttgtcttcgagtacatggagcatgatcttgctggtcttgcggcaagttgtgatgtcaagttcacgttgcctcagataaaatgttacatacagcagctgttgtcagggcttgagcattgtcatgacaataatgtattgcaccgggatatcaaggggtcaaacttgttgttggataataatgggattcttaagattgcggattttgggctggcaacattctttgatccacgacataaacgaccaatgacgagccgagtggtcacgctatggtaccgtccaccagaattgttacttggtgccactgagtatagtgtaggtgttgatttgtggagtgctggatgcattcttgcagagctcctgtatggaaagcccataatgcctgggcgcactgaggtggaacagttgcacaagattttcaagctatgtggttccccttctgaggagtactggaagaagtctaaattgccacacgcaacaatattcaaacctcaacaaccctataaacgttgcatcagggagacatttaaagattttcctacatcggctctgccattggttgaaactctgcttgcaattgatccagctgagcgacaaactgcctcagctgcattacacagtgattctgccaacatatccaccaagcaaggagatggatgccaagttaagagacgaggaggctagaagactacgagcggctgcaaaggccaagggagaacagaaaaggactcgaccacgtgatcgatctcggagggctggaccagcaccagaagctaatgcagagattcaagcaaacttagaccagaggcgacgaatgataactcatgcaaatgcaaagagtaaaagtgagaagtttcctcctccgcatcaggatggaggtacgggtaatccgcttggatcctatcatcatatggagcctatgttcgagcaccaggatgcttccttcagtacagtagtccccatagagaaggggacctcacaaacatggtccgggccgttgtttgatccagcagctctcgggcagtcgaggcggaagaagcaaactaccctagatgctaaggctgctgcttactcaaagcagctccaaaaggaaaagggagggatacgagcccgataacaaaatgtcgttttcctggtgagcatgtggagggaccgtgggaaaggttcatcgcctacggatgaattttcttgttttgttcctctggtggttggaaacaggcaacaatgcgctgctgtagggtgaagtcttccggattgtgtacatgtcatgtggtagcgtttccaagtactgtttagatgcttctgaacaagctgccgtcacccggacgggactttaggggtttgagactcgtatttgtgctctttatggcaattcagttgcccatgtgtatatatggagcaattctttcttgtgtatgtacagagacggcggtagctttgatttcttaataatgaatcaagtgtgatggcgaccttcctcacgtaacagtggtccagtaattgttggttgttaaacttgctgcggtggattgcttcgccttgtgattctcaacaagaaggcaatgttctttcagttttcttgtctgtaggtgctaccgtaaacaataaacagg

SEQ ID NO: 29998 - DNA, 2275 bp, Zea Mays
ccggtggcttctcattcattgttgattgattgatcctccccgcctcactcctttgtctcctcgcctcgtgctcgctcgctcccctcgccctggcgaggagggcagcagaaaccctagcggctcaggccgggcgggggttagatgctccaaggttcgagagggaagggtaggttagtggtgcgccatcgactatgggctgcgtcttcggccgggcggctgcgtcgtcctctgcagcgccgaagaagaagtggggcaaggggaggtcgtccccgcagcccgaagcggggtcgccctccgcagtcgccgccaccgacggggacgggaggccgcggcggcggctcgggggccgcagggcgtcgggacccaggcagggttgcgtccccgctgctgccgcggcggagcagctcgccgccggttggccaccgtggctcgtcgcagtcgccggggaggccctccgcggctgggcgccgcgccgcgccgacacgttcgagaagcttaataagataggatcgggcacgtacagcaacgtgtaccgggcgagggacaccgtctctggccggatcgtcgctcttaaaaaggtccgcttcgataacctcgagccagaaagcgtcaagtttatggcccgggaaatactgatcctaaggagactcgaccaccccaacatcatcaaattagagggcttggtcacctccaggatgtcatgcagcctttaccttgtcttcgagtacatggagcatgatcttgctggtcttgcggcaagttgtgatgtcaagttcacgttgcctcagataaaatgttacatacagcagctgttgtcagggcttgagcattgtcatgacaataatgtattgcaccgggatatcaaggggtcaaacttgttgttggataataatgggattcttaagattgcggattttgggctggcaacattctttgatccacgacataaacgaccaatgacgagccgagtggtcacgctatgagctcctgtatggaaagcccataatgcctgggcgcactgaggtggaacagttgcacaagattttcaagctatgtggttccccttctgaggagtactggaagaagtctaaattgccacacgcaacaatattcaaacctcaacaaccctataaacgttgcatcagggagacatttaaagattttcctacatcggctctgccattggttgaaactctgcttgcaattgatccagctgagcgacaaactgcctcagctgcattacacagtgattttttttcaaccgagccttatgcttgtaacccttcaagtctgccaacatatccaccaagcaaggagatggatgccaagttaagagacgaggaggctagaagactacgagcggctgcaaaggccaagggagaacagaaaaggactcgaccacgtgatcgatctcggagggctggaccagcaccagaagctaatgcagagattcaagcaaacttagacaggcgacgaatgataactcatgcaaatgcaaagagtaaaagtgagaagtttcctcctccgcatcaggatggaggtacgggtaatccgcttggatcctatcatcatatggagcctatgttcgagcaccaggatgcttccttcagtacagtagtccccatagagaaggggacctcacaaacatggtccgggccgttgtttgatccagcagctctcgggcagtcgaggcggaagaagcaaactaccctagatgctaaggctgctgcttactcaaagcagctccaaaaggaaaagggagggatacgagcccgataacaaaatgtcgttttcctggtgagcatgtggagggaccgtgggaaaggttcatcgcctacggatgaattttcttgttttgttcctctggtggttggaaacaggcaacaatgcgctgctgtagggtgaagtcttccggattgtgtacatgtcatgtggtagcgtttccaagtactgtttagatgcttctgaacaagctgccgtcacccggacgggactttaggggtttgagactcgtatttgtgctctttatggcaattcagttgcccatgtgtatatatggagcaattctttcttgtgtatgtacagagacggcggtagctttgatttcttaataatgaatcaagtgtgatggcgaccttcctcacgtaacagtggtccagtaattgttggttgttaaacttgctgcggtggattgcttcgccttgtgattctcaacaagaaggcaatgttctttcagttttcttgtctgtaggtgctaccgtaaacaataaacagg

SEQ ID NO: 29999 - DNA, 1758 bp, Zea Mays
ccggtggcttctcattcattgttgattgattgatcctccccgcctcactcctttgtctcctcgcctcgtgctcgctcgctcccctcgccctggcgaggagggcagcagaaaccctagcggctcaggccgggcgggggttagatgctccaaggttcgagagggaagggtaggttagtggtgcgccatcgactatgggctgcgtcttcggccgggcggctgcgtcgtcctctgcagcgccgaagaagaagtggggcaaggggaggtcgtccccgcagcccgaagcggggtcgccctccgcagtcgccgccaccgacggggacgggaggccgcggcggcggctcgggggccgcagggcgtcgggacccaggcagggttgcgtccccgctgctgccgcggcggagcagctcgccgccggttggccaccgtggctcgtcgcagtcgccggggaggccctccgcggctgggcgccgcgccgcgccgacacgttcgagaagcttaataaggtggaacagttgcacaagattttcaagctatgtggttccccttctgaggagtactggaagaagtctaaattgccacacgcaacaatattcaaacctcaacaaccctataaacgttgcatcagggagacatttaaagattttcctacatcggctctgccattggttgaaactctgcttgcaattgatccagctgagcgacaaactgcctcagctgcattacacagtgattttttttcaaccgagccttatgcttgtaacccttcaagtctgccaacatatccaccaagcaaggagatggatgccaagttaagagacgaggaggctagaagactacgagcggctgcaaaggccaagggagaacagaaaaggactcgaccacgtgatcgatctcggagggctggaccagcaccagaagctaatgcagagattcaagcaaacttagaccagaggcgacgaatgataactcatgcaaatgcaaagagtaaaagtgagaagtttcctcctccgcatcaggatggaggtacgggtaatccgcttggatcctatcatcatatggagcctatgttcgagcaccaggatgcttccttcagtacagtagtccccatagagaaggggacctcacaaacatggtccgggccgttgtttgatccagcagctctcgggcagtcgaggcggaagaagcaaactaccctagatgctaaggctgctgcttactcaaagcagctccaaaaggaaaagggagggatacgagcccgataacaaaatgtcgttttcctggtgagcatgtggagggaccgtgggaaaggttcatcgcctacggatgaattttcttgttttgttcctctggtggttggaaacaggcaacaatgcgctgctgtagggtgaagtcttccggattgtgtacatgtcatgtggtagcgtttccaagtactgtttagatgcttctgaacaagctgccgtcacccggacgggactttaggggtttgagactcgtatttgtgctctttatggcaattcagttgcccatgtgtatatatggagcaattctttcttgtgtatgtacagagacggcggtagctttgatttcttaataatgaatcaagtgtgatggcgaccttcctcacgtaacagtggtccagtaattgttggttgttaaacttgctgcggtggattgcttcgccttgtgattctcaacaagaaggcaatgttctttcagttttcttgtctgtaggtgctaccgtaaacaataaacagg

SEQ ID NO: 30000 - DNA, 4329 bp, Zea Mays
gccaaaactgcaaaccacacaatattctcatacaagcgcccttgccccctgttcgctttcactcttgaaatcccctccgcctctcggtcaatccaccgcgtccaagcttcattcctccgcactcgaaatccaaagcgccccgccccgacccgaaccctaatcctgcatttcctttcccgccaccgcccgccccaatggcgaagccggtgaagtatgacgacgaggaggagatctcctcctcctccgccgaggaggacgatgaccagtccgccgccgccgcctccggatctggtgaggaaggggatgacgatgaggaggatgctgcggcgctgcccacggaggaggaggaagctgagggcgaggggcagcaagaggaggaggtcgacgaggaagagatcgaagccgtcactaccggcgctggagctgaggacggagaggacgccagtgccgctaccgccgctgaaggcgaagaggagtcccagtccaccgaggacgacgaatccgtcgcaagggacaaggacaacggcgacgagactgatgcagtggttgggaagcgtgagaaaacaaggctaaaagaactccagaagatgaagaagcagaaaatccaggaaatactggatactcaaaacgctgccattgatgctgacatgaacaataaagggaagggacggttgaaataccttcttcagcagacagaaatatttgctcactttgcaaaaggaagtcagtcgaatgagaaaaagcctcgtgggaggggacgtcatgcatcaaagatgactgaagaagaggaagacgaagaatacctcaaagaggaagaagatgcccttgctggtgcagggggtacacgtttagtttcacagccttcatgcatcaagggaaagatgcgtgattaccagttggctggacttaattggcttatacgattgtatgagaatggtatcaatgggatattagctgatgagatgggtcttgggaaaacacttcaaactatttcattgctgggctatctgcatgagttcagaggtatagctggtcctcacatggttgttgcgccaaagtccactcttggcaactggatgaaggaaatccaacgtttttgccctatcttacgtgccgtgaagtttttggggaacccagaagagcggaaccatataagggacaatttgctgcaacctgggaaatttgatgtgtgtgtgactagttttgaaatggcaatcaaagaaaaatctgcgttgaggcgcttcagctggcgctacataatcattgatgaagctcaccggataaaaaatgaaaattctcttctatcaaagactatgaggatttacaacactaattatcgtctcctcatcacaggcactccactccagaataatctccatgagctctgggctctcctcaatttcttgctacctgaaatatttagctctgcggagacctttgatgaatggtttcaaatatctggggaaaatgatcaacaggaggtggtgcagcagcttcataaggttcttcgcccattccttcttaggaggctcaagtctgatgtagaaaagggcctacctccaaagaaagaaacaattcttaaagttggaatgtctcagatgcaaaagcagtactatcgtgctctgcttcagaaggatttggaggttattaatgctggtggtgaacgcaagcgattgcttaacattgccatgcagttgcgcaagtgctgcaaccatccatatttattccaaggagctgaacctgggccaccctacacaactggtgaacatctaattgagaatgcaggaaaaatggttctacttgataaattgctgcccaagctaaaggagcgtgattccagagtccttattttttcacagatgaccaggcttttggatatcttggaagattatcttatgtataggggatatcagtattgtcgaattgatggaaatacaggtggagaagatcgtgatgcatccattgaagccttcaatagtccaggaagtgagaagtttgttttcttactttcaactagggcaggtggccttggtatcaacttggccactgctgatgttgtggttctctatgacagcgattggaatccccaagctgatctgcaagctcaggaccgtgcacatagaataggtcaaaagaaagaagttcaagtgttccgcttttgcactgagtacactattgaggaaaaggtgattgagagagcatataagaagctagcattggatgctttggttattcagcaaggacgattggcagagcagaaaactgtcaataaggatgatcttctgcaaatggtgcggtttggtgctgaaatggttttcagttctaaggacagcacaataactgatgaggacattgaccgtattatagctaaaggagaggagacaacagcagaacttgatgcgaaaatgaaaaagttcactgaggatgccatcaaatttaagatggatgataatgctgaattgtatgacttcgatgatgagaaggttgatttcaagaaacttgttagtgataactggattgagccacctagaagagaaaggaagagaaactactctgagtctgactactttaagcaagcacttcgccaaggtgcaccagcaaagcctagggaaccaaggattccaagaatgccgcacttacatgatttccagtttttcaataaccaaaggctaaatgaattgtatgaaaaggaagtgcggtaccttatgcaagcgaaccagaagaaagataccattgatggtgaagacgaagatcagttggagcctttgacagcagaggagcaggaagagaaggaacaattattagaggagggttttgcgtcatggacaaggagagacttcaacacatttattcgtgcatgtgagaaatatggtcgcaatgatattaaaagtatatcatctgaaatggagggtaagacagaagaggaagttcaacgttatgctagagttttcaaggagagatacaaggaactgagtgattatgatagaattataaaaaatattgaaaggggggaagcaaggatatcccgcaaggatgagattatgaaggctattgggaagaagctagaccgctacaagaacccatggttagagttgaaaattcagtacggccaaaataaagggaagttctataacgaggaatgtgaccgctttatgctttgcatggtgcacaaacttggatatggaaactgggatgaactgaaagctgccttccgtatgtctcccttgtttcgatttgattggtttgtgaagtccagaactacccaagagttggctaggcggtgtgatacccttatccgactggttgagaaagaaaatcaagaatatgatgagcaagagaggcaagcaaggaaggagaaaaggcttgctaagaacatgactccaacaaagcgagctgcactaaagaattcagagggtgagaatactccaccgagttcattcaagagacgacggcagtcccttatggacgactatgtgggctcgggaaagcgtaagagaggctgaccacgtttggcatcctcccttagacatgccgtctctacaatgattttaataccctgccgcgcagtagtgcttagttcctcttgcacgtgagtcgaatacctcaagggcatgtgactagcgtaatttatgcaatgatgacataggttagttattaatcctaaatgaagcatgtatgcgcatgctgtgttagtgtcgtagatctggactttgcaattgcaactgttgctgcccagctgacacagatccctttcgctgcaatgcggtcctgcattttgccgccactgattttgcacccaaggctaaacccaacgcggcagtagtaactgttgcactcaggatccacgtacacaaaaatgagttgaggcataacgtcccaactcggctggtggtatatgttaacagccaatcatgtttaagctattactctgatcgttaaggtggatccgctaaggccttcggttatttctgatccatgtggattggaatgtattgggcggaatcgagacggatttgacttgctatagatttaaatcgactcaatcccactcaatccacatggaagaagtacctttgcatcgatttgtcattggaatatatacaaggtctaggggtgtaattaacgtaaccgtccaagcatttggctaaagtatacactctttaaatgcataattaactgtctattctatctctaatcttaggacttgaagtgtcttgtagatgagatcattatgtatttttgagtagacatcatttcgcaatactcctcatctaatctttcttaagattgacacgttgttaattccttgaaaaactcaatagaaaaaat

SEQ ID NO: 30001 - DNA, 4150 bp, Zea Mays
gccaaaactgcaaaccacacaatattctcatacaagcgcccttgccccctgttcgctttcactcttgaaatcccctccgcctctcggtcaatccaccgcgtccaagcttcattcctccgcactcgaaatccaaagcgccccgccccgacccgaaccctaatcctgcatttcctttcccgccaccgcccgccccaatggcgaagccggtgaagtatgacgacgaggaggagatctcctcctcctccgccgaggaggacgatgaccagtccgccgccgccgcctccggatctggtgaggaaggggatgacgatgaggaggatgctgcggcgctgcccacggaggaggaggaagctgagggcgaggggcagcaagaggaggaggtcgacgaggaagagatcgaagccgtcactaccggcgctggagctgaggacggagaggacgccagtgccgctaccgccgctgaaggcgaagaggagtcccagtccaccgaggacgacgaatccgtcgcaagggacaaggacaacggcgacgagactgatgcagtggttgggaagcgtgagaaaacaaggctaaaagaactccagaagatgaagaagcagaaaatccaggaaatactggatactcaaaacgctgccattgatgctgacatgaacaataaagggaagggacggttgaaataccttcttcagcagacagaaatatttgctcactttgcaaaaggaagtcagtcgaatgagaaaaagcctcgtgggaggggacgtcatgcatcaaagatgactgaagaagaggaagacgaagaatacctcaaagaggaagaagatgcccttgctggtgcagggggtacacgtttagtttcacagccttcatgcatcaagggaaagatgcgtgattaccagttggctggacttaattggcttatacgattgtatgagaatggtatcaatgggatattagctgatgagatgggtcttgggaaaacacttcaaactatttcattgctgggctatctgcatgagttcagaggtatagctggtcctcacatggttgttgcgccaaagtccactcttggcaactggatgaaggaaatccaacgtttttgccctatcttacgtgccgtgaagtttttggggaacccagaagagcggaaccatataagggacaatttgctgcaacctgggaaatttgatgtgtgtgtgactagttttgaaatggcaatcaaagaaaaatctgcgttgaggcgcttcagctggcgctacataatcattgatgaagctcaccggataaaaaatgaaaattctcttctatcaaagactatgaggatttacaacactaattatcgtctcctcatcacaggcactccactccagaataatctccatgagctctgggctctcctcaatttcttgctacctgaaatatttagctctgcggagacctttgatgaatggtttcaaatatctggggaaaatgatcaacaggaggtggtgcagcagcttcataaggttcttcgcccattccttcttaggaggctcaagtctgatgtagaaaagggcctacctccaaagaaagaaacaattcttaaagttggaatgtctcagatgcaaaagcagtactatcgtgctctgcttcagaaggatttggaggttattaatgctggtggtgaacgcaagcgattgcttaacattgccatgcagttgcgcaagtgctgcaaccatccatatttattccaaggagctgaacctgggccaccctacacaactggtgaacatctaattgagaatgcaggaaaaatggttctacttgataaattgctgcccaagctaaaggagcgtgattccagagtccttattttttcacagatgaccaggcttttggatatcttggaagattatcttatgtataggggatatcagtattgtcgaattgatggaaatacaggtggagaagatcgtgatgcatccattgaagccttcaatagtccaggaagtgagaagtttgttttcttactttcaactagggcaggtggccttggtatcaacttggccactgctgatgttgtggttctctatgacagcgattggaatccccaagctgatctgcaagctcaggaccgtgcacatagaataggtcaaaagaaagaagttcaagtgttccgcttttgcactgagtacactattgaggaaaaggtgattgagagagcatataagaagctagcattggatgctttggttattcagcaaggacgattggcagagcagaaaactgtcaataaggatgatcttctgcaaatggtgcggtttggtgctgaaatggttttcagttctaaggacagcacaataactgatgaggacattgaccgtattatagctaaaggagaggagacaacagcagaacttgatgcgaaaatgaaaaagttcactgaggatgccatcaaatttaagatggatgataatgctgaattgtatgacttcgatgatgagaaggatgaaaacaaggttgatttcaagaaacttgttagtgataactggattgagccacctagaagagaaaggaagagaaacaagcgaaccagaagaaagataccattgatggtgaagacgaagatcagttggagcctttgacagcagaggagcaggaagagaaggaacaattattagaggagggttttgcgtcatggacaaggagagacttcaacacatttattcgtgcatgtgagaaatatggtcgcaatgatattaaaagtatatcatctgaaatggagggtaagacagaagaggaagttcaacgttatgctagagttttcaaggagagatacaaggaactgagtggggggaagcaaggatatcccgcaaggatgagattatgaaggctattgggaagaagctagaccgctacaagaacccatggttagagttgaaaattcagtacggccaaaataaagggaagttctataacgaggaatgtgaccgctttatgctttgcatggtgcacaaacttggatatggaaactgggatgaactgaaagctgccttccgtatgtctcccttgtttcgatttgattggtttgtgaagtccagaactacccaagagttggctaggcggtgtgatacccttatccgactggttgagaaagaaaatcaagaatatgatgagcaagagaggcaagcaaggaaggagaaaaggcttgctaagaacatgactccaacaaagcgagctgcactaaagaattcagagggtgagaatactccaccgagttcattcaagagacgacggcagtcccttatggacgactatgtgggctcgggaaagcgtaagagaggctgaccacgtttggcatcctcccttagacatgccgtctctacaatgattttaataccctgccgcgcagtagtgcttagttcctcttgcacgtgagtcgaatacctcaagggcatgtgactagcgtaatttatgcaatgatgacataggttagttattaatcctaaatgaagcatgtatgcgcatgctgtgttagtgtcgtagatctggactttgcaattgcaactgttgctgcccagctgacacagatccctttcgctgcaatgcggtcctgcattttgccgccactgattttgcacccaaggctaaacccaacgcggcagtagtaactgttgcactcaggatccacgtacacaaaaatgagttgaggcataacgtcccaactcggctggtggtatatgttaacagccaatcatgtttaagctattactctgatcgttaaggtggatccgctaaggccttcggttatttctgatccatgtggattggaatgtattgggcggaatcgagacggatttgacttgctatagatttaaatcgactcaatcccactcaatccacatggaagaagtacctttgcatcgatttgtcattggaatatatacaaggtctaggggtgtaattaacgtaaccgtccaagcatttggctaaagtatacactctttaaatgcataattaactgtctattctatctctaatcttaggacttgaagtgtcttgtagatgagatcattatgtatttttgagtagacatcatttcgcaatactcctcatctaatctttcttaagattgacacgttgttaattccttgaaaaactcaatagaaaaaat

SEQ ID NO: 30002 - DNA, 4245 bp, Zea Mays
gccaaaactgcaaaccacacaatattctcatacaagcgcccttgccccctgttcgctttcactcttgaaatcccctccgcctctcggtcaatccaccgcgtccaagcttcattcctccgcactcgaaatccaaagcgccccgccccgacccgaaccctaatcctgcatttcctttcccgccaccgcccgccccaatggcgaagccggtgaagtatgacgacgaggaggagatctcctcctcctccgccgaggaggacgatgaccagtccgccgccgccgcctccggatctggtgaggaaggggatgacgatgaggaggatgctgcggcgctgcccacggaggaggaggaagctgagggcgaggggcagcaagaggaggaggtcgacgaggaagagatcgaagccgtcactaccggcgctggagctgaggacggagaggacgccagtgccgctaccgccgctgaaggcgaagaggagtcccagtccaccgaggacgacgaatccgtcgcaagggacaaggacaacggcgacgagactgatgcagtggttgggaagcgtgagaaaacaaggctaaaagaactccagaagatgaagaagcagaaaatccaggaaatactggatactcaaaacgctgccattgatgctgacatgaacaataaagggaagggacggttgaaataccttcttcagcagacagaaatatttgctcactttgcaaaaggaagtcagtcgaatgagaaaaagcctcgtgggaggggacgtcatgcatcaaagatgactgaagaagaggaagacgaagaatacctcaaagaggaagaagatgcccttgctggtgcagggggtacacgtttagtttcacagccttcatgcatcaagggaaagatgcgtgattaccagttggctggacttaattggcttatacgattgtatgagaatggtatcaatgggatattagctgatgagatgggtcttgggaaaacacttcaaactatttcattgctgggctatctgcatgagttcagaggtatagctggtcctcacatggttgttgcgccaaagtccactcttggcaactggatgaaggaaatccaacgtttttgccctatcttacgtgccgtgaagtttttggggaacccagaagagcggaaccatataagggacaatttgctgcaacctgggaaatttgatgtgtgtgtgactagttttgaaatggcaatcaaagaaaaatctgcgttgaggcgcttcagctggcgctacataatcattgatgaagctcaccggataaaaaatgaaaattctcttctatcaaagactatgaggatttacaacactaattatcgtctcctcatcacaggcactccactccagaataatctccatgagctctgggctctcctcaatttcttgctacctgaaatatttagctctgcggagacctttgatgaatggtttcaaatatctggggaaaatgatcaacaggaggtggtgcagcagcttcataaggttcttcgcccattccttcttaggaggctcaagtctgatgtagaaaagggcctacctccaaagaaagaaacaattcttaaagttggaatgtctcagatgcaaaagcagtactatcgtgctctgcttcagaaggatttggaggttattaatgctggtggtgaacgcaagcgattgcttaacattgccatgcagttgcgcaagtgctgcaaccatccatatttattccaaggagctgaacctgggccaccctacacaactggtgaacatctaattgagaatgcaggaaaaatggttctacttgataaattgctgcccaagctaaaggagcgtgattccagagtccttattttttcacagatgaccaggcttttggatatcttggaagattatcttatgtataggggatatcagtattgtcgaattgatggaaatacaggtggagaagatcgtgatgcatccattgaagccttcaatagtccaggaagtgagaagtttgttttcttactttcaactagggcaggtggccttggtatcaacttggccactgctgatgttgtggttctctatgacagcgattggaatccccaagctgatctgcaagctcaggaccgtgcacatagaataggtcaaaagaaagaagttcaagtgttccgcttttgcactgagtacactattgaggaaaaggtgattgagagagcatataagaagctagcattggatgctttggttattcagcaaggacgattggcagagcagaaaactgtcaataaggatgatcttctgcaaatggtgcggtttggtgctgaaatggttttcagttctaaggacagcacaataactgatgaggacattgaccgtattatagctaaaggagaggagacaacagcagaacttgatgcgaaaatgaaaaagttcactgaggatgccatcaaatttaagatggatgataatgctgaattgtatgacttcgatgatgagaaggatgaaaacaaggttgatttcaagaaacttgttagtgataactggattgagccacctagaagagaaaggaagagaaactactctgagtctgactactttaagcaagcacttcgccaaggtgcaccagcaaagcctagggaaccaaggattccaagaatgccgcacttacatgatttccagtttttcaataaccaaaggctaaatgaattgtatgaaaaggaagtgcggtaccttatgcaagcgaaccagaagaaagataccattgatggtgaagacgaagatcagttggagcctttgacagcagaggagcaggaagagaaggaacaattattagaggagggttttgcgtcatggacaaggagagacttcaacacatttattcgtgcatgtgagaaatatggtcgcaatgatattaaaagtatatcatctgaaatggagggtaagacagaagaggaagttcaacgttatgctagagttttcaaggagagatacaaggaactgagtgattatgatagaattataaaaaatattgaaaggggggaagcaaggatatcccgcaaggatgagattatgaaggctattgggaagaagctagaccgctacaagaacccatggttagagttgaaaattcagtacggccaaaataaagggaagttctataacgaggaatgtgaccgctttatgtccagaactacccaagagttggctaggcggtgtgatacccttatccgactggttgagaaagaaaatcaagaatatgatgagcaagagaggcaagcaaggaaggagaaaaggcttgctaagaacatgactccaacaaagcgagctgcactaaagaattcagagggtgagaatactccaccgagttcattcaagagacgacggcagtcccttatggacgactatgtgggctcgggaaagcgtaagagaggctgaccacgtttggcatcctcccttagacatgccgtctctacaatgattttaataccctgccgcgcagtagtgcttagttcctcttgcacgtgagtcgaatacctcaagggcatgtgactagcgtaatttatgcaatgatgacataggttagttattaatcctaaatgaagcatgtatgcgcatgctgtgttagtgtcgtagatctggactttgcaattgcaactgttgctgcccagctgacacagatccctttcgctgcaatgcggtcctgcattttgccgccactgattttgcacccaaggctaaacccaacgcggcagtagtaactgttgcactcaggatccacgtacacaaaaatgagttgaggcataacgtcccaactcggctggtggtatatgttaacagccaatcatgtttaagctattactctgatcgttaaggtggatccgctaaggccttcggttatttctgatccatgtggattggaatgtattgggcggaatcgagacggatttgacttgctatagatttaaatcgactcaatcccactcaatccacatggaagaagtacctttgcatcgatttgtcattggaatatatacaaggtctaggggtgtaattaacgtaaccgtccaagcatttggctaaagtatacactctttaaatgcataattaactgtctattctatctctaatcttaggacttgaagtgtcttgtagatgagatcattatgtatttttgagtagacatcatttcgcaatactcctcatctaatctttcttaagattgacacgttgttaattccttgaaaaactcaatagaaaaaat

SEQ ID NO: 30003 - DNA, 4341 bp, Zea Mays
gccaaaactgcaaaccacacaatattctcatacaagcgcccttgccccctgttcgctttcactcttgaaatcccctccgcctctcggtcaatccaccgcgtccaagcttcattcctccgcactcgaaatccaaagcgccccgccccgacccgaaccctaatcctgcatttcctttcccgccaccgcccgccccaatggcgaagccggtgaagtatgacgacgaggaggagatctcctcctcctccgccgaggaggacgatgaccagtccgccgccgccgcctccggatctggtgaggaaggggatgacgatgaggaggatgctgcggcgctgcccacggaggaggaggaagctgagggcgaggggcagcaagaggaggaggtcgacgaggaagagatcgaagccgtcactaccggcgctggagctgaggacggagaggacgccagtgccgctaccgccgctgaaggcgaagaggagtcccagtccaccgaggacgacgaatccgtcgcaagggacaaggacaacggcgacgagactgatgcagtggttgggaagcgtgagaaaacaaggctaaaagaactccagaagatgaagaagcagaaaatccaggaaatactggatactcaaaacgctgccattgatgctgacatgaacaataaagggaagggacggttgaaataccttcttcagcagacagaaatatttgctcactttgcaaaaggaagtcagtcgaatgagaaaaagcctcgtgggaggggacgtcatgcatcaaagatgactgaagaagaggaagacgaagaatacctcaaagaggaagaagatgcccttgctggtgcagggggtacacgtttagtttcacagccttcatgcatcaagggaaagatgcgtgattaccagttggctggacttaattggcttatacgattgtatgagaatggtatcaatgggatattagctgatgagatgggtcttgggaaaacacttcaaactatttcattgctgggctatctgcatgagttcagaggtatagctggtcctcacatggttgttgcgccaaagtccactcttggcaactggatgaaggaaatccaacgtttttgccctatcttacgtgccgtgaagtttttggggaacccagaagagcggaaccatataagggacaatttgctgcaacctgggaaatttgatgtgtgtgtgactagttttgaaatggcaatcaaagaaaaatctgcgttgaggcgcttcagctggcgctacataatcattgatgaagctcaccggataaaaaatgaaaattctcttctatcaaagactatgaggatttacaacactaattatcgtctcctcatcacaggcactccactccagaataatctccatgagctctgggctctcctcaatttcttgctacctgaaatatttagctctgcggagacctttgatgaatggtttcaaatatctggggaaaatgatcaacaggaggtggtgcagcagcttcataaggttcttcgcccattccttcttaggaggctcaagtctgatgtagaaaagggcctacctccaaagaaagaaacaattcttaaagttggaatgtctcagatgcaaaagcagtactatcgtgctctgcttcagaaggatttggaggttattaatgctggtggtgaacgcaagcgattgcttaacattgccatgcagttgcgcaagtgctgcaaccatccatatttattccaaggagctgaacctgggccaccctacacaactggtgaacatctaattgagaatgcaggaaaaatggttctacttgataaattgctgcccaagctaaaggagcgtgattccagagtccttattttttcacagatgaccaggcttttggatatcttggaagattatcttatgtataggggatatcagtattgtcgaattgatggaaatacaggtggagaagatcgtgatgcatccattgaagccttcaatagtccaggaagtgagaagtttgttttcttactttcaactagggcaggtggccttggtatcaacttggccactgctgatgttgtggttctctatgacagcgattggaatccccaagctgatctgcaagctcaggaccgtgcacatagaataggtcaaaagaaagaagttcaagtgttccgcttttgcactgagtacactattgaggaaaaggtgattgagagagcatataagaagctagcattggatgctttggttattcagcaaggacgattggcagagcagaaaactgtcaataaggatgatcttctgcaaatggtgcggtttggtgctgaaatggttttcagttctaaggacagcacaataactgatgaggacattgaccgtattatagctaaaggagaggagacaacagcagaacttgatgcgaaaatgaaaaagttcactgaggatgccatcaaatttaagatggatgataatgctgaattgtatgacttcgatgatgagaaggatgaaaacaaggttgatttcaagaaacttgttagtgataactggattgagccacctagaagagaaaggaagagaaactactctgagtctgactactttaagcaagcacttcgccaaggtgcaccagcaaagcctagggaaccaaggattccaagaatgccgcacttacatgatttccagtttttcaataaccaaaggctaaatgaattgtatgaaaaggaagtgcggtaccttatgcaagcgaaccagaagaaagataccattgatggtgaagacgaagatcagttggagcctttgacagcagaggagcaggaagagaaggaacaattattagaggagggttttgcgtcatggacaaggagagacttcaacacatttattcgtgcatgtgagaaatatggtcgcaatgatattaaaagtatatcatctgaaatggagggtaagacagaagaggaagttcaacgttatgctagagttttcaaggagagatacaaggaactgagtgattatgatagaattataaaaaatattgaaaggggggaagcaaggatatcccgcaaggatgagattatgaaggctattgggaagaagctagaccgctacaagaacccatggttagagttgaaaattcagtacggccaaaataaagggaagttctataacgaggaatgtgaccgctttatgctttgcatggtgcacaaacttggatatggaaactgggatgaactgaaagctgccttccgtatgtctcccttgtttcgatttgattggtttgtgaagtccagaactacccaagagttggctaggcggtgtgatacccttatccgactggttgagaaagaaaatcaagaatatgatgagcaagagaggcaagcaaggaaggagaaaaggcttgctaagaacatgactccaacaaagcgagctgcactaaagaattcagagggtgagaatactccaccgagttcattcaagagacgacggcagtcccttatggacgactatgtgggctcgggaaagcgtaagagaggctgaccacgtttggcatcctcccttagacatgccgtctctacaatgattttaataccctgccgcgcagtagtgcttagttcctcttgcacgtgagtcgaatacctcaagggcatgtgactagcgtaatttatgcaatgatgacataggttagttattaatcctaaatgaagcatgtatgcgcatgctgtgttagtgtcgtagatctggactttgcaattgcaactgttgctgcccagctgacacagatccctttcgctgcaatgcggtcctgcattttgccgccactgattttgcacccaaggctaaacccaacgcggcagtagtaactgttgcactcaggatccacgtacacaaaaatgagttgaggcataacgtcccaactcggctggtggtatatgttaacagccaatcatgtttaagctattactctgatcgttaaggtggatccgctaaggccttcggttatttctgatccatgtggattggaatgtattgggcggaatcgagacggatttgacttgctatagatttaaatcgactcaatcccactcaatccacatggaagaagtacctttgcatcgatttgtcattggaatatatacaaggtctaggggtgtaattaacgtaaccgtccaagcatttggctaaagtatacactctttaaatgcataattaactgtctattctatctctaatcttaggacttgaagtgtcttgtagatgagatcattatgtatttttgagtagacatcatttcgcaatactcctcatctaatctttcttaagattgacacgttgttaattccttgaaaaactcaatagaaaaaat

SEQ ID NO: 30004 - DNA, 1585 bp, Zea Mays
gatttctgcgttctcgaagtacctcgggattgcctaggcaaccttcatatactactggatttgggactgctttaaatatagagacacttgttgctgccgcggaacaaagagatacaccaattgaggacaagattctttttatgatcaacaatatatccatctcaaatatggaagctaaggcaaaggaatttaatgaggtcatacaggaacagtattatacttggtttgcacaatacatggtcatgaaaagggcaagcattgaaccaaatttccatgatctgtatctgaagttctttgataaagtaaactcaaaatccatgaacaaggaaatactgaaagccacatatgagaactgcaaggtcttgttaagatcagaccttatcaaatctagttccgaggagcgctccttgctaaaaaacctaggcagttggttgggaaagttcaccattggtaggaatcaggcactaagggctaaggagattgatccaaaatctcttatcgtggaggcatatgagaaaggattgatgattgcggtcataccattcacttcaaagatccttgaaccttgccagtcaagtatcgcatatcgatctccaaatccctggaccatgggaattctaagtctacttgctgaaatttataatcttccaaacctcaagatgaatctgaaatttgatattgaggtcctcaacattcctttttttgatagtttctttattgactttgtatctgccatgctacccatggccatgctaaatgttcttttgggatttcaggtgctatttaagaaccttactgttgacataaaggatgtgaaaccaacctccctgctcaaagatcgtctgtgcgaagtcgagggaaatccagatttttcaaataaagatgttactgcatctcaaacccctgtggttgcagaagtcccttcagggaccatcccttcactaactcatatggaacaacaacctgagatcaatatcacatcccgagctatgagccttccaaatatacttaatcagtatgctgctcctgtccgtctacctacaaacagcacggtagaagatgacaaagttgctctaatgatgcctgagcaagtgccctcgttgacccaggtttcgccagcacaaacacaatcaacatcaccatctccattttctgttaaccagcttatggcagctattccacgtgaagagatacgtttcaaaataaatccaaagctcggctcccttggtccacaactgcaatatagcaaaattatggatttggctttggataaggctaacagggagataatactccctgttattcaaagaagtgtgactggcgggaggaacaccgggcgtgtaggagtcatcaagaacagggagaagcacaagggcagctttgagaccatccatgtgctgcttggacctttttgctatgtctagttttctcctatttgttgtataggaaaacatagaatataattcaaatttggtggtcgcaaaagtgtggagactttaattcatataaagttaggcttaacattaatgcaaacagttgtattttagtttagatttagagtacacttatgtatgcgttgtttgac

SEQ ID NO: 30005 - DNA, 508 bp, Zea Mays
gtttcttctgtccctagtcatcgtagctctggcttttgggcaaaatttaccgtgtccacgcatccattgtccaaattgacggcacaccgtgctacgccattctcttgcgcccgtatagccccagaattgttgcctgtttttccctgagacctccgtgagacgtcttgccccaccgatcgtcgccgtaccgtccaacctccgcctcaccgcggcaagggttgttgtccacaacgtggccaagacgccgtcggtcatcaccgtgagccgcctcatcatcgactgacctgtttccgctttctcgggtcgattttgcgtgagcgccgtagtgtttgtgagtcaccgatgctccctgtgctgtgcatttgaactctactgcatcctagtgttgggagaaatagatattttcagttttaatttaatccaaaaaatcacagtaatgtatgagatgatatttatatgcatgtgtatcactactcacataagcagtaaacaacagtaaaacatgcac

SEQ ID NO: 30006 - DNA, 483 bp, Zea Mays
cgaataccagccgggcgcatgctcacaagtccgtaaaggtgatggcaccgcaaccctctttcctccccgtttgaggatttctaagctaccgcgagagaaatagagagaatggggagtgaaagtcggagcaccgccgttgtagccgcatactggtgtttgccgcaaacgggtccgatcgggagtcttcatcagagagcggtgaaggttgcagcggttccggtgctgggagaagaccactgggggccatgagatttctcaccagagccagggaagggccaccggccgcaccacgccgtggccaaacatcgtcgcgtcatcatcgtcgtggatggaagggcgccgccgcccggtgccggctatgggaggagatgcgaaggagacctaatcttaggaaaaaaacaaaactatttttgtaggtatctatatgcttgaatgtttgttcttatgatacctgtttgatttggttctttggttgagtgagat

SEQ ID NO: 30007 - DNA, 768 bp, Zea Mays
cgaataccagccgggcgcatgctcacaagtccgtaaaggtgatggcaccgcaaccctctttcctccccgtttgaggatttctaagctaccgcgagagaaatagagagaatggggagtgaaagtcggagcaccgccgttgtagccgcatactggtgtttgccgcaaacgggtccgatcgggagtcttcatcagagagcggtgaaggttgcagcggttccggtgctgggagaagaccactgggggccatgagatttctcaccagagccagggaagggccaccggccgcaccacgccgtggccaaacatcgtcgcgtcatcatcgtcggaggggaggaggtgtcgactacctgcacgtattcatcgaagaagggcagtacctaatctagaatcggaaatgaatcctcctctgaatcctccgcctgctgggactgatgtcgtggttgccgcttaaatgcaactgctgcaataaatggccaacactatgacaaaaatgcaccacccaaggatttatttttatagaggatcctgatttcgtgcccatggaattttgagtagttcgtgccctatacccaagtttggcatggtgccgttgttgtagaagccaccatgtggcaagaagagactacccttgtgtttatcttatcgactatagttcttctagtttgtgttattattgtaaccgaatgtactaaataaggctatgtatgattgtggcactacttgagtaatgtatttcatcagagactattttctggtgcttaaatacat

SEQ ID NO: 30008 - DNA, 394 bp, Zea Mays
cgaataccagccgggcgcatgctcacaagtccgtaaaggtgatggcaccgcaaccctctttcctccccgtttgaggatttctaagctaccgcgagagaaatagagagaatggggagtgaaagtcggagcaccgccgttgtagccgcatactggtgtttgccgcaaacgggtccgatcgggagtcttcatcagagagcggtgaaggttgcagcggttccggtgctgggagaagaccactgggggccatgagatttctcaccagagccagggaagggccaccggccgcaccacgccgtggccaaacatcgtcgcgtcatcatcgtcggttcttgtgtagtggcggcaaccatcaatcttgctgaatttatgcctacgtataggatggtattatccg

SEQ ID NO: 30009 - DNA, 1134 bp, Zea Mays
tcccagccgccgccgactctatctctcccttccctctcaccacctcctcgtcatcctcagcgtgcacgctgcgcgtggccgtagtgggggtggccccgcggcacgtcggctgccgaggcgctggtctcgccgagggcccagatgcaggtgctctcctctaccaacctcgccgctgacttctcccgcgcgctgccgcccggggcacccatccccatgctccgccgtgaggtgctccactccttcctccgccgtcgaggccgagctcgtccagggcctcatcacctccgccgtgaggtgctccactccttcgtcttcaagctctcgccccaggggtgcgctagtgccaggtgcggcgagccagcagatcaaggaaaccgcccgtggccgccccaagcgttacatctgcactggctgctgctggtgacaagcaagaacaaccaaagtaaagaagtctacataattgccaagaatcatcttcatccatggggatccggtaaagcagcagcccctcggctgggtaacctactgtgaagcatcaggtcagcagtgaaggagatctgagttcgaagcaaatttgccgcgaattctctccggaaatcattcgagtggctggattttgaagcgcagccatgggatcggaggattttgtctgtaaaatgatgtgattcggcgggatgcaaacatgtccagtgacactgatatgagtaaggtgtttgaagacagaacgtttgtgtcatctatccttaattcgtttcctggtgttgatcccaatgatccatctgttaaagatttgctggcatcattgcacagccagaaagaggaagagaagaaggaagacaagtcagacaaaacagaagacgagaagaactgcttcaagctggagtgatgtcgctgtggtgcttttgtgactgatcatctctggagcttttgtgaatgatgtagctagctatctgtaattgatctagttgtgaatgatattataattgtgatacttttgtgaatatataattgtggtgcttttgtgtttatgtgatggatctatgactgtggtatactgattaattgtgtatgtctttatgattcgtgtataaaaatctgtgatttgtggtgcttaattaaatgtatatttttatt

SEQ ID NO: 30010 - DNA, 1581 bp, Zea Mays
tcccagccgccgccgactctatctctcccttccctctcaccacctcctcgtcatcctcagcgtgcacgctgcgcgtggccgtagtgggggtggccccgcggcacgtcggctgccgaggcgctggtctcgccgagggcccagatgcaggtgctctcctctaccaacctcgccgctgacttctcccgcgcgctgccgcccggggcacccatccccatgctccgccgtgaggtgctccactccttcctccgccgtcgaggccgagctcgtccagggcctcatcacctccgccgtgaggtgctccactccttcgtcttcaagctctcgccccaggggtgcgctagtgccaggtgcggcgagccagcagatcaaggaaaccgcccgtggccgccccaagcgttacatctgcactggctgctgctggtgacaagcaagaacaaccaaagtttttttgcgcgcagtaaagaagtctacataattgccaagaatcatcttcatccatggggatccggtaaagcagcagcccctcggctgggtaacctactgtgaagcatcaggtcagcagtgaaggagatctgagttcgaagcaaatttgccgcgaattctctccggaaatcattcgagtggctggattttgaagcgcagccatgggatcggaggattttgtctgtaaaatgatgtgattcggcgggtgagagactggttcttccgggtccattgtagcagcagtcctttttttatctccttagttttgttggagttcttccgggtgagagactggttcttctgggcccagcggcgggtgagagactggttcttccgggtccattgaagcgcagccatgggatcggaggattatgtagacttctttaggccttgttcgtttgtatcggattgtatccgtaatcattccagctaatcaaaatttatataaattagagaagcaatccggttaggaatcgttccgacccaccaatccgtaacgaccgaacaggctcttactgtgcgaaaaaaactgcctcggaatcattacaggtgctctagcctccgcatggaattcgcggaatctgcagctgtgactgactctgctatggcagaagctgctcttcaaatgtctgtccaggatgcaaacatgtccagtgacactgatatgagtaaggtgtttgaagacagaacgtttgtgtcatctatccttaattcgtttcctggtgttgatcccaatgatccatctgttaaagatttgctggcatcattgcacagccagaaagaggaagagaagaaggaagacaagtcagacaaaacagaagacgagaagaactgcttcaagctggagtgatgtcgctgtggtgcttttgtgactgatcatctctggagcttttgtgaatgatgtagctagctatctgtaattgatctagttgtgaatgatattataattgtgatacttttgtgaatatataattgtggtgcttttgtgtttatgtgatggatctatgactgtggtatactgattaattgtgtatgtctttatgattcgtgtataaaaatctgtgatttgtggtgcttaattaaatgtatatttttatt

SEQ ID NO: 30011 - DNA, 904 bp, Zea Mays
tcccagccgccgccgactctatctctcccttccctctcaccacctcctcgtcatcctcagcgtgcacgctgcgcgtggccgtagtgggggtggccccgcggcacgtcggctgccgaggcgctggtctcgccgagggcccagatgcaggtgctctcctctaccaacctcgccgctgacttctcccgcgcgctgccgcccggggcacccatccccatgctccgccgtgaggtgctccactccttcctccgccgtcgaggccgagctcgtccagggcctcatcacctccgccgtgaggtgctccactccttcgtcttcaagctctcgccccaggggtgcgctagtgccaggtgcggcgagccagcagatcaaggaaaccgcccgtggccgccccaagcgttacatctgcactggctgctgctggtgacaagcaagaacaaccaaaggatgcaaacatgtccagtgacactgatatgagtaaggtgtttgaagacagaacgtttgtgtcatctatccttaattcgtttcctggtgttgatcccaatgatccatctgttaaagatttgctggcatcattgcacagccagaaagaggaagagaagaaggaagacaagtcagacaaaacagaagacgagaagaactgcttcaagctggagtgatgtcgctgtggtgcttttgtgactgatcatctctggagcttttgtgaatgatgtagctagctatctgtaattgatctagttgtgaatgatattataattgtgatacttttgtgaatatataattgtggtgcttttgtgtttatgtgatggatctatgactgtggtatactgattaattgtgtatgtctttatgattcgtgtataaaaatctgtgatttgtggtgcttaattaaatgtatatttttatt

SEQ ID NO: 30012 - DNA, 924 bp, Zea Mays
tcccagccgccgccgactctatctctcccttccctctcaccacctcctcgtcatcctcagcgtgcacgctgcgcgtggccgtagtgggggtggccccgcggcacgtcggctgccgaggcgctggtctcgccgagggcccagatgcaggtgctctcctctaccaacctcgccgctgacttctcccgcgcgctgccgcccggggcacccatccccatgctccgccgtgaggtgctccactccttcctccgccgtcgaggccgagctcgtccagggcctcatcacctccgccgtgaggtgctccactccttcgtcttcaagctctcgccccaggggtgcgctagtgccaggtgcggcgagccagcagatcaaggaaaccgcccgtggccgccccaagcgttacatctgcactggctgctgctggtgacaagcaagaacaaccaaagctcttcaaatgtctgtccaggatgcaaacatgtccagtgacactgatatgagtaaggtgtttgaagacagaacgtttgtgtcatctatccttaattcgtttcctggtgttgatcccaatgatccatctgttaaagatttgctggcatcattgcacagccagaaagaggaagagaagaaggaagacaagtcagacaaaacagaagacgagaagaactgcttcaagctggagtgatgtcgctgtggtgcttttgtgactgatcatctctggagcttttgtgaatgatgtagctagctatctgtaattgatctagttgtgaatgatattataattgtgatacttttgtgaatatataattgtggtgcttttgtgtttatgtgatggatctatgactgtggtatactgattaattgtgtatgtctttatgattcgtgtataaaaatctgtgatttgtggtgcttaattaaatgtatatttttatt

SEQ ID NO: 30013 - DNA, 1500 bp, Zea Mays
tcccagccgccgccgactctatctctcccttccctctcaccacctcctcgtcatcctcagcgtgcacgctgcgcgtggccgtagtgggggtggccccgcggcacgtcggctgccgaggcgctggtctcgccgagggcccagatgcaggtgctctcctctaccaacctcgccgctgacttctcccgcgcgctgccgcccggggcacccatccccatgctccgccgtgaggtgctccactccttcgtcttcaagctctcgccccaggggtgcgctagtgccaggtgcggcgagccagcagatcaaggaaaccgcccgtggccgccccaagcgttacatctgcactggctgctgctggtgacaagcaagaacaaccaaagtaaagaagtctacataattgccaagaatcatcttcatccatggggatccggtaaagcagcagcccctcggctgggtaacctactgtgaagcatcaggtcagcagtgaaggagatctgagttcgaagcaaatttgccgcgaattctctccggaaatcattcgagtggctggattttgaagcgcagccatgggatcggaggattttgtctgtaaaatgatgtgattcggcgggtgagagactggttcttccgggtccattgtagcagcagtcctttttttatctccttagttttgttggagttcttccgggtgagagactggttcttctgggcccagcggcgggtgagagactggttcttccgggtccattgaagcgcagccatgggatcggaggattatgtagacttctttaggccttgttcgtttgtatcggattgtatccgtaatcattccagctaatcaaaatttatataaattagagaagcaatccggttaggaatcgttccgacccaccaatccgtaacgaccgaacaggctcttactgtgcgaaaaaaactgcctcggaatcattacaggtgctctagcctccgcatggaattcgcggaatctgcagctgtgactgactctgctatggcagaagctgctcttcaaatgtctgtccaggatgcaaacatgtccagtgacactgatatgagtaaggtgtttgaagacagaacgtttgtgtcatctatccttaattcgtttcctggtgttgatcccaatgatccatctgttaaagatttgctggcatcattgcacagccagaaagaggaagagaagaaggaagacaagtcagacaaaacagaagacgagaagaactgcttcaagctggagtgatgtcgctgtggtgcttttgtgactgatcatctctggagcttttgtgaatgatgtagctagctatctgtaattgatctagttgtgaatgatattataattgtgatacttttgtgaatatataattgtggtgcttttgtgtttatgtgatggatctatgactgtggtatactgattaattgtgtatgtctttatgattcgtgtataaaaatctgtgatttgtggtgcttaattaaatgtatatttttatt

SEQ ID NO: 30014 - DNA, 934 bp, Zea Mays
tcccagccgccgccgactctatctctcccttccctctcaccacctcctcgtcatcctcagcgtgcacgctgcgcgtggccgtagtgggggtggccccgcggcacgtcggctgccgaggcgctggtctcgccgagggcccagatgcaggtgctctcctctaccaacctcgccgctgacttctcccgcgcgctgccgcccggggcacccatccccatgctccgccgtgaggtgctccactccttcctccgccgtcgaggccgagctcgtccagggcctcatcacctccgccgtgaggtgctccactccttcgtcttcaagctctcgccccaggggtgcgctagtgccaggtgcggcgagccagcagatcaaggaaaccgcccgtggccgccccaagcgttacatctgcactggctgctgctggtgacaagcaagaacaaccaaagctcttcaaatgtctgtccaggatgcaaacatgtccagtgacactgatatgagtacattttagctgcagcttcaagaatttattggcccttttatgtgtaaaataacagtttcctggtgttgatcccaatgatccatctgttaaagatttgctggcatcattgcacagccagaaagaggaagagaagaaggaagacaagtcagacaaaacagaagacgagaagaactgcttcaagctggagtgatgtcgctgtggtgcttttgtgactgatcatctctggagcttttgtgaatgatgtagctagctatctgtaattgatctagttgtgaatgatattataattgtgatacttttgtgaatatataattgtggtgcttttgtgtttatgtgatggatctatgactgtggtatactgattaattgtgtatgtctttatgattcgtgtataaaaatctgtgatttgtggtgcttaattaaatgtatatttttatt

SEQ ID NO: 30015 - DNA, 922 bp, Zea Mays
tcccagccgccgccgactctatctctcccttccctctcaccacctcctcgtcatcctcagcgtgcacgctgcgcgtggccgtagtgggggtggccccgcggcacgtcggctgccgaggcgctggtctcgccgagggcccagatgcaggtgctctcctctaccaacctcgccgctgacttctcccgcgcgctgccgcccggggcacccatccccatgctccgccgtgaggtgctccactccttcctccgccgtcgaggccgagctcgtccagggcctcatcacctccgccgtgaggtgctccactccttcgtcttcaagctctcgccccaggggtgcgctagtgccaggtgcggcgagccagcagatcaaggaaaccgcccgtggccgccccaagcgttacatctgcactggctgctgctggtgacaagcaagaacaaccaaagctcttcaaatgtctgtccaggatgcaaacatgtccagtgacactgatatgagtaagcttcaagaatttattggcccttttatgtgtaaaataacagtttcctggtgttgatcccaatgatccatctgttaaagatttgctggcatcattgcacagccagaaagaggaagagaagaaggaagacaagtcagacaaaacagaagacgagaagaactgcttcaagctggagtgatgtcgctgtggtgcttttgtgactgatcatctctggagcttttgtgaatgatgtagctagctatctgtaattgatctagttgtgaatgatattataattgtgatacttttgtgaatatataattgtggtgcttttgtgtttatgtgatggatctatgactgtggtatactgattaattgtgtatgtctttatgattcgtgtataaaaatctgtgatttgtggtgcttaattaaatgtatatttttatt

SEQ ID NO: 30016 - DNA, 862 bp, Zea Mays
tcccagccgccgccgactctatctctcccttccctctcaccacctcctcgtcatcctcagcgtgcacgctgcgcgtggccgtagtgggggtggccccgcggcacgtcggctgccgaggcgctggtctcgccgagggcccagatgcaggtgctctcctctaccaacctcgccgctgacttctcccgcgcgctgccgcccggggcacccatccccatgctccgccgtgaggtgctccactccttcctccgccgtcgaggccgagctcgtccagggcctcatcacctccgccgtgaggtgctccactccttcgtcttcaagctctcgccccaggggtgcgctagtgccaggtgcggcgagccagcagatcaaggaaaccgcccgtggccgccccaagcgttacatctgcactggctgctgctggtgacaagcaagaacaaccaaaggatgcaaacatgtccagtgacactgatatgagtaagtttcctggtgttgatcccaatgatccatctgttaaagatttgctggcatcattgcacagccagaaagaggaagagaagaaggaagacaagtcagacaaaacagaagacgagaagaactgcttcaagctggagtgatgtcgctgtggtgcttttgtgactgatcatctctggagcttttgtgaatgatgtagctagctatctgtaattgatctagttgtgaatgatattataattgtgatacttttgtgaatatataattgtggtgcttttgtgtttatgtgatggatctatgactgtggtatactgattaattgtgtatgtctttatgattcgtgtataaaaatctgtgatttgtggtgcttaattaaatgtatatttttatt

SEQ ID NO: 30017 - DNA, 867 bp, Zea Mays
tcccagccgccgccgactctatctctcccttccctctcaccacctcctcgtcatcctcagcgtgcacgctgcgcgtggccgtagtgggggtggccccgcggcacgtcggctgccgaggcgctggtctcgccgagggcccagatgcaggtgctctcctctaccaacctcgccgctgacttctcccgcgcgctgccgcccggggcacccatccccatgctccgccgtgaggtgctccactccttcctccgccgtcgaggccgagctcgtccagggcctcatcacctccgccgtgaggtgctccactccttcgtcttcaagctctcgccccaggggtgcgctagtgccaggtgcggcgagccagcagatcaaggaaaccgcccgtggccgccccaagcgttacatctgcactggctgctgctggtgacaagcaagaacaaccaaaggatgcaaacatgtccagtgacactgatatgagtaaggtgtttgaagacagaacgtttgtgtcatctatccttaattcgatttgctggcatcattgcacagccagaaagaggaagagaagaaggaagacaagtcagacaaaacagaagacgagaagaactgcttcaagctggagtgatgtcgctgtggtgcttttgtgactgatcatctctggagcttttgtgaatgatgtagctagctatctgtaattgatctagttgtgaatgatattataattgtgatacttttgtgaatatataattgtggtgcttttgtgtttatgtgatggatctatgactgtggtatactgattaattgtgtatgtctttatgattcgtgtataaaaatctgtgatttgtggtgcttaattaaatgtatatttttatt

SEQ ID NO: 30018 - DNA, 2246 bp, Zea Mays
gcaaaattgaaaatttcaaatggggcggtggcaaattttgccgcgatcttcgtctaaaagaaggaaacccactcctccaaggctccaacctccttccctcctcgcactctgtgttgcagacctccgccaccggaggttcctgcgggtgcgtttgccctgacagaacactggaggcccctgcgggtgcgctacccctgaccaagcaaccacggactagtctaccgccgtccgcagcatccgttcaccttcaccccgcctgcgcgctctctctctgcgacgactgggtgggctactgcagccgccgccgccctacgccgggtgccgaggccttcgccggtctcttcgctggtgacgagcactcaccaggctgcttcatcgtgaaaaattgttgcatgcagccacgcacatggtttgcactatccacctacacagtgatctatgcttctgaccccacatgccttaggtctatctgcaccagaaagaagtgaatcgtttcaaggtgtctatatactttttggatgctttaagaaagggcctggaagcattgcacgggtaacatatttgtctgacagcgattgattttgggaaccaatttggtaatcagtacaatggagtgcaacagagaagaagccttgaaagccagggaaattgctgttaagaagttggaaagcagagattttgttggtgctaaaaggattgcccttaaagcacagaggattttcccagagatagagaacataccccagctgttaactgtctgtgaagtacattgtgcagcagaagcaaaagtaaatggaatgttggatttttatggaattctccaagtagaaggaacagcagatgaggtgaccataaagaagcaatatcgtaagcttgtcctctcacttcaccctgataaaaacagttatgctggtgcagaatctgctttcaagtttgttgcagaagcatactcaacattgtctgatcgaaccaaacgatatgcatatgatgtcaaatggagggctgctcccaaagttgcaccaaagcaggctacacagccgacacaaccaaatcaggctacacaacagaaacaggatgcaaaaccaaagcatgttgctaaaccaaagcaggctgcacagccaaagcaggctacacaaccaatgtggactacagagccaatcaacaaaaatagcacaaatagtagtgcagcaggatatggaccttggacattttggaccgtatgcattcactgtaaaacaaaatataagtaccatggtgacatactcaatcgtcagatccgctgtcagaattgcaggcagaatttctttgcacaccagacaagtacagaggatgtgccttctgcattctcatcaaaaacagcaaatagtgctgcgcagcaaggctgctctacaaatatcttttctagagagaacaaagaggggcctgtgatggaaggagttaaattttcagcaaagaattctactgtaccagattttggtgacaggaaaaacctaggtggtggggtggatacatcagcagggccaggttctgcagaaatccctactccacggagatcttctaggagaaaggcttgtgctgatgccaacaacatcctgaattctccaaagaaaaagagtcggacactcaaagattggttctcaaatgctacctccagttctaataaagtagttgatgataatgttgcccatgctgatggacatgttagtgaacctcatgtgtctagcaaaacagataatcaagatagttgtgttgtcaatgaaggcaataaaagaaacactaaaacaacttgtgatccacctgctgagaagccttggaatactgggagtttcacgtaccctgacccagaattttttgacttcgacaagtgcagagatgtcaaactgtttgcagttgatcagatatgggcactttatgatgaattcgatgccatgccaagattctatgctagaataagacatgttaataccaccaacttcagagttaagtacacttggctggagcattctacagtgaatgatgatgaggaaaaatggattgataataaacttcctgtggcttgtgggaactttacgttaggaaacacagaggagtcacaagatcccctcatgttttctcacatggtttcgtgggttaaaggaagaaaaaggggttcttatgtaatatatccaaatataggtgaggtttgggctctttataagggctggagtatgcagtgggtctcagatgcagacagtcatagatcctac

SEQ ID NO: 30019 - DNA, 1877 bp, Zea Mays
cttctatatggctacaaatccaatgcaacccacgcacatggtttgcactatccacctacacagtgatctatgcttctgaccccacatgccttaggtctatctgcaccagaaagaagtgaatcgtttcaaggtgtctatatactttttggatgctttaagaaagggcctggaagcattgcacgggtaacatatttgtctgacagcgattgattttgggaaccaatttggtaatcagtacaatggagtgcaacagagaagaagccttgaaagccagggaaattgctgttaagaagttggaaagcagagattttgttggtgctaaaaggattgcccttaaagcacagaggattttcccagagatagagaacataccccagctgttaactgtctgtgaagtacattgtgcagcagaagcaaaagtaaatggaatgttggatttttatggaattctccaagtagaaggaacagcagatgaggtgaccataaagaagcaatatcgtaagcttgtcctctcacttcaccctgataaaaacagttatgctggtgcagaatctgctttcaagtttgttgcagaagcatactcaacattgtctgatcgaaccaaacgatatgcatatgatgtcaaatggagggctgctcccaaagttgcaccaaagcaggctacacagccgacacaaccaaatcaggctacacaacagaaacaggatgcaaaaccaaagcatgttgctaaaccaaagcaggctgcacagccaaagcaggctacacaaccaatgtggactacagagccaatcaacaaaaatagcacaaatagtagtgcagcaggatatggaccttggacattttggaccgtatgcattcactgtaaaacaaaatataagtaccatggtgacatactcaatcgtcagatccgctgtcagaattgcaggcagaatttctttgcacaccagacaagtacagaggatgtgccttctgcattctcatcaaaaacagcaaatagtgctgcgcagcaaggctgctctacaaatatcttttctagagagaacaaagaggggcctgtgatggaaggagttaaattttcagcaaagaattctactgtaccagattttggtgacaggaaaaacctaggtggtggggtggatacatcagcagggccaggttctgcagaaatccctactccacggagatcttctaggagaaaggcttgtgctgatgccaacaacatcctgaattctccaaagaaaaagagtcggacactcaaagattggttctcaaatgctacctccagttctaataaagtagttgatgataatgttgcccatgctgatggacatgttagtgaacctcatgtgtctagcaaaacagataatcaagatagttgtgttgtcaatgaaggcaataaaagaaacactaaaacaacttgtgatccacctgctgagaagccttggaatactgggagtttcacgtaccctgacccagaattttttgacttcgacaagtgcagagatgtcaaactgtttgcagttgatcagatatgggcactttatgatgaattcgatgccatgccaagattctatgctagaataagacatgttaataccaccaacttcagagttaagtacacttggctggagcattctacagtgaatgatgatgaggaaaaatggattgataataaacttcctgtggcttgtgggaactttacgttaggaaacacagaggagtcacaagatcccctcatgttttctcacatggtttcgtgggttaaaggaagaaaaaggggttcttatgtaatatatccaaatataggtgaggtttgggctctttataagggctggagtatgcagtgggtctcagatgcagacagtcatagatcctac

SEQ ID NO: 30020 - DNA, 1871 bp, Zea Mays
catcaaaggcggtgtaatactcctcgatggatatctcattctgctgaagctcatgaagttcttgcatccatgaccccacatgccttaggtctatctgcaccagaaagaagtgaatcgtttcaaggtgtctatatactttttggatgctttaagaaagggcctggaagcattgcacgggtaacatatttgtctgacagcgattgattttgggaaccaatttggtaatcagtacaatggagtgcaacagagaagaagccttgaaagccagggaaattgctgttaagaagttggaaagcagagattttgttggtgctaaaaggattgcccttaaagcacagaggattttcccagagatagagaacataccccagctgttaactgtctgtgaagtacattgtgcagcagaagcaaaagtaaatggaatgttggatttttatggaattctccaagtagaaggaacagcagatgaggtgaccataaagaagcaatatcgtaagcttgtcctctcacttcaccctgataaaaacagttatgctggtgcagaatctgctttcaagtttgttgcagaagcatactcaacattgtctgatcgaaccaaacgatatgcatatgatgtcaaatggagggctgctcccaaagttgcaccaaagcaggctacacagccgacacaaccaaatcaggctacacaacagaaacaggatgcaaaaccaaagcatgttgctaaaccaaagcaggctgcacagccaaagcaggctacacaaccaatgtggactacagagccaatcaacaaaaatagcacaaatagtagtgcagcaggatatggaccttggacattttggaccgtatgcattcactgtaaaacaaaatataagtaccatggtgacatactcaatcgtcagatccgctgtcagaattgcaggcagaatttctttgcacaccagacaagtacagaggatgtgccttctgcattctcatcaaaaacagcaaatagtgctgcgcagcaaggctgctctacaaatatcttttctagagagaacaaagaggggcctgtgatggaaggagttaaattttcagcaaagaattctactgtaccagattttggtgacaggaaaaacctaggtggtggggtggatacatcagcagggccaggttctgcagaaatccctactccacggagatcttctaggagaaaggcttgtgctgatgccaacaacatcctgaattctccaaagaaaaagagtcggacactcaaagattggttctcaaatgctacctccagttctaataaagtagttgatgataatgttgcccatgctgatggacatgttagtgaacctcatgtgtctagcaaaacagataatcaagatagttgtgttgtcaatgaaggcaataaaagaaacactaaaacaacttgtgatccacctgctgagaagccttggaatactgggagtttcacgtaccctgacccagaattttttgacttcgacaagtgcagagatgtcaaactgtttgcagttgatcagatatgggcactttatgatgaattcgatgccatgccaagattctatgctagaataagacatgttaataccaccaacttcagagttaagtacacttggctggagcattctacagtgaatgatgatgaggaaaaatggattgataataaacttcctgtggcttgtgggaactttacgttaggaaacacagaggagtcacaagatcccctcatgttttctcacatggtttcgtgggttaaaggaagaaaaaggggttcttatgtaatatatccaaatataggtgaggtttgggctctttataagggctggagtatgcagtgggtctcagatgcagacagtcatagatcctac

SEQ ID NO: 30021 - DNA, 2262 bp, Zea Mays
ttcccaccaaaccattcggaccatcctcccacttgcgcggctgcgcccgccacgccaacgcgactacgcgagacgccaccaacccaagccactctcccccgtttctaggcttcacagcctcgccaacaactcccgtcctccacttgcccttctccgccaacagactgtccccggccgctgccattgccgattgctcacatccgcgttcgtgttcgcatccgcatcagggtcacctgcgccggcgagccatttgaaagggaggagtagcagactctcagaggtggacatgacgctgttgtgcgtgccgctggtggggcggacggtggaggagatgattacagacgcggcggcggccgccgccaccggcggcgacatggtcgagatccggcttgacttcatccaggggttccgcccgcgtgagcacctaccgcccctgctccgcggctgcccactcccggccctcgtcacctatcgacctgtctgggaaggaggccaatatgaaggtgatgacaccacaagatttgagacactacgtttagcaatggaattaggtgtagactatgttgatattgaattgaaggttgcagacaaatttatgagctttattgctggccataagccagagaaatgtaaacttattgtttcttcacataattatgaatatactccatcatgtgaggaaattacaaatcttgtcgctagtatacaagcagttggagctgatatagtgaaagttgcaacaaccgccaaggacattgtcgatgtatcacggatgttccaagtgatggtacactgccaagtgcctatgattggactcgtaatgagtgaaaaaggtttaatgtcaagagtgttagcgcccaagtttggtggatatcttacatttgggatactgaatgctacaaagacatcagcttctggacaaccaacagttgaggacttactggacatttacaacataaagtgtattgggcctgatacaaagattcttggtcttatagccaacccagtaaaacagagcaagagcccaattttacacaataaatgtcttcagtccattggatataatgctgtttatcttccacttcttggagataatcttgctagttttctggagacatactcatctcctgacttttcaggatttagttgctcacttcctttcaaagtagatgctgtacagtgttgtgatgaacatgatccagttgctaagtcaataggagccataaacactataattagaagaccagatggcaaattagtggggtacaatacggactacattggagctatatctgctattgaggatggcattggaggtccagggtcaaaggatgctgtcatctcaccattggctggtaggcttattgttgttgtaggagctgggggtgctggtaaggcaattgcttatggggcaaaggagaagggtgcgagggtagttatagcaaatcgcacctatgagaaggctgtacgtcttgccaatgcaattggtggtcaggccctgagattagaagacctggaaactttcagacctgaagaagggatgatccttgctaatgcaacatcattggggatgtacccaaatgttgatgaaagccttgggtttctatgatgtggtatttgatgccgtatatgccccaaaagttactcggcttcttcgagaagcagaagaatgtggagttaaagttgttagtggtgtggaaatgtttattagacaagccatgggtcaatttgagcatttcaccggtggtatagaagctcctgaaagcctgatgcgtgagatagcagcaaaatacacctagcaggctaatggcgaaaacctatctttgatgaatatttgcccaaagattttctcgggctgagtgaataaatgttttgcagttatcatgtttgctgttatgttagatttagccgacttgtcacctgcacactgtaagattatgttgccatgctatagtgttcttgtacctgcaatagaagagttgcaagaataaagagtcagcttagaaccaacgttatgatgaccaagggggaaaatatgcatcaaacaatgattcagttggcagttggttcagtgctgatcatggcggttatactgtcctgcataatttcattgtacggttccgatggcatatttctttttttggaaaaaggaaaatttattgataactcagaataatatcaagattatactgttacaaataaagaggctcaattggatgataatattagggtctaatagtgactatatatagagtacatggg

SEQ ID NO: 30022 - DNA, 2193 bp, Zea Mays
aacccaagccactctcccccgtttctaggcttcacagcctcgccaacaactcccgtcctccacttgcccttctccgccaacagactgtccccggccgctgccattgccgattgctcacatccgcgttcgtgttcgcatccgcatcagggtcacctgcgccggcgagccatttgaaagggaggagtagcagactctcagaggtggacatgacgctgttgtgcgtgccgctggtggggcggacggtggaggagatgattacagacgcggcggcggccgccgccaccggcggcgacatggtcgagatccggcttgacttcatccaggggttccgcccgcgtgagcacctaccgcccctgctccgcggctgcccactcccggccctcgtcacctatcgacctgtctgggaaggaggccaatatgaaggtgatgacaccacaagatttgagacactacgtttagcaatggaattaggtgtagactatgttgatattgaattgaaggttgcagacaaatttatgagctttattgctggccataagccagagaaatgtaaacttattgtttcttcacataattatgaatatactccatcatgtgaggaaattacaaatcttgtcgctagtatacaagcagttggagctgatatagtgaaagttgcaacaaccgccaaggacattgtcgatgtatcacggatgttccaagtgatggtacactgccaagtgcctatgattggactcgtaatgagtgaaaaaggtttaatgtcaagagtgttagcgcccaagtttggtggatatcttacatttgggatactgaatgctacaaagacatcagcttctggacaaccaacagttgaggacttactggacatttacaacataaagtgtattgggcctgatacaaagattcttggtcttatagccaacccagtaaaacagagcaagagcccaattttacacaataaatgtcttcagtccattggatataatgctgtttatcttccacttcttggagataatcttgctagttttctggagacatactcatctcctgacttttcaggatttagttgctcacttcctttcaaagtagatgctgtacagtgttgtgatgaacatgatccagttgctaagtcaataggagccataaacactataattagaagaccagatggcaaattagtggggtacaatacggactacattggagctatatctgctattgaggatggcattggagggtcaaaggatgctgtcatctcaccattggctggtaggcttattgttgttgtaggagctgggggtgctggtaaggcaattgcttatggggcaaaggagaagggtgcgagggtagttatagcaaatcgcacctatgagaaggctgtacgtcttgccaatgcaattggtggtcaggccctgagattagaagacctggaaactttcagacctgaagaagggatgatccttgctaatgcaacatcattggggatgtacccaaatgttgatggtactcctattccaaagaaagccttgggtttctatgatgtggtatttgatgccgtatatgccccaaaagttactcggcttcttcgagaagcagaagaatgtggagttaaagttgttagtggtgtggaaatgtttattagacaagccatgggtcaatttgagcatttcaccggtggtatagaagctcctgaaagcctgatgcgtgagatagcagcaaaatacacctagcaggctaatggcgaaaacctatctttgatgaatatttgcccaaagattttctcgggctgagtgaataaatgttttgcagttatcatgtttgctgttatgttagatttagccgacttgtcacctgcacactgtaagattatgttgccatgctatagtgttcttgtacctgcaatagaagagttgcaagaataaagagtcagcttagaaccaacgttatgatgaccaagggggaaaatatgcatcaaacaatgattcagttggcagttggttcagtgctgatcatggcggttatactgtcctgcataatttcattgtacggttccgatggcatatttctttttttggaaaaaggaaaatttattgataactcagaataatatcaagattatactgttacaaataaagaggctcaattggatgataatattagggtctaatagtgactatatatagagtacatggg

SEQ ID NO: 30023 - DNA, 841 bp, Zea Mays
cccattgcgtgttatcttattctggtattagtctgcccgaggcaaagcttacccatgacgaggcatgtgactagttaaagggtcctcggtcagtaggcctacatcgagaaggtccttaatcgactcagacggagacactacaccgagacttatttctcgtgcaagtcaaccgcccggtctcagctttattaatttcaacccaaagtctagtacctggcagaggtacatcttttccgatgttgaacccatcaaggcctttgacagatccaccatcaagttttatttttgaaaacattcccacccactgaagcatcacctttgttttaaaaacatttttgtatgctaaagcaaggctaagcatcataaaattcttttcaaaacgaatatcaaggaagggaaatcaattttcaaggaaggaaatgcatcaacggtttatcacaaaactcctatcacctaatgcatcaaataaggtgataaagattttaaaacatcaaggaggtggcgaatgcaccggggcttgcctgaataacattaggttagtgtttgttaggcgacgttcacttgacgagtatccctcgaccgagcacttgattgatttaaccatcttcaagttggtccattagcttcatcctgcggattagcccacgcttggggtcgacttggcttgtcttccgcatcacgcgattaattatcgtacctaattgaaatgcattatgcacatgaatgcatataaggaacaataacaccagatattacgatgctacgcaaaagagaaataacctacttaatgacgagacactgcagacactaattatcgatatattgttacttacgacaatca

SEQ ID NO: 30024 - DNA, 3848 bp, Zea Mays
ctctctcgcataaaaaaaaaatctggccgccgatgtgcttggactcgccagccgctgctgctaaggattgtttttacgcgcgctcttatcctctccacgccgctctgcacctgggatctttccaccgctccagcctgtcgatcccatctccctgggatttttacccgttgcgcttgccgtcttgattttccccacgcacgctctggtttctgatttatatcagctcgtcttccacctccgtctgtcgtacccgtgtggttgagctcggcttcgagctcccatcccccatgcgccgtccgtcacctcgtcctcggcgcgcgcctctgcttcctgccacgaagctcccatggccgccgagctcagcctttgctcctccctgcgtcgcgcgcctggcttgctctccagctcccgtgcacgcccggatcctcttcctcccaggggctcggccgcatctccatctcccagcaagcgccctaccgaagccctcccatggcgttgttcctccctggtgccgagtctctctctgccaatcgcccatggcgcccagccgcttggccttcctggtactcgctctccctcagtgccctgtcccttggccagccctgagggtgtgcagggtatgccaccgctcagggcccccaatatccgtaggaccccgtatacctagataatgtccaaatacatatatgttacaggtaaatctctattctcgttttttgttatgtctctgattttttggcaattatctcttcgaggtcgtgcaacattttgctaatgacgaatactaaatattaattgatgcgggaaggtcggaaggtgttgtacatatgtgcttgtggcgttgctcaattctagcctaccggagggtccaccctgataacctacgttgtttaatccaagtttagtttgctgaaatttgtttccagaaaatttgctctaatgtatttaaatttggtttactgtgcattttaaggtttaggctagtttgacaaattaaaagtaaaaaactcgctctcaaagcaaatatagagttatattacataatatgtataattttataactcataaaatattgtaacagtctccagtcatatcattttaaaaaaaaatgtgtaaatcatcaacttcttttatttttcagatatcatttaaagttgaaaaatagcagaatcaaactttcgtataggacctctatgtagattttcgcttagggccccccaaaatgtcaggaccggccctgatcctctggctgccgcccctccctattcttggtggtcgagtcttctcccatggatgctggccgtcgctgccctccctggtgctcgacaaaatgggtgacctacctcattctcgaccttgctgtggtggtcggtcacgccatggtcgtggatgctctacattctcgctatcgcgtctttaattgccgttggaaaggaaggtttcaggtttcggagctgatgaagtaagcgaagctcgaacgacgctctctaggtgtccgtcggatttccgatgccagacgtcgtcctctctgttccgtgtctccctgcatcttcatcgatgtagcatcggtcgtcaacctcgccgtggcagctctcaaactaggagtgttggtgcaaaaccgtcgtcaccccgtcattgcaggtcgctgcgctatcgtttgcttatgtttcatcatctgcgccatggcacttgctattgtccctagtttaattctatgtgtggttaatggtcgaagtctagattgcaaatgccaattttaatgaagggtatgtgtaggcatatatgtgatgagctgtcgaattaatgatatgtaagataggtctagtgtttctatcggctagttgtcatattcgactagaattatgtgagccaattatatggatacaatgatgacttgctttagaaattgtcgtgtcgatgttcagcatcagtgaaatgtcatagatgggtcgtcggtcatttagattaataaccttgtttaggtaatcaagtaaaatctgattgtgcttgagctgaatttttgctacacgcatcctcattattgtggtaatagttgagtgaagcaaatcatgttttctgtgaatgtgtgatatataaaagttgtagataatttctttatcttgctggtgtaaaataatcatggccataggtctagtagtttaaaagatatgattttcttaagtccagtttcagaatctgtccaaaattctgtacaggtttcgaaaattggattgtttggctaaactaaactgagaatcagcccttagtaattatagaagaattgtagtacttttcttaagctttccaacaaattttggatcaccctttttggtgatctataagttaagttacagctgtttgaagtgggatctctgaatctgtccaaatttggacagcagagcctttctcatgtcttttgactttgatatgtattgaattaacatgtgatgtttataaatgaattgtaaacaattctattagctttctaaaaatttctaggatcacctgatttggatgcctgaaactctagttatggattttttaagtaagtagtcgaattctgtccaaatctggataaaaattacgtttagtacagtttgacctttctaaaggtcgaatcttattatgatgataatacaaaagttatagaggactttataagctttacataaagtcctagtttactatttttggatgcatatcttgtgagttatgagctaaacaaatagttgctgttctgctgtccaaattcagcaaatatgaaatgattgcttggaatttcttttgtgtgggtaactagatttggttagttcttgtcttgattaataaagtcttgtagttgcatatggttatttcttttctttctcaatgctctacttgttagaatatttagtgtgctactttgtttaattggtatgctatacgaggtagcttagagatagttgtttagaaagtaataaattgtatctatctatattttagtcctaaatgtctagtattgatgagtctaaattttgctagattttcagtgttatgatctagctaaagaaagtataggaattatgtatggtttattattctgatgtttgaattaggtctgattaaaactggaagatcctgattgttgtgttagaacgtcataggtatctattgtttccctataagagttttaatgcatgctttaagtgtttaatcctcgtccatatagtattatgttgtagtatgttattcctctgtatgttcattcatgtgcattatgcatatcatttaggtacgttaagtgatcacgtgatgcggaagatcagagccaagtcattcccaagatgatgcagagagtgggcatctccgcaagacgatgtcgtcagtcggaccaacctaaagatggataatctgaacgagtgccaagacaaagtgtgacggaacctcccaagtcattaggcccgcctacagttgtccttgtccaacggacctcggacaaccctgtaaatgcacataatcacttgacaagttcgatatctgtatcctttacctttcccaagagtgtttcacccgtcacgcagatattacaacacatcggaggaacgaataagcggaagcaaattacaataacttatcttacattcattaaaatatagaaagagtgttatgattacatcaccaggatataagagtgcataagtattattattacaaccatgggaggcaaaaacccctcccacataaaagtatattgtttttcaaaaggaaagaccacgtccttctgcaaccacgttactgttgaggttcgtccttgggcaccacatccttgggcaccaccttagtgcaaaaacagcagaagtctgttgttt

SEQ ID NO: 30025 - DNA, 1469 bp, Zea Mays
ctctctcgcataaaaaaaaaatctggccgccgatgtgcttggactcgccagccgctgctgctaaggattgtttttacgcgcgctcttatcctctccacgccgctctgcacctgggatctttccaccgctccagcctgtcgatcccatctccctgggatttttacccgttgcgcttgccgtcttgattttccccacgcacgctctggtttctgatttatatcagctcgtcttccacctccgtctgtcgtacccgtgtggttgagctcggcttcgagctcccatcccccatgcgccgtccgtcacctcgtcctcggcgcgcgcctctgcttcctggtagccgcgcccagcttcctctcttccgcgcgccccctgcttctccttggccggggcttcatcctctccctgctcgccatggctggtcgagcttttttccagccacgaagctcccatggccgccgagctcagcctttgctcctccctgcgtcgcgcgcctggcttgctctccagctcccgtgcacgcccggatcctcttcctcccaggggctcggccgcatctccatctcccagcaagcgccctaccgaagccctcccatggcgttgttcctccctggtgccgagtctctctctgccaatcgcccatggcgcccagccgcttggccttcctggtactcgctctccctcagtgccctgtcccttgtacgacgcccttcctgctccagtttgtatttttttatagctggccgttgttcacctcgccgtcatcgacctcccctcgccctcatcctctgcagggccagccctgagggtgtgcagggtatgccaccgctcagggcccccaatatccgtaggaccccgtatacctagataatgtccaaatacatatatgttacaggtacgttaagtgatcacgtgatgcggaagatcagagccaagtcattcccaagatgatgcagagagtgggcatctccgcaagacgatgtcgtcagtcggaccaacctaaagatggataatctgaacgagtgccaagacaaagtgtgacggaacctcccaagtcattaggcccgcctacagttgtccttgtccaacggacctcggacaaccctgtaaatgcacataatcacttgacaagttcgatatctgtatcctttacctttcccaagagtgtttcacccgtcacgcagatattacaacacatcggaggaacgaataagcggaagcaaattacaataacttatcttacattcattaaaatatagaaagagtgttatgattacatcaccaggatataagagtgcataagtattattattacaaccatgggaggcaaaaacccctcccacataaaagtatattgtttttcaaaaggaaagaccacgtccttctgcaaccacgttactgttgaggttcgtccttgggcaccacatccttgggcaccaccttagtgcaaaaacagcagaagtctgttgttt

SEQ ID NO: 30026 - DNA, 3178 bp, Zea Mays
ctttccaccgctccagcctgtcgatcccatctccctgggatttttacccgttgcgcttgccgtcttgattttccccacgcacgctctggtttctgatttatatcagctcgtcttccacctccgtctgtcgtacccgtgtggttgagctcggcttcgagctcccatcccccatgcgccgtccgtcacctcgtcctcggcgcgcgcctctgcttcctggtagccgcgcccagcttcctctcttccgcgcgccccctgcttctccttggccggggcttcatcctctccctgctcgccatggctggtcgagcttttttccagccacgaagctcccatggccgccgagctcagcctttgctcctccctgcgtcgcgcgcctggcttgctctccagctcccgtgcacgcccggatcctcttcctcccaggggctcggccgcatctccatctcccagcaagcgccctaccgaagccctcccatggcgttgttcctccctggtgccgagtctctctctgccaatcgcccatggcgcccagccgcttggccttcctggtactcgctctccctcagtgccctgtcccttgtacgacgcccttcctgctccagtttgtatttttttatagctggccgttgttcacctcgccgtcatcgacctcccctcgccctcatcctctgcagggccagccctgagggtgtgcagggtatgccaccgctcagggcccccaatatccgtaggaccccgtatacctagataatgtccaaatacatatatgttacaggtttcggagctgatgaagtaagcgaagctcgaacgacgctctctaggtgtccgtcggatttccgatgccagacgtcgtcctctctgttccgtgtctccctgcatcttcatcgatgtagcatcggtcgtcaacctcgccgtggcagctctcaaactaggagtgttggtgcaaaaccgtcgtcaccccgtcattgcaggtcgctgcgctatcgtttgcttatgtttcatcatctgcgccatggcacttgctattgtccctagtttaattctatgtgtggttaatggtcgaagtctagattgcaaatgccaattttaatgaagggtatgtgtaggcatatatgtgatgagctgtcgaattaatgatatgtaagataggtctagtgtttctatcggctagttgtcatattcgactagaattatgtgagccaattatatggatacaatgatgacttgctttagaaattgtcgtgtcgatgttcagcatcagtgaaatgtcatagatgggtcgtcggtcatttagattaataaccttgtttaggtaatcaagtaaaatctgattgtgcttgagctgaatttttgctacacgcatcctcattattgtggtaatagttgagtgaagcaaatcatgttttctgtgaatgtgtgatatataaaagttgtagataatttctttatcttgctggtgtaaaataatcatggccataggtctagtagtttaaaagatatgattttcttaagtccagtttcagaatctgtccaaaattctgtacaggtttcgaaaattggattgtttggctaaactaaactgagaatcagcccttagtaattatagaagaattgtagtacttttcttaagctttccaacaaattttggatcaccctttttggtgatctataagttaagttacagctgtttgaagtgggatctctgaatctgtccaaatttggacagcagagcctttctcatgtcttttgactttgatatgtattgaattaacatgtgatgtttataaatgaattgtaaacaattctattagctttctaaaaatttctaggatcacctgatttggatgcctgaaactctagttatggattttttaagtaagtagtcgaattctgtccaaatctggataaaaattacgtttagtacagtttgacctttctaaaggtcgaatcttattatgatgataatacaaaagttatagaggactttataagctttacataaagtcctagtttactatttttggatgcatatcttgtgagttatgagctaaacaaatagttgctgttctgctgtccaaattcagcaaatatgaaatgattgcttggaatttcttttgtgtgggtaactagatttggttagttcttgtcttgattaataaagtcttgtagttgcatatggttatttcttttctttctcaatgctctacttgttagaatatttagtgtgctactttgtttaattggtatgctatacgaggtagcttagagatagttgtttagaaagtaataaattgtatctatctatattttagtcctaaatgtctagtattgatgagtctaaattttgctagattttcagtgttatgatctagctaaagaaagtataggaattatgtatggtttattattctgatgtttgaattaggtctgattaaaactggaagatcctgattgttgtgttagaacgtcataggtatctattgtttccctataagagttttaatgcatgctttaagtgtttaatcctcgtccatatagtattatgttgtagtatgttattcctctgtatgttcattcatgtgcattatgcatatcatttaggtacgttaagtgatcacgtgatgcggaagatcagagccaagtcattcccaagatgatgcagagagtgggcatctccgcaagacgatgtcgtcagtcggaccaacctaaagatggataatctgaacgagtgccaagacaaagtgtgacggaacctcccaagtcattaggcccgcctacagttgtccttgtccaacggacctcggacaaccctgtaaatgcacataatcacttgacaagttcgatatctgtatcctttacctttcccaagagtgtttcacccgtcacgcagatattacaacacatcggaggaacgaataagcggaagcaaattacaataacttatcttacattcattaaaatatagaaagagtgttatgattacatcaccaggatataagagtgcataagtattattattacaaccatgggaggcaaaaacccctcccacataaaagtatattgtttttcaaaaggaaagaccacgtccttctgcaaccacgttactgttgaggttcgtccttgggcaccacatccttgggcaccaccttagtgcaaaaacagcagaagtctgttgttt

SEQ ID NO: 30027 - DNA, 2190 bp, Zea Mays
ttccacctccgtctgtcgtacccgtgtggttgagctcggcttcgagctcccatcccccatgcgccgtccgtcacctcgtcctcggcgcgcgcctctgcttcctggtagccgcgcccagcttcctctcttccgcgcgccccctgcttctccttggccggggcttcatcctctccctgctcgccatggctggtcgagcttttttccagccacgaagctcccatggccgccgagctcagcctttgctcctccctgcgtcgcgcgcctggcttgctctccagctcccgtgcacgcccggatcctcttcctcccaggggctcggccgcatctccatctcccagcaagcgccctaccgaagccctcccatggcgttgttcctccctggtgccgagtctctctctgccaatcgcccatggcgcccagccgcttggccttcctggtactcgctctccctcagtgccctgtcccttgtacgacgcccttcctgctccagtttgtatttttttatagctggccgttgttcacctcgccgtcatcgacctcccctcgccctcatcctctgcagggccagccctgagggtgtgcagggtatgccaccgctcagggcccccaatatccgtaggaccccgtatacctagataatgtccaaatacatatatgttacaggtaaatctctattctcgttttttgttatgtctctgattttttggcaattatctcttcgaggtcgtgcaacattttgctaatgacgaatactaaatattaattgatgcgggaaggtcggaaggtgttgtacatatgtgcttgtggcgttgctcaattctagcctaccggagggtccaccctgataacctacgttgtttaatccaagtttagtttgctgaaatttgtttccagaaaatttgctctaatgtatttaaatttggtttactgtgcattttaaggtttaggctagtttgacaaattaaaagtaaaaaactcgctctcaaagcaaatatagagttatattacataatatgtataattttataactcataaaatattgtaacagtctccagtcatatcattttaaaaaaaaatgtgtaaatcatcaacttcttttatttttcagatatcatttaaagttgaaaaatagcagaatcaaactttcgtataggacctctatgtagattttcgcttagggccccccaaaatgtcaggaccggccctgatcctctggctgccgcccctccctattcttggtggtcgagtcttctcccatggatgctggccgtcgctgccctccctggtgctcgacaaaatgggtgacctacctcattctcgaccttgctgtggtggtcggtcacgccatggtcgtggatgctctacattctcgctatcgcgtctttaattgccgttggaaaggaaggtttcaggtttcggagctgatgaagtaagcgaagctcgaacgacgctctctaggtgtccgtcggatttccgatgccagacgtcgtcctctctgttccgtgtctccctgcatcttcatcgatgtagcatcggtcgtcaacctcgccgtggcagctctcaaactaggagtgttggtgcaaaaccgtcgtcaccccgtcattgcagttaggtacgttaagtgatcacgtgatgcggaagatcagagccaagtcattcccaagatgatgcagagagtgggcatctccgcaagacgatgtcgtcagtcggaccaacctaaagatggataatctgaacgagtgccaagacaaagtgtgacggaacctcccaagtcattaggcccgcctacagttgtccttgtccaacggacctcggacaaccctgtaaatgcacataatcacttgacaagttcgatatctgtatcctttacctttcccaagagtgtttcacccgtcacgcagatattacaacacatcggaggaacgaataagcggaagcaaattacaataacttatcttacattcattaaaatatagaaagagtgttatgattacatcaccaggatataagagtgcataagtattattattacaaccatgggaggcaaaaacccctcccacataaaagtatattgtttttcaaaaggaaagaccacgtccttctgcaaccacgttactgttgaggttcgtccttgggcaccacatccttgggcaccaccttagtgcaaaaacagcagaagtctgttgttt

SEQ ID NO: 30028 - DNA, 2947 bp, Zea Mays
ttccacctccgtctgtcgtacccgtgtggttgagctcggcttcgagctcccatcccccatgcgccgtccgtcacctcgtcctcggcgcgcgcctctgcttcctggtagccgcgcccagcttcctctcttccgcgcgccccctgcttctccttggccggggcttcatcctctccctgctcgccatggctggtcgagcttttttccagccacgaagctcccatggccgccgagctcagcctttgctcctccctgcgtcgcgcgcctggcttgctctccagctcccgtgcacgcccggatcctcttcctcccaggggctcggccgcatctccatctcccagcaagcgccctaccgaagccctcccatggcgttgttcctccctggtgccgagtctctctctgccaatcgcccatggcgcccagccgcttggccttcctgggccagccctgagggtgtgcagggtatgccaccgctcagggcccccaatatccgtaggaccccgtatacctagataatgtccaaatacatatatgttacaggtttcaggtttcggagctgatgaagtaagcgaagctcgaacgacgctctctaggtgtccgtcggatttccgatgccagacgtcgtcctctctgttccgtgtctccctgcatcttcatcgatgtagcatcggtcgtcaacctcgccgtggcagctctcaaactaggagtgttggtgcaaaaccgtcgtcaccccgtcattgcaggtcgctgcgctatcgtttgcttatgtttcatcatctgcgccatggcacttgctattgtccctagtttaattctatgtgtggttaatggtcgaagtctagattgcaaatgccaattttaatgaagggtatgtgtaggcatatatgtgatgagctgtcgaattaatgatatgtaagataggtctagtgtttctatcggctagttgtcatattcgactagaattatgtgagccaattatatggatacaatgatgacttgctttagaaattgtcgtgtcgatgttcagcatcagtgaaatgtcatagatgggtcgtcggtcatttagattaataaccttgtttaggtaatcaagtaaaatctgattgtgcttgagctgaatttttgctacacgcatcctcattattgtggtaatagttgagtgaagcaaatcatgttttctgtgaatgtgtgatatataaaagttgtagataatttctttatcttgctggtgtaaaataatcatggccataggtctagtagtttaaaagatatgattttcttaagtccagtttcagaatctgtccaaaattctgtacaggtttcgaaaattggattgtttggctaaactaaactgagaatcagcccttagtaattatagaagaattgtagtacttttcttaagctttccaacaaattttggatcaccctttttggtgatctataagttaagttacagctgtttgaagtgggatctctgaatctgtccaaatttggacagcagagcctttctcatgtcttttgactttgatatgtattgaattaacatgtgatgtttataaatgaattgtaaacaattctattagctttctaaaaatttctaggatcacctgatttggatgcctgaaactctagttatggattttttaagtaagtagtcgaattctgtccaaatctggataaaaattacgtttagtacagtttgacctttctaaaggtcgaatcttattatgatgataatacaaaagttatagaggactttataagctttacataaagtcctagtttactatttttggatgcatatcttgtgagttatgagctaaacaaatagttgctgttctgctgtccaaattcagcaaatatgaaatgattgcttggaatttcttttgtgtgggtaactagatttggttagttcttgtcttgattaataaagtcttgtagttgcatatggttatttcttttctttctcaatgctctacttgttagaatatttagtgtgctactttgtttaattggtatgctatacgaggtagcttagagatagttgtttagaaagtaataaattgtatctatctatattttagtcctaaatgtctagtattgatgagtctaaattttgctagattttcagtgttatgatctagctaaagaaagtataggaattatgtatggtttattattctgatgtttgaattaggtctgattaaaactggaagatcctgattgttgtgttagaacgtcataggtatctattgtttccctataagagttttaatgcatgctttaagtgtttaatcctcgtccatatagtattatgttgtagtatgttattcctctgtatgttcattcatgtgcattatgcatatcatttaggtacgttaagtgatcacgtgatgcggaagatcagagccaagtcattcccaagatgatgcagagagtgggcatctccgcaagacgatgtcgtcagtcggaccaacctaaagatggataatctgaacgagtgccaagacaaagtgtgacggaacctcccaagtcattaggcccgcctacagttgtccttgtccaacggacctcggacaaccctgtaaatgcacataatcacttgacaagttcgatatctgtatcctttacctttcccaagagtgtttcacccgtcacgcagatattacaacacatcggaggaacgaataagcggaagcaaattacaataacttatcttacattcattaaaatatagaaagagtgttatgattacatcaccaggatataagagtgcataagtattattattacaaccatgggaggcaaaaacccctcccacataaaagtatattgtttttcaaaaggaaagaccacgtccttctgcaaccacgttactgttgaggttcgtccttgggcaccacatccttgggcaccaccttagtgcaaaaacagcagaagtctgttgttt

SEQ ID NO: 30029 - DNA, 1250 bp, Zea Mays
cataaaatcaacgcatggcacactgctgtatgacagcgttactggcttactgcagcggatctggttccgtggaccgcgagagaggtgagtaggattacaggaaatccaatccaacccgcgccggctgcgtggccactgccgccgctcggtcttgtgcttgtccaggtccaaccgtccaaggataaaaaatgagcacgaacctgggaggagcctcttgcttcggcttcggcttgactcagatgcagcccgccgccgttaggctccggttgccgcctgctcgcgccgcggacacttcgtcctcccagtcgccggcgcgcctgacggcggtgctggagcaggtggaccagttgctaagccaggggaacgacatggccgcgctctccctcgtgcgcagtacgcaggggggtgacggcgggctccgggcctttggcgccgccaggcaggtatattttggtggtggggtgagaaacttggttcttgatacaattggtcactatctcagccagaagtatcacaacagagttatccagcatgaagctggtcacttcttgatagcttacttgcttggagtgcttccaaaaggatacacaatcacaagcttagatacacttatgaatcaaggatcgcttaatgtgcaagctggagcagcttttgtggactatgagttccttgaagagatcaatacaggcaagctatctgccacgatggttaacaagttctcgtgtatagcactagccggagttgcagcagagtatcttctgtatggacgtgcagaaggaggattagccgacatcaataagcttgatggattgctcaagggtttgggtttcacccaaaagaaagctgattcacaggatcgcagcttgcagaggcaatgtctacagggaagtcggtgggctcttgcatccaagtcatagaagagtgtataagcactgacgatatttaacgtggatatgttgctgaccctacgttgtctcaatggcatgttatcaacaacaaatcaaggcttgtcaatccaaaagaggatttgagtattaaatccactcttaaggctagtttgagaaccttatttttttaagagattttcttttttttttaagataaattagtttattttctcttgagaaaatagaaatctcttggaaaattggagttgctaaactagcccttagtcaaaaatgactagtagagaatttaatcttcaattgccttctggatttacgtaaccgaacaagctctattctatgtta

SEQ ID NO: 30030 - DNA, 1287 bp, Zea Mays
cataaaatcaacgcatggcacactgctgtatgacagcgttactggcttactgcagcggatctggttccgtggaccgcgagagaggtgagtaggattacaggaaatccaatccaacccgcgccggctgcgtggccactgccgccgctcggtcttgtgcttgtccaggtccaaccgtccaaggataaaaaatgagcacgaacctgggaggagcctcttgcttcggcttcggcttgactcagatgcagcccgccgccgttaggctccggttgccgcctgctcgcgccgcggacacttcgtcctcccagtcgccggcgcgcctgacggcggtgctggagcaggtggaccagttgctaagccaggggaacgacatggccgcgctctccctcgtgcgcagtacgcaggggggtgacggcgggctccgggcctttggcgccgccaggcaggtatattttggtggtggggtgagaaacttggttcttgatacaattggtcactatctcagccagaagtatcacaacagagttatccagcatgaagctggtcacttcttgatagcttacttgcttggagtgcttccaaaaggatacacaatcacaagcttagatacacttatgaatcaaggatcgcttaatgtgcaagctggagcagcttttgtggactatgagttccttgaagagatcaatacaggcaagctatctgccacgatggttaacaagttctcgtgtatagcactagccggagttgcagcagagtatcttctgtatggacgtgcagaaggaggattagccgacatcaataagggtttgggtttcacccaaaagaaagctgattcacaggtgagatgggctgtgctgaatactgttctcatactgcgtcgccatgaaaaagctagatcgcagcttgcagaggcaatgtctacagggaagtcggtgggctcttgcatccaagtcatagaagagtgtataagcactgacgatatttaacgtggatatgttgctgaccctacgttgtctcaatggcatgttatcaacaacaaatcaaggcttgtcaatccaaaagaggatttgagtattaaatccactcttaaggctagtttgagaaccttatttttttaagagattttcttttttttttaagataaattagtttattttctcttgagaaaatagaaatctcttggaaaattggagttgctaaactagcccttagtcaaaaatgactagtagagaatttaatcttcaattgccttctggatttacgtaaccgaacaagctctattctatgtta

SEQ ID NO: 30031 - DNA, 1461 bp, Zea Mays
cataaaatcaacgcatggcacactgctgtatgacagcgttactggcttactgcagcggatctggttccgtggaccgcgagagaggtgagtaggattacaggaaatccaatccaacccgcgccggctgcgtggccactgccgccgctcggtcttgtgcttgtccaggtccaaccgtccaaggataaaaaatgagcacgaacctgggaggagcctcttgcttcggcttcggcttgactcagatgcagcccgccgccgttaggctccggttgccgcctgctcgcgccgcggacacttcgtcctcccagtcgccggcgcgcctgacggcggtgctggagcaggtggaccagttgctaagccaggggaacgacatggccgcgctctccctcgtgcgcagtacgcaggggggtgacggcgggctccgggcctttggcgccgccaggcaggtacctcaacgactttataaattggatgagcttaaactgaatgggattgatacttctgctttcctatcacccgtagatctgacactaggatcaattgagagaaatctccaaatcgctgcagttctgggagggttttctgtatcagctgcattggaactttctcaactccaaatcctgtttctcatactaggtctactatctttgtggtccgtggactttgtatattttggtggtggggtgagaaacttggttcttgatacaattggtcactatctcagccagaagtatcacaacagagttatccagcatgaagctggtcacttcttgatagcttacttgcttggagtgcttccaaaaggatacacaatcacaagcttagatacacttatgaatcaaggatcgcttaatgtgcaagctggagcagcttttgtggactatgagttccttgaagagatcaatacaggcaagctatctgccacgatggttaacaagttctcgtgtatagcactagccggagttgcagcagagtatcttctgtatggacgtgcagaaggaggattagccgacatcaataagcttgatggattgctcaagggtttgggtttcacccaaaagaaagctgattcacagcttgcagaggcaatgtctacagggaagtcggtgggctcttgcatccaagtcatagaagagtgtataagcactgacgatatttaacgtggatatgttgctgaccctacgttgtctcaatggcatgttatcaacaacaaatcaaggcttgtcaatccaaaagaggatttgagtattaaatccactcttaaggctagtttgagaaccttatttttttaagagattttcttttttttttaagataaattagtttattttctcttgagaaaatagaaatctcttggaaaattggagttgctaaactagcccttagtcaaaaatgactagtagagaatttaatcttcaattgccttctggatttacgtaaccgaacaagctctattctatgtta

SEQ ID NO: 30032 - DNA, 1394 bp, Zea Mays
cataaaatcaacgcatggcacactgctgtatgacagcgttactggcttactgcagcggatctggttccgtggaccgcgagagaggtgagtaggattacaggaaatccaatccaacccgcgccggctgcgtggccactgccgccgctcggtcttgtgcttgtccaggtccaaccgtccaaggataaaaaatgagcacgaacctgggaggagcctcttgcttcggcttcggcttgactcagatgcagcccgccgccgttaggctccggttgccgcctgctcgcgccgcggacacttcgtcctcccagtcgccggcgcgcctgacggcggtgctggagcaggtggaccagttgctaagccaggggaacgacatggccgcgctctccctcgtgcgcagtacgcaggggggtgacggcgggctccgggcctttggcgccgccaggcagatctgacactaggatcaattgagagaaatctccaaatcgctgcagttctgggagggttttctgtatcagctgcattggaactttctcaactccaaatcctgtttctcatactaggtctactatctttgtggtccgtggactttgtatattttggtggtggggtgagaaacttggttcttgatacaattggtcactatctcagccagaagtatcacaacagagttatccagcatgaagctggtcacttcttgatagcttacttgcttggagtgcttccaaaaggatacacaatcacaagcttagatacacttatgaatcaaggatcgcttaatgtgcaagctggagcagcttttgtggactatgagttccttgaagagatcaatacaggcaagctatctgccacgatggttaacaagttctcgtgtatagcactagccggagttgcagcagagtatcttctgtatggacgtgcagaaggaggattagccgacatcaataaggtgagatgggctgtgctgaatactgttctcatactgcgtcgccatgaaaaagctagatcgcagcttgcagaggcaatgtctacagggaagtcggtgggctcttgcatccaagtcatagaagagtgtataagcactgacgatatttaacgtggatatgttgctgaccctacgttgtctcaatggcatgttatcaacaacaaatcaaggcttgtcaatccaaaagaggatttgagtattaaatccactcttaaggctagtttgagaaccttatttttttaagagattttcttttttttttaagataaattagtttattttctcttgagaaaatagaaatctcttggaaaattggagttgctaaactagcccttagtcaaaaatgactagtagagaatttaatcttcaattgccttctggatttacgtaaccgaacaagctctattctatgtta

SEQ ID NO: 30033 - DNA, 1444 bp, Zea Mays
cataaaatcaacgcatggcacactgctgtatgacagcgttactggcttactgcagcggatctggttccgtggaccgcgagagaggtgagtaggattacaggaaatccaatccaacccgcgccggctgcgtggccactgccgccgctcggtcttgtgcttgtccaggtccaaccgtccaaggataaaaaatgagcacgaacctgggaggagcctcttgcttcggcttcggcttgactcagatgcagcccgccgccgttaggctccggttgccgcctgctcgcgccgcggacacttcgtcctcccagtcgccggcgcgcctgacggcggtgctggagcaggtggaccagttgctaagccaggggaacgacatggccgcgctctccctcgtgcgcagtacgcaggggggtgacggcgggctccgggcctttggcgccgccagatctgacactaggatcaattgagagaaatctccaaatcgctgcagttctgggagggttttctgtatcagctgcattggaactttctcaactccaaatcctgtttctcatactaggtctactatctttgtggtccgtggactttgtatattttggtggtggggtgagaaacttggttcttgatacaattggtcactatctcagccagaagtatcacaacagagttatccagcatgaagctggtcacttcttgatagcttacttgcttggagtgcttccaaaaggatacacaatcacaagcttagatacacttatgaatcaaggatcgcttaatgtgcaagctggagcagcttttgtggactatgagttccttgaagagatcaatacaggcaagctatctgccacgatggttaacaagttctcgtgtatagcactagccggagttgcagcagagtatcttctgtatggacgtgcagaaggaggattagccgacatcaataagcttgatggattgctcaagggtttgggtttcacccaaaagaaagctgattcacaggtgagatgggctgtgctgaatactgttctcatactgcgtcgccatgaaaaagctagatcgcagcttgcagaggcaatgtctacagggaagtcggtgggctcttgcatccaagtcatagaagagtgtataagcactgacgatatttaacgtggatatgttgctgaccctacgttgtctcaatggcatgttatcaacaacaaatcaaggcttgtcaatccaaaagaggatttgagtattaaatccactcttaaggctagtttgagaaccttatttttttaagagattttcttttttttttaagataaattagtttattttctcttgagaaaatagaaatctcttggaaaattggagttgctaaactagcccttagtcaaaaatgactagtagagaatttaatcttcaattgccttctggatttacgtaaccgaacaagctctattctatgtta

SEQ ID NO: 30034 - DNA, 473 bp, Zea Mays
cttttccaggggaagaaacatgatttacctttttttccatttttgatctgacactaggatcaattgagagaaatctccaaatcgctgcagttctgggagggttttctgtatcagctgcattggaactttctcaactccaaatcctgtttctcatactaggtctactatctttgtggtccgtggactttgtatattttggtggtggggtgagaaacttggttcttgatacaattggtcactatctcagccagaagtatcacaacagagttatccagcatgaagctggtcacttcttgatagcttacttgcttggagtgcttccaaaaggatacacaatcacaagcttagatacacttatgaatcaaggatcgcttaatgtgcaagctggagcagcttttgtggactatgagttccttgaagagatcaatacaggcaagctatctgccacgtacccgcgggaggaaaaagggcga

SEQ ID NO: 30035 - DNA, 566 bp, Zea Mays
caaaagctgaagacaatgcaagatatatctgaagacattttgattaggatgacatggattacatcttcattcgcaactttcttaacacattttagtagcatgagataactttcacaatgaaactttgatgtatacttctccaaaaataatggtcaaccgtatacatgttagcaaaaacgaactacaactacaaagcctatttgcacgttttttgtcctgacacaagggggggagaggattaagttagcttcgttgtgacctcaaaggaaagaagtgttctacttgtacattactacattacatggaatttttttgcagaatggcttccttagcagaacgggtgccctagtcaggctttgtgtattcaagcagcatatgtggtgatctatagatgtttaccaatgtccaatacagaacttcttccacttctaactctccttcagctcttgctgcatatattccttcacagatgtcaagtagcctacaaaaggcaggtatatcatttttactcctagaaaaaacaaatactgacaataaattccaaaaatgtttcagtttgtttgtgc

SEQ ID NO: 30036 - DNA, 2302 bp, Zea Mays
gtttttctccctgacgatgattagctctgttcaaaagtgtatcacatttcacaagaaacaagcttgcatatatgtcctccaactgtccagatcagtaaaagtatcatgttgtagcattttatgcagaattgagaacaatactgtaaaggacaaataaataaatacattgactacgataacaaaaagcaaacgtaattgcagctagtgattaaatacagataccttattacatgtcatcaattttttcctcaaatatttttttcatgaacatgcaagagagtggtgtatcattataatacaaagggtaaagaatcctgattaaactcacatacccataggctcacagatggcaaatatgcctttccacatacgtgaacaaacaagttggaacgatctttttttctcgatcgcgcagaagagttgtgcatcattatattaagaaaaaggggtccaacataaaacgaaacaaaagaaaaaaagaaagaaagaaagaggaaaggaaaaaggcctcctcgcggtgacaaaaatgaaaatacaagaaagggtccacaagagaaactaaactacaacaaccatgcaaagactagtgagctgattatttttttttcgcaggagaactgcgcgatattatattaaagaagaaggacagttacagaaaaaacaactgaggcgcctatggcggctagtaacaggcatacagaaacccatccatgactaaataagaaactaacacaagttaccacaatgctagctaactagcagggatgcccggaatgggggcggtgagcaaagataacttctttgcaccagccatctcccataggtgaacctccaactcaactcttctaatagcatcagcaatactggggctcttattgtcaaaaacacagccattgtgttgcttccacaaggtccaaactcccagaatgactagagaattgaggccgtcccttgcaattccagagactttggtacataacgttctccaccattcaagaaaagcactatcctcagattggggggcaagaaactgcaggttcacttgaagaagcaatttaaaccagaattctcgagcaaagacacatccgatcaacatatggtccaaggtttcttgatcctggtcacatagtggacatctctctggatggtccatacctcttttctgcagcctgtctgctgtccaaaccttcctgtgtgcgaccaaccacatgaaaaacttggtttttggaagagcccaagttttccatattctatgaaaaggttcaaactcagaagatcccaaaaagaaacccctatatgcttcccttgaggagaactttccgtttgcagctagacggaagaaatgtttgtcttcaacttgaggtcttaaaacaattgagtcaattaaatcccacaaaatgagaaattcattgataattccaacaaaaagagctccttgaatgtcagaaatccagctctgattagagatagcatccaccactgttctcttgctaacccgtctcttaggaatgatcccaaataatcgagggactaactctgcaattctgtgacccgataaccacctatcagtccagaaaaaggttgtagccccattaccaagctcagtttgcatagccatggagaagaaatctttgacctttttagggacctggatagcaagagaggcccacaggcgagatggctcagttttagccagccaaagccatcgcattctaagagaccatgcaagttctttcatgctggaaatgcctagaccacccaattcgcgaggcctgcaaacaattccccaagccacatgacagtgaccaccttttacatcttttcggcctcgccacagaaaacctcgacgaatcttatcaatggctttaagggcccaagcaaggtcaacagccatggccaagtagatcaccatccctgtgcggacatgctggacgtgcaccttacgaccagctttagtcaataactcagccttccatccagatagttgatttgcaatcttatcaatgatgggttgtacttggagttttgaaagctttttaatggcaagcggtaaacccagatagcggcaagggaattcagctaactcacaagacaacatattctgcagcaaagcaaggtcctgatctccacatctaataggatacacgctgcttttctgaacattcgtacgtaaacctgaagcatctccaaacagctgaagacaatccaaaataacgttgatattcaaggctgccggccgaagaaagatcaccacatcatccgcatagagagaaacccggtgttgcagtgcccgaggagcaag

SEQ ID NO: 30037 - DNA, 93 bp, Zea Mays
tgatttcgctttagtccatgtggtatctggaactgaatgtgttcttggaagctgcccatcttgtgtttccctctgactttcaacaacatcata

SEQ ID NO: 30038 - DNA, 564 bp, Zea Mays
cagacactggttccccttggctagacagatttcaaactgaatatgaggttgtctctatcagcagcaagggaagaaaacttgacggttaatcctggaagatggcgagtgctctatcttggagacttggaagatggcgaatcttggaagaacatcaaaaggatggaaacaccttgccacggtaatagcgccagaacagccgtcgacggcttcaagctcctacttgtgtttccggcgtttggctgttgcggctgtatggagtcagcaagcatgtccggctgaaaaggctggagtcaggtacagccagtcagcaagcatgtacggctgtaaaggctggagtcaggcggcggctgtactgctgctaggcggcggctgtactaggacttaaattgatgttactcggtgggctgtaccatgctgatttgtacctcacgtgtgtatatggacctggtcgatgtgggcttttttgggcacaatagattgcaacatgacatgtatgggtgtagacatatatggatctagacattatattatatattatatttattcttcatgtttatattatat

SEQ ID NO: 30039 - DNA, 1312 bp, Zea Mays
gtctgtcctatgcagaaaaatagacaaaaaagaaataataatataataaataatgagagcatgcggaaactaataaaaagatattttaatatccaactctcaaaattttacttatcatatgtgcttaagtcacctcaatgatgatgtgcgcataatggataaaagggtatattagaaggttaagagagcaccaacatcatgaatatgcagctagaaatccattgtgtttatgagcttataccatctgcttactggtgcattgatggcataggaacactttccaattattgtgaagggctatataattttttgcatttcagtttctgcttattcactaaataatgaatgtataataagattctactagttacaatttcctcctagggtgcttgctatggagtgtagcaaagctgggcaatgattacgtgctgcaattttccatggcgtagttgtatgggctgtgtaggtaacagtgttttggtggctttggtaatgttgccttgccttgagcagttggagctgccggttgcttttgtgaagctcagcaacaatgacatgtgatgggctgccactgagtgagatgattagggtttctcgtcctcgtccaggcttccatgctcaggtttttcaccaattttcctccgataaactttgcaattgatttcaagtgaatttttgagaaaattgtcgtctcaaaagttacagaataacttaaaattccaaccatccatgttccattagctaccaatttcccatgtagtattattaggcagtaaccactacccacatagttccaaacaccttcaagaacaagcgcgatgtaggttaatgatctaaaagttacagcatggctgggagtgaacgagctggccatcagggtcaggctacacttagttaggactaggcgactagctaatgtagcttaatatagcctaacctagttatgcatagtaatatttcttaggggttcacaaaaaatattggtgcaatccctttgaaacaaaatagaccatgctccttgcatacatcaacagtgaactagtgggaaaacactagaaaattctgatcaagaaaacatttagagaaagggtacaactgacctttctgatagcatcgctgaaccttcttcaaatatctcttcaacgataccaacagctgaatgctgtttagtcaacttctgagaagggtccttcgctttctttctaaaaataaaagacttcagcttgctcgtctttttaggaggagacagaggccgtattgtttgaccaggtgggattatgtcaacaacaatgcaagttgtatcatcctttag

SEQ ID NO: 30040 - DNA, 863 bp, Zea Mays
gtcgtcggtaatatctcgagccatccggcaccaaatcttcctccacgccgccggctgcccggcgcccacaggatacagtccagagaaatgccggccaccgccgcccagccagtttcagatgttcctacttgtgaaggttcttgcatgaactggaaatggcatatgctgcctgtgatgttgtaatttctcgagctggtgccatgacgtgcaccgagatattggccactgggaaaccatcaattctgataccattgccaacaattctggaccatcaccaaacgagaaatgcatatatcatggctgatatcatgggagcaatggtcatcactgaagatgaacttgattctagcagtctcacatctgcagttgatgaaatttttggtgatgaaaaattgatggcagacatgtctcagaaggcactaactgcagcccgaccaaatgcttcagctgatataatccgccacatatgttcattgattggttcaacctacccatcatgaaactggttttagacattgcaaagagttcatgtcatgaacacattttgtattgtttttttttgagcaaccgcatcatgtcatgtttttcttgaggtggaaactgatgtttaattccatcatgacagtgcagtttgcgcctgcttccaggtagcgttcaattggctattcttcacatccaatggacgactttttatttttttgatacaatgataatgtggagctgccgttggttcatgaatggtaatgtaaatggtaacaataatgatttagagtgtgcttgatttgtcttttggctttaacttttgtccaataaaagccaaaccaaaggtctaaacaaggaagtagctttttcaaagaagcaac

SEQ ID NO: 30041 - DNA, 839 bp, Zea Mays
gtcgtcggtaatatctcgagccatccggcaccaaatcttcctccacgccgccggctgcccggcgcccacaggatacagtccagagaaatgccggccaccgccgcccagccaggttcttgcatgaactggaaatggcatatgctgcctgtgatgttgtaatttctcgagctggtgccatgacgtgcaccgagatattggccactgggaaaccatcaattctgataccattgccaacaattctggaccatcaccaaacgagaaatgcatatatcatggctgatatcatgggagcaatggtcatcactgaagatgaacttgattctagcagtctcacatctgcagttgatgaaatttttggtgatgaaaaattgatggcagacatgtctcagaaggcactaactgcagcccgaccaaatgcttcagctgatataatccgccacatatgttcattgattggttcaacctacccatcatgaaactggttttagacattgcaaagagttcatgtcatgaacacattttgtattgtttttttttgagcaaccgcatcatgtcatgtttttcttgaggtggaaactgatgtttaattccatcatgacagtgcagtttgcgcctgcttccaggtagcgttcaattggctattcttcacatccaatggacgactttttatttttttgatacaatgataatgtggagctgccgttggttcatgaatggtaatgtaaatggtaacaataatgatttagagtgtgcttgatttgtcttttggctttaacttttgtccaataaaagccaaaccaaaggtctaaacaaggaagtagctttttcaaagaagcaac

SEQ ID NO: 30042 - DNA, 200 bp, Zea Mays
cttgtgataacttttcattatattcatacatatgcatcttgcatctcatttagtaccgagagatggtgatcgtgcacgtgatatggtgccaaccacaagatgcagttggtggacgacctgaagaatggtggacttacccagtagatgctcgccaaacgagtacctcccccaacaaacactacctaagtgttaaattaaag

SEQ ID NO: 30043 - DNA, 891 bp, Zea Mays
atcggagcgaataccattacagagaagtcaataagtcataaataccaaccttttctaaagtaaaacttgctagaaaccaaagctggatagatcgtcaggacgatcaggatagacttaggacgtgaagccttaggaaaatagatgggtagctaggtggctatatttatataggccataaaggctactatttctactattaggatgctgtagaagcatccgaaaaattagttaggtctgagaagacgactagaatgagcatgcatcatgattgtcgcattataattgtctcttgtgcctcaacatgcttctctcacctttattccaataataataacttgtgaataatgtgatgtactgggttaggagctataagaagtgccttgtcctgtgtgtcatgatagtcttgacttggtcgtgatatgtgtttctcttgccttgctttctagaaggtacgatagttgttcagtccattttgcctctaacaaaaaaaatgttgtctgtcctgctcatgaaaagacccccttccccaaataatctagtggttccctagtgaaaccttttaaaaaaaatcaaatcacgtgcttgttttggtgtttctagcccttgtgtgtttgacacttgaaattgcacttgcacaacttatagacactcatagcttgaccgcttgccaaaccgaaacttccttgtgcacgtggttttgtcaaaaaaaatcgtttggtgtctagttgcgcaaaccatgaccaagccatgtttctttccataagtccttgccccaaaaacttcctagcatatctgctgatcatcctagctgatcctgcttgatgacctctctttttcacctatatctagaaatcttttcctttgtgaatcatgttgtggcttatcatccga

SEQ ID NO: 30044 - DNA, 1241 bp, Zea Mays
agaaacgctggtgtagcagcctgcgagcgcaggctttagcctctgcgtatcctgcgcgggttggccaccgctgggcatggccaacggacagccgcagccacgctgcccaatgtgcgatgccatctctcccagctactcgccgcacagccagtctcgcctttaagctccatgcatcagcctgccttgcttcattttcttttcagtcgaacgcaggagcacctgcagcatgtagcccggccttcttctacctctagccttcccctgtcgagctctttggtacatggaattttccccctctgctacacctcccctgggctacgcacttgtcctcacctccccgccatctacctcaaccagcagccaccatctccctgtatttcccagccgtggagcccaggatgccgaccagggacaccagcagccggcgtcccaagctcgagcagccgctgctcctcaacgccggcacccgccaagtttcgtcagccggtctgcagctcccctctgctcggacgccagtcgagctcctccctggcgcacctcgccagcagcagagaatctccaagtgcaggcgaccagcatctttccccatggcgcccctgctcctatctctagcccctcctctctgttccttgcgcagacgaatttcttctccaaggccgacgcttgttttccccctacttcatctcctccacgctgcaaggcagtaggcaagtccctgcatcctgctcgacctccgcctcctgtcgtcgtcctcgtcggcagcaagccgcgccggacactctgtgctttggccgcgtcgcgtccaggactcccatggctgcctccctggcgtacctcgcgcagcagccgcgacgccagttcgcgtagccacgtggatctccttgcgtcgcgcccttggcatgctcgacgtaatgccgcagcaagtagcagcagcgacacccttcgctgcgtcgtgctcgccagaacgggcctcacgtcgtcgatctgcgcagcgtctgcgcgtcgtcgtcgaaacccgcgcccttgtcgacgtcacgcctcgcgcatcgctcgtcggcaaagagcccaaactaatggcatgcatgcgcgatgtgagtcggccaggaccgagaggtggtgatcgtgcaaatgatgtggtgacaaccacaagatgcagtcggtggacgacccaaggaaggatggacttaaccagtggatgctcgccaagcgagcacctcccccagcaaacactatctaagtgt

SEQ ID NO: 30045 - DNA, 738 bp, Zea Mays
cagctcgtcgccattgccgtcgcgcccgtctgctccagctcgcttctgctggcgggttggccgtggaggcacagtcggccgtggcagccaacgcgtgcaggccacggaggagcgcgcgacgggactggccgtcccagctccatggtcgagctccctgcgtgcagccgcgcgctcctctactcggtgagaaatttgctattatggatgtcctcagatgcggcttcgacgatttggaggcgtaggcgagggattagctgatatggaaaagcagggaataggccactcgccaaaacgaacaagaacacttcattacttggtaacttctctgattaaagcagtgaatctcacggcgtctacatcccgtttcccttctctctgtctccactttaccagcaaccagcagccgtcgttcttttctatcccagcgcaaccctagccgcacctgagatctcgccgcaccctaggcgcctccctcaaatcgcaggaagatggatcgaactgctccggtcgtcgctattgcagaggttgttgatgctgctcgtgctgcggctgttgcagctgcggaggcgagatgtgtggcgttggttgctgagaaggaggcacgtgcgggtgttgaatctgccactattgcagcgggtaaggttgaacttgccgtatctgctgtgaagtatggtagatttgtagaaggtgactccatggtggaatcaaaggataatgttgacttgaagtatcatgtta

SEQ ID NO: 30046 - DNA, 2716 bp, Zea Mays
ctaacagctgaaggcctgaagcaccctcactttccccactccggagctgcacgggcacgcacgcagtttatccaacgccactgggcctcaacaacaacaatctcccaacgccgccgcttccgccgcatcaagcgctagaactaggaacccctcccaaaggatctcaagaagacaaggacaccgtcgagtcgccgccagtcgctcgatggggtgcgggcagtcaaagatcgatcaagaggaggcggtgtttcgatgccgggagcggaagcggctgatggctgacgccgtggcctcgcggaacggttttgccgccgcccacactggctacactgtccgcctgaagagcaccggcggcgcgctatccgatttcgcccaaggcgaggcgccggaccctagcctggtgtcctcccatacccaccacgctccggctgtggcgacgtcatctgtctcgactccgccaggcccctccgcagcttccgtcaacagcccctccccgccgccgccgccattcgccgacttctctcattctagcctccaaagatcctcatccacccccaacattcctatgccggagccgagggccgcagccaaaaaccgccctcctgccgatgcttctatccgagaggaggatgaggatgaggatgaggaggaacaggatggacatatcaagatcgatagcgatgacgacagtgacgacgacagtgacgaagacgacgatcaccatgagcatgacgatgttagtgtggatgacatggtgcatggacaacaatcaaagcggattttgatgagtagtgtgggatcttctccagtaacaccacctccgcctccaaggttgaaccacaccccaccaacgcttgccacagcaacgccaccgcccccggtgctggagtcacagatggctacctgggactacatctttggcccaactcccaccccaccacccaccctagagcagcctgctgctgatactttgtggatggaaaggcgtgataaggagccagtggctgaggtgaaggcacctgtggcaaaaacagttgttagtaagccagctgctactgaggaaaggccaccagagacggccgtagagaaggataaagcaattgaggagatgatggctaatctaccgccatcaaaacctattgtgaggaagccacccaaagcacctggcccatcacaagaagcagcacactaccagcatgcctcttcgatgggtgcagttgaaattcggaaggggaaggtaatggtggcatcaggaactgccagcttgctacagattgttacacggcttgatgataactttcttagagcttcagagagtgcgcatgatgtgtcaaaaaaactggaggccacccggatgcattatcactccaaccatgctgacagccgaggacatatcgaccactctacaaaaattatgcacgttatcacatggaaccgctccttcaagaacttacctgaccatgaggacctgaacgataattttgagattgatgatagatttgaaactcatgctgcagttctagatagaatgcttgcttgggagaaaaaactgtatgacgaagtgaagaagcaaaagaaacggggtgttaaacttgaaaccttggagaagacaaaagctgctgttagccaattgcacacaaggtacattgtagacatgcaatccatggattcaacagtttcagaaataaatcggcttcgggatagacagttattcccaaagttaatggaccttgttgatggaatggccaagatgtggagttctatgtaccgccatcatagaagtcagttcctgatcatttctggaataagaggtttcgagattcctcctattccaagggagacaactgattctcattacatccagacttgtgagctacgtgacattgttagggagtggcatacgcagtttgagaaattgatggacaatcagaaagcatacatcagagcactcaatgcatggctgaagctcaatctcatcccaattgagagcaacataaaggagaaggtctcctcccctccaaggctggtggatccacccatcaagcacctgctgcatgcctggcatgacgagctcgaaaggcttccgattgagcttgcaaaaactgccatcaaaacctttgctgaagtcataagcactatcgtgcatcttcaggaagaggaagtaaacctaaggaggcggtgtgatgaaactcgtagggatctgaaccgaaagaaggcacagtttgaggactggcatcaaaagtacttggagagacagacagcagaaactcaaaacatagatcctgtcgaggataggaaacgcaccatcgaggaactagagattcggctgagagaggaggaggggcaccatcttaggcatgccaggcaggtgcgggagaaatcacttgcaaacctccggacacacctgccagaacttttcaggaacatgtccgattttgcttacttttgcaaagacatgtacaacaatcttagaaaaactgctgcgctgtccaaagatgaagtctaaggctgatgatatttgtgcgtgtgtatgtatactcgacaagcagtagaatgtttgctggtaacttgtcctgatgccgtctagaatacataatagtcggcattaattatgtttgtaaattggaatggacattccggactccccattgtttatttccatgctatgtactgcattggtgcgtggataaaaatctttgaattgctctaagctgtt

SEQ ID NO: 30047 - DNA, 2713 bp, Zea Mays
ctgaaggcctgaagcaccctcactttccccactccggagctgcacgggcacgcacgcagtttatccaacgccactgggcctcaacaacaacaatctcccaacgccgccgcttccgccgcatcaagcgctagaactaggaacccctcccaaaggatctcaagaagacaaggacaccgtcgagtcgccgccagtcgctcgatggggtgcgggcagtcaaagatcgatcaagaggaggcggtgtttcgatgccgggagcggaagcggctgatggctgacgccgtggcctcgcggaacggttttgccgccgcccacactggctacactgtccgcctgaagagcaccggcggcgcgctatccgatttcgcccaaggcgaggcgccggaccctagcctggtgtcctcccatacccaccacgctccggctgtggcgacgtcatctgtctcgactccgccaggcccctccgcagcttccgtcaacagcccctccccgccgccgccgccattcgccgacttctctcattctagcctccaaagatcctcatccacccccaacattcctatgccggagccgagggccgcagccaaaaaccgccctcctgccgatgcttctatccgagaggaggatgaggatgaggatgaggaggaacaggatggacatatcaagatcgatagcgatgacgacagtgacgacgacagtgacgaagacgacgatcaccatgagcatgacgatgttagtgtggatgacatggtgcatggacaacaatcaaagcggattttgatgagtagtgtgggatcttctccagtaacaccacctccgcctccaaggttgaaccacaccccaccaacgcttgccacagcaacgccaccgcccccggtgctggagtcacagatggctacctgggactacatctttggcccaactcccaccccaccacccaccctagagcagcctgctgctgatactttgtggatggaaaggcgtgataaggagccagtggctgaggtgaaggcacctgtggcaaaaacagttgttagtaagccagctgctactgaggaaaggccaccagagacggccgtagagaaggataaagcaattgaggagatgatggctaatctaccgccatcaaaacctattgtgaggaagccacccaaagcacctggcccatcacaagaagcagcacactaccagcatgcctcttcgatgggtgcagttgaaattcggaaggggaaggtaatggtggcatcaggaactgccagcttgctacagattgttacacggcttgatgataactttcttagagcttcagagagtgcgcatgatgtgtcaaaaaaactggaggccacccggatgcattatcactccaaccatgctgacagccgaggacatatcgaccactctacaaaaattatgcacgttatcacatggaaccgctccttcaagaacttacctgaccatgaggacctgaacgataattttgagattgatgatagatttgaaactcatgctgcagttctagatagaatgcttgcttgggagaaaaaactgtatgacgaagtgaaggctggggagcttatgaaaaccgattatcagaagaaggtgtctctattgcagaagcaaaagaaacggggtgttaaacttgaaaccttggagaagacaaaagctgctgttagccaattgcacacaaggtacattgtagacatgcaatccatggattcaacagtttcagaaataaatcggcttcgggatagacagttattcccaaagttaatggaccttgttgatggaatggccaagatgtggagttctatgtaccgccatcatagaagtcagttcctgatcatttctggaataagaggtttcgagattcctcctattccaagggagacaactgattctcattacatccagacttgtgagctacgtgacattgttagggagtggcatacgcagtttgagaaattgatggacaatcagaaagcatacatcagagcactcaatgcatggctgaagctcaatctcatcccaattgagagcaacataaaggagaaggtctcctcccctccaaggctggtggatccacccatcaagcacctgctgcatgcctggcatgacgagctcgaaaggcttccgattgagcttgcaaaaactgccatcaaaacctttgctgaagtcataagcactatcgtgcatcttcaggaagaggaagtaaacctaaggaggcggtgtgatgaaactcgtagggatctgaaccgaaagaaggcacagtttgaggactggcatcaaaagtacttggagagacagacagcagaaactcaaaacatagatcctgtcgaggataggaaacgcaccatcgaggaactagagattcggctgagagaggaggaggggcaccatcttaggcatgccagaacttttcaggaacatgtccgattttgcttacttttgcaaagacatgtacaacaatcttagaaaaactgctgcgctgtccaaagatgaagtctaaggctgatgatatttgtgcgtgtgtatgtatactcgacaagcagtagaatgtttgctggtaacttgtcctgatgccgtctagaatacataatagtcggcattaattatgtttgtaaattggaatggacattccggactccccattgtttatttccatgctatgtactgcattggtgcgtggataaaaatctttgaattgctctaagctgtt

SEQ ID NO: 30048 - DNA, 1047 bp, Zea Mays
gaaaaaccctctgagttggatgaaaacttttggcagacgtggagacacttcatatagtagagatataagagaatggccaagatgtggagttctatgtaccgccatcatagaagtcagttcctgatcatttctggaataagaggtttcgagattcctcctattccaagggagacaactgattctcattacatccagacttgtgagctacgtgacattgttagggagtggcatacgcagtttgagaaattgatggacaatcagaaagcatacatcagagcactcaatgcatggctgaagctcaatctcatcccaattgagagcaacataaaggagaaggtctcctcccctccaaggctggtggatccacccatcaagcacctgctgcatgcctggcatgacgagctcgaaaggcttccgattgagcttgcaaaaactgccatcaaaacctttgctgaagtcataagcactatcgtgcatcttcaggaagaggaagtaaacctaaggaggcggtgtgatgaaactcgtagggatctgaaccgaaagaaggcacagtttgaggactggcatcaaaagtacttggagagacagacagcagaaactcaaaacatagatcctgtcgaggataggaaacgcaccatcgaggaactagagattcggctgagagaggaggaggggcaccatcttaggcatgccaggcaggtgcgggagaaatcacttgcaaacctccggacacacctgccagaacttttcaggaacatgtccgattttgcttacttttgcaaagacatgtacaacaatcttagaaaaactgctgcgctgtccaaagatgaagtctaaggctgatgatatttgtgcgtgtgtatgtatactcgacaagcagtagaatgtttgctggtaacttgtcctgatgccgtctagaatacataatagtcggcattaattatgtttgtaaattggaatggacattccggactccccattgtttatttccatgctatgtactgcattggtgcgtggataaaaatctttgaattgctctaagctgtt

SEQ ID NO: 30049 - DNA, 1155 bp, Zea Mays
acgccgcgcgctgcttcttccttatcttcttcccctctgctggcactccttccacacgcgcgtagcttcttggcgctttctccatcacgctctctccagcgcccatctccctcctctactcggtcctcctctctgcgcgcaggagcttctcccatggccacggcgccctggctcctgctctccacgtcgtgcgcgcctgggcacttccccaggtggccgtctgccctcctgcatcgcgcccagccgagcctgctccctgagctccttccctgccgcaccggagctccctccatggcgcccgagcgccctgccctcggcttcctgcttgcatcgcgcgccctcgtcttcagcccggtgctcatctctctgctcgtcttcttcaatcgtcgagcgctctccctgacgcgctcgcccatgctgcggtgcccctcctcggacagcgcccggccggatctcccttgtgccgcgcccctgctcctccctgttccagctcggtgcccagagccccagcgccggtcgcccgtctactcttcgccatggcacgcctcaagcttcaccctgcgcgcgcgaagctctcagctcgcccagtctgcgcgccgcggtttctctccccatggtacgataattaatcacatgatgtggaggaccaaagctgagtcgaccacaagaggatggaaagcgtgagccactcgcaaggtgatgctgatggacgaaactgaagattggcagacgaagcaagtatcagaataaaggctgatcgtcaagtgatcgacgtgtaacaaatactaacctagtgttatccaggcaagcactggtgcatttgccacctccttgctattttaaaatatttatcaccttgtttgatgcattaggtgataggagttgtgtgctaaacaattgatgcattgccttccttggaaaattgattacccttccttgatacccttttatgaaaaggatttttgatgcttagccttgctttagaaaaacaaaatgttttgttttaaaaataaaaggtgatgcttcatagtggatgagaatttttacaaaaataaaacttgatggtggatccaccatagccatgatgggttcaacatcggaaaagatgtacctctgccaggtaccagacattgggttgaaaataataaagctgag

SEQ ID NO: 30050 - DNA, 2319 bp, Zea Mays
acgccgcgcgctgcttcttccttatcttcttcccctctgctggcactccttccacacgcgcgtagcttcttggcgctttctccatcacgctctctccagcgcccatctccctcctctactcggtcctcctctctgcgcgcaggagcttctcccatggccacggcgccctggctcctgctctccacgtcgtgcgcgcctgggcacttccccaggtggccgtctgccctcctgcatcgcgcccagccgagcctgctccctgagctccttccctgccgcaccggagctccctccatggcgcccgagcgccctgccctcggcttcctgcttgcatcgcgcgccctcgtcttcagcccggtgctcatctctctgctcgtcttcttcaatcgtcgagcgctctccctgacgcgctcgcccatgctgcggtgcccctcctcggacagcgcccggccggatctcccttgtgccgcgcccctgctcctccctgttccagctcggtgcccagagccccagcgccggtcgcccgtctactcttcgccatggcacgcctcaagcttcaccctgcgcgcgcgaagctctcagctcgcccagtctgcgcgccgcggtttctctccccatggtgctcctccttgcccctgctccgatttcccttccgtgctgcagcccctcagctcactccctcaacctcgctgactcgccaagcttcctgctcgcctctgcgcagcgccccgctccctatgtccgttcccagccgtgatgctcccttgcactcggcctgctctggatccgaggctggtcgctatgtgtgctcaactttgtcttgtcgcaaaaccctgatgccgtagtcccctaccgtgccctggatgtcgtgcttgttgtggccggctctggtggtcggcatcatcgaccgttgattctatcattagccacgctcattcattattattccgtacgccgcaagaaagagatctagagaatctggataaagaaaaagcgaacccctccgtcgcttccatgttgtgctgaggaatgctcccaccggacattgtcgtcaatctcacggattcaaattgggtttagataatgataagccaatttattgttccagataatgtttgattgagggtttggatatattaattacatttgtcctctggctcatagtatatgtgttgtggttgtagatataatatttattaggatactcgaatcgcttgcagcgatttggtcaaggtcgtgtagtgaatcgccagtttgagatgtagattatgggaatagagtttcggtgggtatacttgtcgattatgtttaaactagttaagttagttttaagaatggttatggccgattgtggttagcaccatcgacctatatcttatgcatcctaatttaaaacgtggaaacatatgtctagtgtgattggattgatctgatgttgtggtgtgcttgtattcaatggtgaattaatcacattgtataatgatcgtcgatgggtaggttatgtgagtagtacctcgatgggtgtatatgttaaatataattaaataggttctacgtatgtgatgagcagtggtcttaaatactagtaaaatgttctgttcatacggtaataggatgaagttagtattttgtagagtgctcgagttctatttatgttatgtctgattatgttggtatatacataagaatttggttgtcgtaattatgatgatgacttaatcataatattatcttgcgatacccgtcttgatatgcattcatatgcataatgcatttcatttaggtacgataattaatcacatgatgtggaggaccaaagctgagtcgaccacaagaggatggaaagcgtgagccactcgcaaggtgatgctgatggacgaaactgaagattggcagacgaagcaagtatcagaataaaggctgatcgtcaagtgatcgacgtgtaacaaatactaacctagtgttatccaggcaagcactggtgcatttgccacctccttgctattttaaaatatttatcaccttgtttgatgcattaggtgataggagttgtgtgctaaacaattgatgcattgccttccttggaaaattgattacccttccttgatacccttttatgaaaaggatttttgatgcttagccttgctttagaaaaacaaaatgttttgttttaaaaataaaaggtgatgcttcatagtggatgagaatttttacaaaaataaaacttgatggtggatccaccatagccatgatgggttcaacatcggaaaagatgtacctctgccaggtaccagacattgggttgaaaataataaagctgag

SEQ ID NO: 30051 - DNA, 3573 bp, Zea Mays
accagccttgccgtcgagcgccccagctccttcctctccctctcgattctctgttgaccggtgccctgctcgaatttccgcccgccaagctcccagccgagctcttgcgctgggtttctctccctggtgtgctcgcctgtaccgcacgtccatcttcctattcctggacgggcccatcctttcctcctctctctccttcgccattgctgactcgtcgaacctcgcgcgtccctgcgtcctcacatgccgcgcgccgtgctctgcctctccccaagctcctttcgctgctcgctcggatcttgccctggtcctgctggtcgcttctcccctacgcatcttcaagctcagccgccggtctctacttatggcgcgccctccatctccattttgctcggccgtgctccctaccgagctctctcatggcaccctgagcttctgcgcgagctcgccggtgaagctctagttcctgctcgattgccgttctctcctgcgcgccgcagattttccccgagctccctcgccgtggccctctgctcgattcgctatagcttatccgagctccccatggcgcccggatttccctactgcccgtccgcgcgttctgcttcctgcgcgcagctgcgagctccactctatcgctcggttcctgccaaagctcgcgtcgttcattgtgctgttgcgccatcgcctcggtctggccgagggccaggagctctcaatactcagctccctgttcatccataacgtgtcccgttttctttgtcttatcgtcgtcgttcagtcgcctcgccctcgcgtcgtccatcgttaggcacaatctgctctagctcgtggacgtcgtatcctggctctggtcgctagatgccgcaccttgcctgtgctgaccgtcatcacgtataggcctggacaccacctctacctacacgagctcgaccggatccccatcttcgcgaattcgccgtcgatatccagctcgctcttatgtcgccctcccttctgtcatcccctgctcaacctcacctcgccagctcgttccagacataatcccgtcgtcgttctgtgcatcgggtgaagacaaagctagcagagtaatattcaccgagtgcacgacaaaaagttcgaaccagtcgtcaatcgcctcgacaacaaccacatccaagactccaccgttccaataattttgccgcatcgtccttcaaatccgagtcctcgtccgtaggatcgtcgttaacgtcgcaacttcagctcgagttaattatggtacgataattaatcgcgtgatgcggaagatgagccaagccaaccccaagcgcgagctaatccgcaagatgaagttgatgaatcaacctgaagatggttaaatcaagcaagtgctcggtcgaagaatactcgttaagcggacgccacctaacaacactaaactagtgttactcaggcaagccccggtgcatttgccaccttccttgatgtttttaaaatctttctcacttgattgatgcattaggtgataggagttgaatgcttaaacaattcctgcattaccttccttgatctttgattaccttccttgataccctattttacaaaaggtttttactatgcttagtattgctctagcaaaacaaaaggttttgttttacaaaagatgattggcaaagtggatggtatgtttttgaaaataaaacttgatggtggatccatcacggccgtgatggattcaacatcggaaaagatgtacctctgccaggtaccaagtttttgggtttaaatgatcaagctgagaccaggcgggtgacttgcacgagaagagagtctcggtgtagtgtttccgtctgagtcgattaaggaccgtctcgatgtaggcttgatgatcgaggaccctttaactggtcacatgcctcgtcatgggtaaaccttgcctcgagcagactaaggccagaataaaataacacggaatgggcgtggagcggtggcgagagtagcgtgtacccttcgtggcaagaggctggacggtggtgtatctgtgctctcggttcgtgtgaacctgatctggtcttaagaaccccggtggtgggttgacatatgcaagggttaagtgctacatatgtcgtgtgattggagatactcagctgagtataatcgattcggatcgccgtaccttcgcggttatgaagacttggtcactgacttacacgtagaaatccagtgaacttaagggatgatgaaaagacggctagtgcaggtcaagtgattgaactagggcagaaagaactctagatgcaggcaactttacctaacctgacaataaaattggattttaaggatccactcgtagtaagcttttctgcaaaacagagtctttgattcttgataagccataccttgaatccctctagccagcatacccttgagagtcttttctttagtcgggtaagtcttgctgagtaattccgtactcagggttttattccctgttgtttttcaggtctaaccttgtgctgctgtgatggtgttaagtgccggtgggctcggccttcttataagtctaagtaattcttctatactacttattgaggatggtcactggagctagcatatatttcaacttatacttttgtaatcactccgataaaataatgtaaaatttttgtaacctataaaatttggtaataagatttccgctgcaaaaatgttgatgtgtgtgatttgtgttacttaatcccgcgatcttggttgtaagtggtttatccgatgtccttggggcaatcggacaaatccagttaagttatctggtgcacatgcatagccatctgaggtctttgggacaaggacaggtgcatgtgggcccaataacttggaggttctgccacagactggtatcagagcaggattaagtatatacggacacatacgtattttcaaaacaaaagttttggtttcgaaaaacctattttcgactaaacacattgcttggctttgaaaaaaacagttttgaaaaactataatgctagcgacatcctctattaagccctaaaactaaggactatcaggtggcttagtttaaaaccataaccgggggtattgcatacatgtgtaatgttatttttgacgccatttagttttgaatggatctacgctcagctaaggtgagatgtgagagcatgaccgaacaaacgtcggtctagggaagagtataaaaagcgcttgattatatacatgttctacgtatgtatatatgaaggctgcgatatggagtatttacttttctaggaattcagtaccccatggatgtgtatgggtatacaaacatgggaatactgagaaatgtaatgtacttgtaacgacgcacctacgctcaggtaagaaggtgagttaccataatgagttgccctatggttaaagtgtggcaacggcgcctatgcgtggctcggcgcttaatgatgagctggcctccatatagcaatatatggagtataaactgtgataaactgtcatgtgtgaacgacatcattgggaaattgggttgtgatggaattttctacaagtacactaacctcgaaaacgtatgtgtag

SEQ ID NO: 30052 - DNA, 4085 bp, Zea Mays
accagccttgccgtcgagcgccccagctccttcctctccctctcgattctctgttgaccggtgccctgctcgaatttccgcccgccaagctcccagccgagctcttgcgctgggtttctctccctggtgtgctcgcctgtaccgcacgtccatcttcctattcctggacgggcccatcctttcctcctctctctccttcgccattgctgactcgtcgaacctcgcgcgtccctgcgtcctcacatgccgcgcgccgtgctctgcctctccccaagctcctttcgctgctcgctcggatcttgccctggtcctgctggtcgcttctcccctacgcatcttcaagctcagccgccggtctctacttatggcgcgccctccatctccattttgctcggccgtgctccctaccgagctctctcatggcaccctgagcttctgcgcgagctcgccggtgaagctctagttcctgctcgattgccgttctctcctgcgcgccgcagattttccccgagctccctcgccgtggccctctgctcgattcgctatagcttatccgagctccccatggcgcccggatttccctactgcccgtccgcgcgttctgcttcctgcgcgcagctgcgagctccactctatcgctcggttcctgccaaagctcgcgtcgttcattgtgctgttgcgccatcgcctcggtctggccgagggccaggagctctcaatactcagctccctgttcatccataacgtgtcccgttttctttgtcttatcgtcgtcgttcagtcgcctcgccctcgcgtcgtccatcgttaggcacaatctgctctagctcgtggacgtcgtatcctggctctggtcgctagatgccgcaccttgcctgtgctgaccgtcatcacgtataggcctggacaccacctctacctacacgagctcgaccggatccccatcttcgcgaattcgccgtcgatatccagctcgctcttatgtcgccctcccttctgtcatcccctgctcaacctcacctcgccagctcgttccagacataatcccgtcgtcgttctgtgcatcgggtgaagacaaagctagcagagtaatattcaccgagtgcacgacaaaaagttcgaaccagtcgtcaatcgcctcgacaacaaccacatccaagactccaccgttccaataattttgccgcatcgtccttcaaatccgagtcctcgtccgtaggatcgtcgttaacgtcgcaacttcagctcgagttaattatggtaagttgatttattattcccgtcaactaaataaatggtaggattaaatagaagaattgattgcgataattctcttatttattacttgatgtagagattaagttgaattttagggttatgcgataagtatattggtagatatatatataatacacaggttgaccggtaaattagtttagaaagttaataaaagttcttctatcaacttttataagtattagatgtccaaaaaaattgtaaagttaaaagctataagtcgtttaggatgctctctaaactaggtataatattctatgtgtgttagtcgcttttataattggaatggatggtgattgctacctcgactgtttagctaagttgtaagagcttgattgtcgtaagtaacaatataacgataactagtgtccgtaatgtctcgtcattaaataggtgatttctcttttgcgtagcatcgtaatatctagtgttattgttccttatatgcattcatgtgcattatgcaaatcatttaggtacgataattaatcgcgtgatgcggaagatgagccaagccaaccccaagcgcgagctaatccgcaagatgaagttgatgaatcaacctgaagatggttaaatcaagcaagtgctcggtcgaagaatactcgttaagcggacgccacctaacaacactaaactagtgttactcaggcaagccccggtgcatttgccaccttccttgatgtttttaaaatctttctcacttgattgatgcattaggtgataggagttgaatgcttaaacaattcctgcattaccttccttgatctttgattaccttccttgataccctattttacaaaaggtttttactatgcttagtattgctctagcaaaacaaaaggttttgttttacaaaagatgattggcaaagtggatggtatgtttttgaaaataaaacttgatggtggatccatcacggccgtgatggattcaacatcggaaaagatgtacctctgccaggtaccaagtttttgggtttaaatgatcaagctgagaccaggcgggtgacttgcacgagaagagagtctcggtgtagtgtttccgtctgagtcgattaaggaccgtctcgatgtaggcttgatgatcgaggaccctttaactggtcacatgcctcgtcatgggtaaaccttgcctcgagcagactaaggccagaataaaataacacggaatgggcgtggagcggtggcgagagtagcgtgtacccttcgtggcaagaggctggacggtggtgtatctgtgctctcggttcgtgtgaacctgatctggtcttaagaaccccggtggtgggttgacatatgcaagggttaagtgctacatatgtcgtgtgattggagatactcagctgagtataatcgattcggatcgccgtaccttcgcggttatgaagacttggtcactgacttacacgtagaaatccagtgaacttaagggatgatgaaaagacggctagtgcaggtcaagtgattgaactagggcagaaagaactctagatgcaggcaactttacctaacctgacaataaaattggattttaaggatccactcgtagtaagcttttctgcaaaacagagtctttgattcttgataagccataccttgaatccctctagccagcatacccttgagagtcttttctttagtcgggtaagtcttgctgagtaattccgtactcagggttttattccctgttgtttttcaggtctaaccttgtgctgctgtgatggtgttaagtgccggtgggctcggccttcttataagtctaagtaattcttctatactacttattgaggatggtcactggagctagcatatatttcaacttatacttttgtaatcactccgataaaataatgtaaaatttttgtaacctataaaatttggtaataagatttccgctgcaaaaatgttgatgtgtgtgatttgtgttacttaatcccgcgatcttggttgtaagtggtttatccgatgtccttggggcaatcggacaaatccagttaagttatctggtgcacatgcatagccatctgaggtctttgggacaaggacaggtgcatgtgggcccaataacttggaggttctgccacagactggtatcagagcaggattaagtatatacggacacatacgtattttcaaaacaaaagttttggtttcgaaaaacctattttcgactaaacacattgcttggctttgaaaaaaacagttttgaaaaactataatgctagcgacatcctctattaagccctaaaactaaggactatcaggtggcttagtttaaaaccataaccgggggtattgcatacatgtgtaatgttatttttgacgccatttagttttgaatggatctacgctcagctaaggtgagatgtgagagcatgaccgaacaaacgtcggtctagggaagagtataaaaagcgcttgattatatacatgttctacgtatgtatatatgaaggctgcgatatggagtatttacttttctaggaattcagtaccccatggatgtgtatgggtatacaaacatgggaatactgagaaatgtaatgtacttgtaacgacgcacctacgctcaggtaagaaggtgagttaccataatgagttgccctatggttaaagtgtggcaacggcgcctatgcgtggctcggcgcttaatgatgagctggcctccatatagcaatatatggagtataaactgtgataaactgtcatgtgtgaacgacatcattgggaaattgggttgtgatggaattttctacaagtacactaacctcgaaaacgtatgtgtag

SEQ ID NO: 30053 - DNA, 2836 bp, Zea Mays
accagccttgccgtcgagcgccccagctccttcctctccctctcgattctctgttgaccggtgccctgctcgaatttccgcccgccaagctcccagccgagctcttgcgctgggtttctctccctggtgtgctcgcctgtaccgcacgtccatcttcctattcctggacgggcccatcctttcctcctctctctccttcgccattgctgactcgtcgaacctcgcgcgtccctgcgtcctcacatgccgcgcgccgtgctctgcctctccccaagctcctttcgctgctcgctcggatcttgccctggtcctgctggtcgcttctcccctacgcatcttcaagctcagccgccggtctctacttatggcgcgccctccatctccattttgctcggccgtgctccctaccgagctctctcatggcaccctgagcttctgcgcgagctcgccggtgaagctctagttcctgctcgattgccgttctctcctgcgcgccgcagattttccccgagctccctcgccgtggccctctgctcgattcgctatagcttatccgagctccccatggcgcccggatttccctactgcccgtccgcgcgttctgcttcctgcgcgcagctgcgagctccactctatcgctcggttcctgccaaagctcgcgtcgttcattgtgctgttgcgccatcgcctcggtctggccgagggccaggagctctcaatactcagctccctgttcatccataacgtgtcccgttttctttgtcttatcgtcgtcgttcagtcgcctcgccctcgcgtcgtccatcgttaggcacaatctgctctagctcgtggacgtcgtatcctggctctggtcgctagatgccgcaccttgcctgtgctgaccgtcatcacgtataggcctggacaccacctctacctacacgagctcgaccggatccccatcttcgcgaattcgccgtcgatatccagctcgctcttatgtcgccctcccttctgtcatcccctgctcaacctcacctcgccagctcgttccagacataatcccgtcgtcgttctgtgcatcgggtgaagacaaagctagcagagtaatattcaccgagtgcacgacaaaaagttcgaaccagtcgtcaatcgcctcgacaacaaccacatccaagactccaccgttccaataattttgccgcatcgtccttcaaatccgagtcctcgtccgtaggatcgtcgttaacgtcgcaacttcagctcgagttaattatggtacgataattaatcgtgtgatgcggaagatgagccaagccgaccccaagcacgggctaatccgcaagatgaagttgatgaatcaacctgaagatggttaaatcaagcaagtgctcggtcgaagaatactcatcaagcggacgtcacctaacaacactaacctagtgttacttaggcaagccccggtgcatttgccaccttccttgatgtttttaaaatctttctcacttgattgatgcattaggtgataggagttgaatgcttaaacaattcctgcattaccttccttgatctttgattaccttccttgataccctgttttacaaaaggtttttactatgcctagtattgctctagcaaaacaaaaggttttgttttacaaaagatgattggcaaagtgggtggtatgtttttgaaaataaaacttgatggtggatccaacacggccgtgatggattcaacatcggaaaagatgtacctctgccaggtaccaagtttttgggtttaaatgattaagctgagaccgggcgggtgacttgcacgagaagagagtctcggtgtagtgcctccgtctgagtcgattaaggaccgtctcgatgtaggcttgatgaccgaggaccctttaaccggtcacatgcctcgtcatgggtgcttgcctcgggcagactaaggccagaataagataacacgtaatggacgtggagcggtggcgagagtagcgtgtaccctccgtggcaagaggctggacggtggtgtatctgtgctctcggttcgcgtgaacctgatctggtcttaagaaccccggtggcgggttgacatatgcaatggttaagtgctacatatgtcgtgtgattggagatcctcagctgagtataatcgatttggatcgccttaccttcacggttatgaagacttggtcactgacttacacgtagaaatccagtgaacttaagggatgatgaaaagacggctagtgcaggtcaagtgattgaactagggtagaaagaactctagatgcaggcaactttacctaacctgacaataaaattggattttaaggatccactcgtagtaagcttttctgcaaaacagagtctttgattcttgataagccatactttgaatccctctagccagcatacccttgagagtcttttctttagtcgggtaagtcttgctgagtaattccgtactcaggctaaccttgtgctgctgtgatggtgttaagtaccggtgggctcggccttcttataagtctaagtaattcttctatacttcttattgaggatggtcacttgagctagcatatatttcaacttatacttttgtaatcactccgataaaataatgtaaaatttttgtaacctataaaatttggtaataagatttccgctgcaaaaatgttgatgtgtgtgatttgtgttacttaatcccgcgatcttggttgtaagtggtttatccgatgtccttggggcaatcggacagatcctattaagttatctggtgcacatgcatagccgtctgaggtctttgggacaaggacaggtgcatatggccccaataacttggaggttct

SEQ ID NO: 30054 - DNA, 4009 bp, Zea Mays
ccgggttcttccgaaattttcgtgatgttcggaacatcattgttccgaaaaatcggtgcgtccggtgattatctaaaattcatcgctcgcgcaaaatacggatttgaaaatttagtccagtcttccgatttcatcccaaacaaattaagctgattcgatgtcctattcctcttgagatgtacgtgcttcttcattatccttgtctagaacacacaaatcgattttactcaaaccatataatgtgttgtccatatttcattaatccactactaatgcacaaatactactaacgaacacaccatttgttaaaagaaattggaaagaatttgtttctcatagacttatcctccaccgcctaatctcctagttcttatttgttgttgccgttcaatcaggaagcaagccatttcttccttatccaattggttcacgtatgggaattttcatctcctgcatgtcgatcagccttatccagccaccgtcccttggccatcggccttcccctggacgatattttctcatgctctacggctcgatctcctctgtgtttgagttcgtggaacaacagccgatctcatccgctcaccatccctatccctagccgcccgaccgcccagccgccctctattttctttttaacgcgcgcgggcttctcttcttctccagccgctcaccagccttgtcgtcgaacgccccagctccttcctctccctctcgattctctgttgaccggtgccctgctcgaatttccgcccgccaagctcccagccgagctcttgcgctgggtttctctccctggtgtgctcgcccgtaccgcacgtccatcttcctgttcctggacgggcccatcctttcctcttctctctccttcgccatacctgactcgtcgaacctcgcgcgtccctgcgtcctcgcatgccgcgcgccgtgctctgcctctccccaagctcctttcgctgctcgctcggatcttgccctggtcctgctggtcgcttctcccctacgcatcttcaagctcagtcgcccgtctctactctatggcgcgccctccagctccattttgctcggtcgtgctccctaccaagctctctcatggcaccctgagcttctgcgcgagctcgccggtgaagctctagttcctgctcgattgtcgttctctcttgcgcgccgcggattttccccgagctccctcgccgtggccctctgctcgattcgctatagcttatccaagctccccatagcgcccggatttccctactgcccgtgcgcacgttctgcttcctgcgcgcaactgcgagctccgctctatcgctcggtccataacgaagctcgcgtcgttcgttgtgctgtcgcgccatcgcctcggtctggccgacggccaggacctctcaatactcagctccctaatcatccacaacacgtcccgttttctttgtcttgtcatcgtcgttcagtcgcctcgccctcgcgtcgttcatcgttaggcacaatctgctctagctcgtggacgtcgtatcctggctctggtcgctagatgtcgcaccttccctgtactgactgtcatcacgtataggcctagacaccacctctacctacacgagctcgactggatccccatcttcgcgaattcgccgtcgatatccagctcgctctaatgtcgccctcccttctgtcatcccctgctcaaccccacctcgccagctcgctccagacataatcccgtcgtcgttctgtgtgtcgggtgaagatgaagctagccgagtaatattcaccgagtgcgcgacaaaaagctcgaaccagtcgtcaatcgcctcgacaacaaccacattcaagactccaccgttccaataattttgccgcatcgtccttcaaatctgagtcctcgtccgtaggatcgtcgttgacctcgcaacttcagctcgagttaattatggtaagttgatttattattcccgtcaactaaataaatggtaggattaaatagaagaattgattgcgatgattctcttatttattactcgatgtagagattaagttgaattttagggttatgcgataagtatattggtagatatatatataatacacaggttgaccgataaattagtttagaaagttaataaaagttcttctatcaaattttataagtattagatgtccaaaaaaattgtgaagttaaaagctataagtcgtttaggatgctctctaaactaggtataatattctatgtgtgtaagtcgtttaggatggtgattgctacctcgactgtttagctaagttgtaagagcatgattgtcgtaagtaacaatataacgataactagtgtccgtaatgtctcgtcattaaataggtgatttctcttttgcgtagcatcgtaatatctagtgttattgttcattatatgcattcatgtgcattatgcaaatcatttaggtacgataattaatcgtgtgatgcggaagatgagccaagccgaccccaagcacgggctaatccgcaagatgaagttgatgaatcaacctgaagatggttaaatcaagcaagtgctcggtcgaagaatactcatcaagcggacgtcacctaacaacactaacctagtgttacttaggcaagccccggtgcatttgccaccttccttgatgtttttaaaatctttctcacttgattgatgcattaggtgataggagttgaatgcttaaacaattcctgcattaccttccttgatctttgattaccttccttgataccctgttttacaaaaggtttttactatgcctagtattgctctagcaaaacaaaaggttttgttttacaaaagatgattggcaaagtgggtggtatgtttttgaaaataaaacttgatggtggatccaacacggccgtgatggattcaacatcggaaaagatgtacctctgccaggtaccaagtttttgggtttaaatgattaagctgagaccgggcgggtgacttgcacgagaagagagtctcggtgtagtgcctccgtctgagtcgattaaggaccgtctcgatgtaggcttgatgaccgaggaccctttaaccggtcacatgcctcgtcatgggtgcttgcctcgggcagactaaggccagaataagataacacgtaatggacgtggagcggtggcgagagtagcgtgtaccctccgtggcaagaggctggacggtggtgtatctgtgctctcggttcgcgtgaacctgatctggtcttaagaaccccggtggcgggttgacatatgcaatggttaagtgctacatatgtcgtgtgattggagatcctcagctgagtataatcgatttggatcgccttaccttcacggttatgaagacttggtcactgacttacacgtagaaatccagtgaacttaagggatgatgaaaagacggctagtgcaggtcaagtgattgaactagggtagaaagaactctagatgcaggcaactttacctaacctgacaataaaattggattttaaggatccactcgtagtaagcttttctgcaaaacagagtctttgattcttgataagccatactttgaatccctctagccagcatacccttgagagtcttttctttagtcgggtaagtcttgctgagtaattccgtactcaggctaaccttgtgctgctgtgatggtgttaagtaccggtgggctcggccttcttataagtctaagtaattcttctatacttcttattgaggatggtcacttgagctagcatatatttcaacttatacttttgtaatcactccgataaaataatgtaaaatttttgtaacctataaaatttggtaataagatttccgctgcaaaaatgttgatgtgtgtgatttgtgttacttaatcccgcgatcttggttgtaagtggtttatccgatgtccttggggcaatcggacagatcctattaagttatctggtgcacatgcatagccgtctgaggtctttgggacaaggacaggtgcatatggccccaataacttggaggttct

SEQ ID NO: 30055 - DNA, 2369 bp, Zea Mays
ctagctccctcctctccctcccatggcgcttggacttctccttctcggccatctccagcactgcgcccagcccagccgcgccgagtttcgccctcgccatggccggtgccttctttgctctcctctccagccgcgccgagctcgacctctgcttctcttgcgtcgcgcgccgagctccatccatggcgggagctccctccctgctcggatttcgccaggcccacgcagctccctggcgcccctctcctcgtaactccctcctctcgctccagctcgccgcgcactcctctgctcggcgcctttcctgctccccatgtctggtgccctgctgcccagcgccgcgcccctgctcctgttcattctagcagccgagtttcttcttccccggcacgtcgctctctctcccttgtcttctctcccctgcgcgctagtcgctcgtcttcctgcgagcgcccctgctccctctgccctctccctgacgcgcgccctctctgcttctctccacgccgctgtcaggtctccggctcccatgtgctcgccctgtgcacgagtcgccgcgccctgggagctgctcttgccgtcgtggagctctcatggccagctcccacccttttgccgcgcgcccatttttcctcttctgcgcagcttcccagctccagctcggccttgtcttctctatgctgtggtcggcgtttcccagcgaatctcaacgtcaccactgttgtgaaaatgtttgatccgacttcgtcgtagacctcgccggtcgtgcacactccggcctcctcctgtccatggccgaccagcccgccatggtgtcgcgtgtccctgcgccctacttgtccctggccctcgcgctggctcacctcatcgtcgaattccataaccagcaccgtcgctcagcttgcccaaatcctggccatgattcccatcacgccctgtgtcggcatgttggtccgatgctgtcgtccttcttcatcctcatcttcgcctcgacctcgcgtggtgctcggccgtgcacagctactggtcatcgacgcccctacgagttgtcggtcgtcgctcatgttcacctccatatgatggatggcgtgggtggtaatgtcccgacgtgctattcgtttggggtcgaggatgtgcttgaaccatagaaattcaaagtggatgctggatgttcttgaaccgtggacacgtcgaagatccatagcatactgcggtgctccattccgtaggtctccaacttggtgccaaggagagaaattcataggaaccgggtaatgaagaaagattcgtgcaatgtttgccaagtgttcgatggattgctcgacctcggattcattgtcatccgcgtgtagttgaatcattttagtcatggtaagcgtagtgttatagttgctgacacgattggaaagtagatgattaaatagtgtgagattttaattagttggcgagttatgcaaagtagcccggtcaggtggtttagaaagttagttaatattcttctaagttcattctaaatttagatgtctaatactaataaatctaatttgttaatcttctagtgttgaatgttagttaaggggagtagagcgtgtgtatattttattgttttgtgatgtatgagctacctccgaataggctggaaaggcgtaaatattataattagtcttatatcgctagctagtatttgcttaatattttgttataagtgtttcatcctcttcggtgtagattatctatcttaggctatttatacacgtgctcattcatgtgcatcttgcatatcatttaggtacgttaagtgatcacgtaatgcgaaagacgagttgagtcaacccctagatgatgttaagcgtgggcttctccacaaggtgatgctgatggatgaacctgaagatggataaactaaacaagtgccaaggcaaaggatggtcatcaagtgatcgacgtctaacaaccactacaccatgaaacaattttagcgtcaaacatctgacgataaaaatagatgtttggcgacagcgagtatgtcacaaaataataccatcacactatctgtcggtaattattgtgttggcatcaacaaatctgtcggcaataatgtcgagctattgtggcggtttatccatcggtataaatgattatgtgtggcacactgactgtcgggaaaacatagcattagatcatctgtcggtacatgaatgtcttgagtaattaataaatttcaactaatatatttatataagtttatatgttgtcccaattaattaagcttctgtccacgcccctatggccctgcccacgcacgctgctaggattcaaaccgaacaccacttgctccgaagcaacaactcaaaccagctgagctagag

SEQ ID NO: 30056 - DNA, 2268 bp, Zea Mays
gtcgtactcgtacgctaccttttatccatccatggcgccgccgccgccgccgccactccacccccatcaccactgcgttctcacccgcttccgctgcccggccaccggtaccgcccgcttcctcattcgcctaggcatcaaacccttctgttgctcctcggttccctcgcgaaccccacctcccctccatggaccctcgctccgccgcggacggcgcccgctggactacccggaccccttcgcccgcaccttcgacctggccgcgctacgcgtccctgccgccgcgtgcgcacccctcgagcgccgcctccggggccacctgctcaactggccccgcgtccacaacgtgatccgcctccgtaacgaccagggcctcctctcactgtcgcctcctcccccgggctaccccgccgaggagccggggggccccgccccacgggccaccgcagtactgcggagggagaagctggtccgcgagttgaacgcccgtggcttcctacggttcccaaacctcgcccgcctctcgcggcccagtcccctcgcgcggaagcggagggagaggaagggagacggcggcgatgaggagacgtgtgagcctgacaaagacaaggcctacgtggtggaggtagcgggggagagaagagaggacgacgacgattggaagggtctggtcggagaggagggcattgggagagacacgtggcggattggctccacccggttgctgttgcttgaggagagatacgccgagaggaaggttgatgagctgccggaggcagtgaaggatgtgttagaccatgaaactcaacatgatgagtcatctgcttttgagcttatacgatgtcatctaactttattttatacctactggtcaatgagtgaggttttagaggtattactccctgaaggtgtaataattcctacaggttttgaaacaatagggcatatagcacacttgaatttgcgagatgagcatatgccttacaagaaacttattgcttcggtggttcttgataaaaacaagccaaaaatccaaactgttgtcaataagacagatgttattcagaacaactatagaactatgcaacttgaagtcttagctggcaatggttcccttcgtacgatggtcattgagagcggccttcgttttcaagttgatcttggtacagtctattggaattctagattagccacagagaggcagaggctagttaatatctttagaaacttggacgttgtttgtgatatgttctcaggggttggtcctctagcgatttcagctgcaaaaaaggtcaaatatgtctatgcaaatgacataaaccctaatgcagtgggataccttgagagaaacatggttcttaacaaacttgaaaagaaaatagaggtttttaacatggatgctagaaggtttgttagtgcaatatattcaagcaagcacgtgcaaccaatcacacaaatagtgatgaatttgcccaatgacgctgttgaatttttagatgtgttcaaagggattttatgcaatactaaatcagaactgcattgtgtgatgccaatgatccatgtgtacggattttctaaagctgaggatccagagcatgacttccatgagaggataaatttaacgttaggcgagaacatcgacactgttgaaatgcacagagtacggcttgttgcacccggaaaatggatgatatgtgcaacttttactcttccacagtcagtggcgtctgcacagccgaattacattacctgttgattttttgtactctctccgtcttaaaatattggcaacgactgttatgcaagcagtccttctgtgcaagcgtgcaagcaaaccatatgatccattagattacgatccaatcacagatacaaccatgtttgttagaggttttttataaagattattgagctgttggtggaagggtttaagtgttaaatgtgacatacggttggatcacgatctaatggatcaaatggtttgcttgcacgcttgcacagaaggactgcttgtatagcagtcgttgcctaaaatattagtcgttttagctcagctctggatttttatgtctatatccaaagacatgtaaaacatataaatcaaatgttatatgaatttattaattgtcgaaaatgaattttaatttgggatagagggagtactattcttactgcagcccctcgtatcttctgtactgtcgtcgaatacttcctatcagattatatagatgatgcccttgatcatctcacactgaatttggaaaggac

SEQ ID NO: 30057 - DNA, 1591 bp, Zea Mays
gtcgtactcgtacgctaccttttatccatccatggcgccgccgccgccgccgccactccacccccatcaccactgcgttctcacccgcttccgctgcccggccaccggatgtgttagaccatgaaactcaacatgatgagtcatctgcttttgagcttatacgatgtcatctaactttattttatacctactggtcaatgagtgaggttttagaggtattactccctgaaggtgtaataattcctacaggttttgaaacaatagggcatatagcacacttgaatttgcgagatgagcatatgccttacaagaaacttattgcttcggtggttcttgataaaaacaagccaaaaatccaaactgttgtcaataagacagatgttattcagaacaactatagaactatgcaacttgaagtcttagctggcaatggttcccttcgtacgatggtcattgagagcggccttcgttttcaagttgatcttggtacagtctattggaattctagattagccacagagaggcagaggctagttaatatctttagaaacttggacgttgtttgtgatatgttctcaggggttggtcctctagcgatttcagctgcaaaaaaggtcaaatatgtctatgcaaatgacataaaccctaatgcagtgggataccttgagagaaacatggttcttaacaaacttgaaaagaaaatagaggtttttaacatggatgctagaaggtttgttagtgcaatatattcaagcaagcacgtgcaaccaatcacacaaatagtgatgaatttgcccaatgacgctgttgaatttttagatgtgttcaaagggattttatgcaatactaaatcagaactgcattgtgtgatgccaatgatccatgtgtacggattttctaaagctgaggatccagagcatgacttccatgagaggataaatttaacgttaggcgagaacatcgacactgttgaaatgcacagagtacggcttgttgcacccggaaaatggatgatatgtgcaacttttactcttccacagtcagtggcgtctgcacagccgaattacattacctgttgattttttgtactctctccgtcttaaaatattggcaacgactgttatgcaagcagtccttctgtgcaagcgtgcaagcaaaccatatgatccattagattacgatccaatcacagatacaaccatgtttgttagaggttttttataaagattattgagctgttggtggaagggtttaagtgttaaatgtgacatacggttggatcacgatctaatggatcaaatggtttgcttgcacgcttgcacagaaggactgcttgtatagcagtcgttgcctaaaatattagtcgttttagctcagctctggatttttatgtctatatccaaagacatgtaaaacatataaatcaaatgttatatgaatttattaattgtcgaaaatgaattttaatttgggatagagggagtactattcttactgcagcccctcgtatcttctgtactgtcgtcgaatacttcctatcagattatatagatgatgcccttgatcatctcacactgaatttggaaaggac

SEQ ID NO: 30058 - DNA, 1981 bp, Zea Mays
gtcgtactcgtacgctaccttttatccatccatggcgccgccgccgccgccgccactccacccccatcaccactgcgttctcacccgcttccgctgcccggccaccggtaccgcccgcttcctcattcgcctaggcatcaaacccttctgttgctcctcggttccctcgcgaaccccacctcccctccatggaccctcgctccgccgcggacggcgcccgctggactacccggaccccttcgcccgcaccttcgacctggccgcgctacgcgtccctgccgccgcgtgcgcacccctcgagcgccgcctccggggccacctgctcaactggccccgcgtccacaacgtgatccgcctccgtaacgaccagggcctcctctcactgtcgcctcctcccccgggctaccccgccgaggagccggggggccccgccccacgggccaccgcagtactgcggagggagaagctggtccgcgagttgaacgcccgtggcttcctacggttcccaaacctcgcccgcctctcgcggcccagtcccctcgcgcggaagcggagggagaggaagggagacggcggcgatgaggagacgtgtgagcctgacaaagacaaggcctacgtggtggaggtagcgggggagagaagagaggacgacgacgattggaagggtctggtcggagaggagggcattgggagagacacgtggcggattggctccacccggttgctgttgcttgaggagagatacgccgagaggaaggttgatgagctgccggaggcagtgaaggatgtgttagaccatgaaactcaacatgatgagtcatctgcttttgagcttatacgatgtcatctaactttattttatacctactggtcaatgagtgagctattggaattctagattagccacagagaggcagaggctagttaatatctttagaaacttggacgttgtttgtgatatgttctcaggggttggtcctctagcgatttcagctgcaaaaaaggtcaaatatgtctatgcaaatgacataaaccctaatgcagtgggataccttgagagaaacatggttcttaacaaacttgaaaagaaaatagaggtttttaacatggatgctagaaggtttgttagtgcaatatattcaagcaagcacgtgcaaccaatcacacaaatagtgatgaatttgcccaatgacgctgttgaatttttagatgtgttcaaagggattttatgcaatactaaatcagaactgcattgtgtgatgccaatgatccatgtgtacggattttctaaagctgaggatccagagcatgacttccatgagaggataaatttaacgttaggcgagaacatcgacactgttgaaatgcacagagtacggcttgttgcacccggaaaatggatgatatgtgcaacttttactcttccacagtcagtggcgtctgcacagccgaattacattacctgttgattttttgtactctctccgtcttaaaatattggcaacgactgttatgcaagcagtccttctgtgcaagcgtgcaagcaaaccatatgatccattagattacgatccaatcacagatacaaccatgtttgttagaggttttttataaagattattgagctgttggtggaagggtttaagtgttaaatgtgacatacggttggatcacgatctaatggatcaaatggtttgcttgcacgcttgcacagaaggactgcttgtatagcagtcgttgcctaaaatattagtcgttttagctcagctctggatttttatgtctatatccaaagacatgtaaaacatataaatcaaatgttatatgaatttattaattgtcgaaaatgaattttaatttgggatagagggagtactattcttactgcagcccctcgtatcttctgtactgtcgtcgaatacttcctatcagattatatagatgatgcccttgatcatctcacactgaatttggaaaggac

SEQ ID NO: 30059 - DNA, 2264 bp, Zea Mays
gtcgtactcgtacgctaccttttatccatccatggcgccgccgccgccgccgccactccacccccatcaccactgcgttctcacccgcttccgctgcccggccaccggtaccgcccgcttcctcattcgcctaggcatcaaacccttctgttgctcctcggttccctcgcgaaccccacctcccctccatggaccctcgctccgccgcggacggcgcccgctggactacccggaccccttcgcccgcaccttcgacctggccgcgctacgcgtccctgccgccgcgtgcgcacccctcgagcgccgcctccggggccacctgctcaactggccccgcgtccacaacgtgatccgcctccgtaacgaccagggcctcctctcactgtcgcctcctcccccgggctaccccgccgaggagccggggggccccgccccacgggccaccgcagtactgcggagggagaagctggtccgcgagttgaacgcccgtggcttcctacggttcccaaacctcgcccgcctctcgcggcccagtcccctcgcgcggaagcggagggagaggaagggagacggcggcgatgaggagacgtgtgagcctgacaaagacaaggcctacgtggtggaggtagcgggggagagaagagaggacgacgacgattggaagggtctggtcggagaggagggcattgggagagacacgtggcggattggctccacccggttgctgttgcttgaggagagatacgccgagaggaaggttgatgagctgccggaggcagtgaaggatgtgttagaccatgaaactcaacatgatgagtcatctgcttttgagcttatacgatgtcatctaactttattttatacctactggtcaatgagtgagggcagcgatggtgcgctggaggagaacgacactagacgccgtgagcacgatttcttcgacgtagaggaggtagacggtgtcatcaccgcgccgaaggatgaacaaaatgttttagaggtattactccctgaaggtgtaataattcctacaggttttgaaacaatagggcatatagcacacttgaatttgcgagatgagcatatgccttacaagaaacttattgcttcggtggttcttgataaaaacaagccaaaaatccaaactgttgtcaataagacagatgttattcagaacaactatagaactatgcaacttgaagtcttagctggcaatggttcccttcgtacgatggtcattgagagcggccttcgttttcaagttgatcttggtacagtctattggaattctagattagccacagagaggcagaggctagttaatatctttagaaacttggacgttgtttgtgatatgttctcaggggttggtcctctagcgatttcagctgcaaaaaaggtcaaatatgtctatgcaaatgacataaaccctaatgcagtgggataccttgagagaaacatggttcttaacaaacttgaaaagaaaatagagatgtgttcaaagggattttatgcaatactaaatcagaactgcattgtgtgatgccaatgatccatgtgtacggattttctaaagctgaggatccagagcatgacttccatgagaggataaatttaacgttaggcgagaacatcgacactgttgaaatgcacagagtacggcttgttgcacccggaaaatggatgatatgtgcaacttttactcttccacagtcagtggcgtctgcacagccgaattacattacctgttgattttttgtactctctccgtcttaaaatattggcaacgactgttatgcaagcagtccttctgtgcaagcgtgcaagcaaaccatatgatccattagattacgatccaatcacagatacaaccatgtttgttagaggttttttataaagattattgagctgttggtggaagggtttaagtgttaaatgtgacatacggttggatcacgatctaatggatcaaatggtttgcttgcacgcttgcacagaaggactgcttgtatagcagtcgttgcctaaaatattagtcgttttagctcagctctggatttttatgtctatatccaaagacatgtaaaacatataaatcaaatgttatatgaatttattaattgtcgaaaatgaattttaatttgggatagagggagtactattcttactgcagcccctcgtatcttctgtactgtcgtcgaatacttcctatcagattatatagatgatgcccttgatcatctcacactgaatttggaaaggac

SEQ ID NO: 30060 - DNA, 2155 bp, Zea Mays
gtcgtactcgtacgctaccttttatccatccatggcgccgccgccgccgccgccactccacccccatcaccactgcgttctcacccgcttccgctgcccggccaccggtaccgcccgcttcctcattcgcctaggcatcaaacccttctgttgctcctcggttccctcgcgaaccccacctcccctccatggaccctcgctccgccgcggacggcgcccgctggactacccggaccccttcgcccgcaccttcgacctggccgcgctacgcgtccctgccgccgcgtgcgcacccctcgagcgccgcctccggggccacctgctcaactggccccgcgtccacaacgtgatccgcctccgtaacgaccagggcctcctctcactgtcgcctcctcccccgggctaccccgccgaggagccggggggccccgccccacgggccaccgcagtactgcggagggagaagctggtccgcgagttgaacgcccgtggcttcctacggttcccaaacctcgcccgcctctcgcggcccagtcccctcgcgcggaagcggagggagaggaagggagacggcggcgatgaggagacgtgtgagcctgacaaagacaaggcctacgtggtggaggtagcgggggagagaagagaggacgacgacgattggaagggtctggtcggagaggagggcattgggagagacacgtggcggattggctccacccggttgctgttgcttgaggagagatacgccgagaggaaggttgatgagctgccggaggcagtgaaggatgtgttagaccatgaaactcaacatgatgagtcatctgcttttgagcttatacgatgtcatctaactttattttatacctactggtcaatgagtgaggttttagaggtattactccctgaaggtgtaataattcctacaggttttgaaacaatagggcatatagcacacttgaatttgcgagatgagcatatgccttacaagaaacttattgcttcggtggttcttgataaaaacaagccaaaaatccaaactgttgtcaataagacagatgttattcagaacaactatagaactatgcaacttgaagtcttagctggcaatggttcccttcgtacgatggtcattgagagcggccttcgttttcaagttgatcttggtacagtctattggaattctagattagccacagagaggcagaggctagttaatatctttagaaacttggacgttgtttgtgatatgttctcaggggttggtcctctagcgatttcagctgcaaaaaaggtcaaatatgtctatgcaaatgacataaaccctaatgcagtgggataccttgagagaaacatggttcttaacaaacttgaaaagaaaatagaggtttttaacatggatgctagaaggtttgttagtgcaatatattcaagcaagcacgtgcaaccaatcacacaaatagtgatgaatttgcccaatgacgctgttgaatttttagaggataaatttaacgttaggcgagaacatcgacactgttgaaatgcacagagtacggcttgttgcacccggaaaatggatgatatgtgcaacttttactcttccacagtcagtggcgtctgcacagccgaattacattacctgttgattttttgtactctctccgtcttaaaatattggcaacgactgttatgcaagcagtccttctgtgcaagcgtgcaagcaaaccatatgatccattagattacgatccaatcacagatacaaccatgtttgttagaggttttttataaagattattgagctgttggtggaagggtttaagtgttaaatgtgacatacggttggatcacgatctaatggatcaaatggtttgcttgcacgcttgcacagaaggactgcttgtatagcagtcgttgcctaaaatattagtcgttttagctcagctctggatttttatgtctatatccaaagacatgtaaaacatataaatcaaatgttatatgaatttattaattgtcgaaaatgaattttaatttgggatagagggagtactattcttactgcagcccctcgtatcttctgtactgtcgtcgaatacttcctatcagattatatagatgatgcccttgatcatctcacactgaatttggaaaggac

SEQ ID NO: 30061 - DNA, 2156 bp, Zea Mays
gtcgtactcgtacgctaccttttatccatccatggcgccgccgccgccgccgccactccacccccatcaccactgcgttctcacccgcttccgctgcccggccaccggtaccgcccgcttcctcattcgcctaggcatcaaacccttctgttgctcctcggttccctcgcgaaccccacctcccctccatggaccctcgctccgccgcggacggcgcccgctggactacccggaccccttcgcccgcaccttcgacctggccgcgctacgcgtccctgccgccgcgtgcgcacccctcgagcgccgcctccggggccacctgctcaactggccccgcgtccacaacgtgatccgcctccgtaacgaccagggcctcctctcactgtcgcctcctcccccgggctaccccgccgaggagccggggggccccgccccacgggccaccgcagtactgcggagggagaagctggtccgcgagttgaacgcccgtggcttcctacggttcccaaacctcgcccgcctctcgcggcccagtcccctcgcgcggaagcggagggagaggaagggagacggcggcgatgaggagacgtgtgagcctgacaaagacaaggcctacgtggtggaggtagcgggggagagaagagaggacgacgacgattggaagggtctggtcggagaggagggcattgggagagacacgtggcggattggctccacccggttgctgttgcttgaggagagatacgccgagaggaaggttgatgagctgccggaggcagtgaaggatgtgttagaccatgaaactcaacatgatgagtcatctgcttttgagcttatacgatgtcatctaactttattttatacctactggtcaatgagtgaggttttagaggtattactccctgaaggtgtaataattcctacaggttttgaaacaatagggcatatagcacacttgaatttgcgagatgagcatatgccttacaagaaacttattgcttcggtggttcttgataaaaacaagccaaaaatccaaactgttgtcaataagacagatgttattcagaacaactatagaactatgcaacttgaagtcttagctggcaatggttcccttcgtacgatggtcattgagagcggccttcgttttcaagttgatcttggtacagtctattggaattctagattagccacagagaggcagaggctagttaatatctttagaaacttggacgttgtttgtgatatgttctcaggggttggtcctctagcgatttcagctgcaaaaaaggtcaaatatgtctatgcaaatgacataaaccctaatgcagtgggataccttgagagaaacatggttcttaacaaacttgaaaagaaaatagagatgtgttcaaagggattttatgcaatactaaatcagaactgcattgtgtgatgccaatgatccatgtgtacggattttctaaagctgaggatccagagcatgacttccatgagaggataaatttaacgttaggcgagaacatcgacactgttgaaatgcacagagtacggcttgttgcacccggaaaatggatgatatgtgcaacttttactcttccacagtcagtggcgtctgcacagccgaattacattacctgttgattttttgtactctctccgtcttaaaatattggcaacgactgttatgcaagcagtccttctgtgcaagcgtgcaagcaaaccatatgatccattagattacgatccaatcacagatacaaccatgtttgttagaggttttttataaagattattgagctgttggtggaagggtttaagtgttaaatgtgacatacggttggatcacgatctaatggatcaaatggtttgcttgcacgcttgcacagaaggactgcttgtatagcagtcgttgcctaaaatattagtcgttttagctcagctctggatttttatgtctatatccaaagacatgtaaaacatataaatcaaatgttatatgaatttattaattgtcgaaaatgaattttaatttgggatagagggagtactattcttactgcagcccctcgtatcttctgtactgtcgtcgaatacttcctatcagattatatagatgatgcccttgatcatctcacactgaatttggaaaggac

SEQ ID NO: 30062 - DNA, 1507 bp, Zea Mays
gtcgtactcgtacgctaccttttatccatccatggcgccgccgccgccgccgccactccacccccatcaccactgcgttctcacccgcttccgctgcccggccaccggatgtgttagaccatgaaactcaacatgatgagtcatctgcttttgagcttatacgatgtcatctaactttattttatacctactggtcaatgagtgaggttttagaggtattactccctgaaggtgtaataattcctacaggttttgaaacaatagggcatatagcacacttgaatttgcgagatgagcatatgccttacaagaaacttattgcttcggtggttcttgataaaaacaagccaaaaatccaaactgttgtcaataagacagatgttattcagaacaactatagaactatgcaacttgaagtcttagctggcaatggttcccttcgtacgatggtcattgagagcggccttcgttttcaagttgatcttggtacagtctattggaattctagattagccacagagaggcagaggctagttaatatctttagaaacttggacgttgtttgtgatatgttctcaggggttggtcctctagcgatttcagctgcaaaaaaggtcaaatatgtctatgcaaatgacataaaccctaatgcagtgggataccttgagagaaacatggttcttaacaaacttgaaaagaaaatagaggtttttaacatggatgctagaaggtttgttagtgcaatatattcaagcaagcacgtgcaaccaatcacacaaatagtgatgaatttgcccaatgacgctgttgaatttttagctgaggatccagagcatgacttccatgagaggataaatttaacgttaggcgagaacatcgacactgttgaaatgcacagagtacggcttgttgcacccggaaaatggatgatatgtgcaacttttactcttccacagtcagtggcgtctgcacagccgaattacattacctgttgattttttgtactctctccgtcttaaaatattggcaacgactgttatgcaagcagtccttctgtgcaagcgtgcaagcaaaccatatgatccattagattacgatccaatcacagatacaaccatgtttgttagaggttttttataaagattattgagctgttggtggaagggtttaagtgttaaatgtgacatacggttggatcacgatctaatggatcaaatggtttgcttgcacgcttgcacagaaggactgcttgtatagcagtcgttgcctaaaatattagtcgttttagctcagctctggatttttatgtctatatccaaagacatgtaaaacatataaatcaaatgttatatgaatttattaattgtcgaaaatgaattttaatttgggatagagggagtactattcttactgcagcccctcgtatcttctgtactgtcgtcgaatacttcctatcagattatatagatgatgcccttgatcatctcacactgaatttggaaaggac

SEQ ID NO: 30063 - DNA, 1633 bp, Zea Mays
cagggacatgggcgatctaggtgtattggacctccccatctcagaggatgaggtccggtctgcagttttctgcctaccttcagatagagctccgggtccggatggttttaccgggagattctataagtcatgctggcatatcattaaggatgatctgcttgcagctatcaatgccctccatcaaggatgtgttagaccatgaaactcaacatgatgagtcatctgcttttgagcttatacgatgtcatctaactttattttatacctactggtcaatgagtgaggttttagaggtattactccctgaaggtgtaataattcctacaggttttgaaacaatagggcatatagcacacttgaatttgcgagatgagcatatgccttacaagaaacttattgcttcggtggttcttgataaaaacaagccaaaaatccaaactgttgtcaataagacagatgttattcagaacaactatagaactatgcaacttgaagtcttagctggcaatggttcccttcgtacgatggtcattgagagcggccttcgttttcaagttgatcttggtacagtctattggaattctagattagccacagagaggcagaggctagttaatatctttagaaacttggacgttgtttgtgatatgttctcaggggttggtcctctagcgatttcagctgcaaaaaaggtcaaatatgtctatgcaaatgacataaaccctaatgcagtgggataccttgagagaaacatggttcttaacaaacttgaaaagaaaatagaggtttttaacatggatgctagaaggtttgttagtgcaatatattcaagcaagcacgtgcaaccaatcacacaaatagtgatgaatttgcccaatgacgctgttgaatttttagaactgcattgtgtgatgccaatgatccatgtgtacggattttctaaagctgaggatccagagcatgacttccatgagaggataaatttaacgttaggcgagaacatcgacactgttgaaatgcacagagtacggcttgttgcacccggaaaatggatgatatgtgcaacttttactcttccacagtcagtggcgtctgcacagccgaattacattacctgttgattttttgtactctctccgtcttaaaatattggcaacgactgttatgcaagcagtccttctgtgcaagcgtgcaagcaaaccatatgatccattagattacgatccaatcacagatacaaccatgtttgttagaggttttttataaagattattgagctgttggtggaagggtttaagtgttaaatgtgacatacggttggatcacgatctaatggatcaaatggtttgcttgcacgcttgcacagaaggactgcttgtatagcagtcgttgcctaaaatattagtcgttttagctcagctctggatttttatgtctatatccaaagacatgtaaaacatataaatcaaatgttatatgaatttattaattgtcgaaaatgaattttaatttgggatagagggagtactattcttactgcagcccctcgtatcttctgtactgtcgtcgaatacttcctatcagattatatagatgatgcccttgatcatctcacactgaatttggaaaggac

SEQ ID NO: 30064 - DNA, 1446 bp, Zea Mays
gtttgaccttccattcagagggtgcagcagcattttagcgacgaataagtaccctaatagagttttagaggtattactccctgaaggtgtaataattcctacaggttttgaaacaatagggcatatagcacacttgaatttgcgagatgagcatatgccttacaagaaacttattgcttcggtggttcttgataaaaacaagccaaaaatccaaactgttgtcaataagacagatgttattcagaacaactatagaactatgcaacttgaagtcttagctggcaatggttcccttcgtacgatggtcattgagagcggccttcgttttcaagttgatcttggtacagtctattggaattctagattagccacagagaggcagaggctagttaatatctttagaaacttggacgttgtttgtgatatgttctcaggggttggtcctctagcgatttcagctgcaaaaaaggtcaaatatgtctatgcaaatgacataaaccctaatgcagtgggataccttgagagaaacatggttcttaacaaacttgaaaagaaaatagaggtttttaacatggatgctagaaggtttgttagtgcaatatattcaagcaagcacgtgcaaccaatcacacaaatagtgatgaatttgcccaatgacgctgttgaatttttagatgtgttcaaagggattttatgcaatactaaatcagaactgcattgtgtgatgccaatgatccatgtgtacggattttctaaagctgaggatccagagcatgacttccatgagaggataaatttaacgttaggcgagaacatcgacactgttgaaatgcacagagtacggcttgttgcacccggaaaatggatgatatgtgcaacttttactcttccacagtcagtggcgtctgcacagccgaattacattacctgttgattttttgtactctctccgtcttaaaatattggcaacgactgttatgcaagcagtccttctgtgcaagcgtgcaagcaaaccatatgatccattagattacgatccaatcacagatacaaccatgtttgttagaggttttttataaagattattgagctgttggtggaagggtttaagtgttaaatgtgacatacggttggatcacgatctaatggatcaaatggtttgcttgcacgcttgcacagaaggactgcttgtatagcagtcgttgcctaaaatattagtcgttttagctcagctctggatttttatgtctatatccaaagacatgtaaaacatataaatcaaatgttatatgaatttattaattgtcgaaaatgaattttaatttgggatagagggagtactattcttactgcagcccctcgtatcttctgtactgtcgtcgaatacttcctatcagattatatagatgatgcccttgatcatctcacactgaatttggaaaggac

SEQ ID NO: 30065 - DNA, 1444 bp, Zea Mays
atttcttcgacgtagaggaggtagacggtgtcatcaccgcgccgaaggatgaacaaaatgttttagaggtattactccctgaaggtgtaataattcctacaggttttgaaacaatagggcatatagcacacttgaatttgcgagatgagcatatgccttacaagaaacttattgcttcggtggttcttgataaaaacaagccaaaaatccaaactgttgtcaataagacagatgttattcagaacaactatagaactatgcaacttgaagtcttagctggcaatggttcccttcgtacgatggtcattgagagcggccttcgttttcaagttgatcttggtacagtctattggaattctagattagccacagagaggcagaggctagttaatatctttagaaacttggacgttgtttgtgatatgttctcaggggttggtcctctagcgatttcagctgcaaaaaaggtcaaatatgtctatgcaaatgacataaaccctaatgcagtgggataccttgagagaaacatggttcttaacaaacttgaaaagaaaatagaggtttttaacatggatgctagaaggtttgttagtgcaatatattcaagcaagcacgtgcaaccaatcacacaaatagtgatgaatttgcccaatgacgctgttgaatttttagatgtgttcaaagggattttatgcaatactaaatcagaactgcattgtgtgatgccaatgatccatgtgtacggattttctaaagctgaggatccagagcatgacttccatgagaggataaatttaacgttaggcgagaacatcgacactgttgaaatgcacagagtacggcttgttgcacccggaaaatggatgatatgtgcaacttttactcttccacagtcagtggcgtctgcacagccgaattacattacctgttgattttttgtactctctccgtcttaaaatattggcaacgactgttatgcaagcagtccttctgtgcaagcgtgcaagcaaaccatatgatccattagattacgatccaatcacagatacaaccatgtttgttagaggttttttataaagattattgagctgttggtggaagggtttaagtgttaaatgtgacatacggttggatcacgatctaatggatcaaatggtttgcttgcacgcttgcacagaaggactgcttgtatagcagtcgttgcctaaaatattagtcgttttagctcagctctggatttttatgtctatatccaaagacatgtaaaacatataaatcaaatgttatatgaatttattaattgtcgaaaatgaattttaatttgggatagagggagtactattcttactgcagcccctcgtatcttctgtactgtcgtcgaatacttcctatcagattatatagatgatgcccttgatcatctcacactgaatttggaaaggac

SEQ ID NO: 30066 - DNA, 759 bp, Zea Mays
caccgcgccgaaggatgaacaaaatgttttagaggtattactccctgaaggtgtaataattcctacaggttttgaaacaatagggcatatagcacacttgaatttgcgagatgagcatatgccttacaagaaacttattgcttcggtggttcttgataaaaacaagccaaaaatccaaactgttgtcaataagacagatgttattcagaacaactatagaactatgcaacttgaagtcttagctggcaatggttcccttcgtacgatggtcattgagagcggccttcgttttcaagttgatcttggtacagtctattggaattctagattagccacagagaggcagaggctagttaatatctttagaaacttggacgttgtttgtgatatgttctcaggggttggtcctctagcgatttcagctgcaaaaaaggtcaaatatgtctatgcaaatgacataaaccctaatgcagtgggataccttgagagaaacatggttcttaacaaacttgaaaagaaaatagaggtttttaacatggatgctagaaggtttgttagtgcaatatattcaagcaagcacgtgcaaccaatcacacaaatagtgatgaatttgcccaatgacgctgttgaatttttagatgtgttcaaagggattttatgcaatactaaatcagaactgcattgtgtgatgccaatgatccatgtgtacggattttctaaagctgaggatccagagcatgacttccatgagcatctatg

SEQ ID NO: 30067 - DNA, 1185 bp, Zea Mays
agatgaccgtgcgggagccgtgctgggaattggagaagactccacgcccgactgggaacaagagctattggaattctagattagccacagagaggcagaggctagttaatatctttagaaacttggacgttgtttgtgatatgttctcaggggttggtcctctagcgatttcagctgcaaaaaaggtcaaatatgtctatgcaaatgacataaaccctaatgcagtgggataccttgagagaaacatggttcttaacaaacttgaaaagaaaatagaggtttttaacatggatgctagaaggtttgttagtgcaatatattcaagcaagcacgtgcaaccaatcacacaaatagtgatgaatttgcccaatgacgctgttgaatttttagacatctatgaaaatttggcccagatgtgttcaaagggattttatgcaatactaaatcagaactgcattgtgtgatgccaatgatccatgtgtacggattttctaaagctgaggatccagagcatgacttccatgagaggataaatttaacgttaggcgagaacatcgacactgttgaaatgcacagagtacggcttgttgcacccggaaaatggatgatatgtgcaacttttactcttccacagtcagtggcgtctgcacagccgaattacattacctgttgattttttgtactctctccgtcttaaaatattggcaacgactgttatgcaagcagtccttctgtgcaagcgtgcaagcaaaccatatgatccattagattacgatccaatcacagatacaaccatgtttgttagaggttttttataaagattattgagctgttggtggaagggtttaagtgttaaatgtgacatacggttggatcacgatctaatggatcaaatggtttgcttgcacgcttgcacagaaggactgcttgtatagcagtcgttgcctaaaatattagtcgttttagctcagctctggatttttatgtctatatccaaagacatgtaaaacatataaatcaaatgttatatgaatttattaattgtcgaaaatgaattttaatttgggatagagggagtactattcttactgcagcccctcgtatcttctgtactgtcgtcgaatacttcctatcagattatatagatgatgcccttgatcatctcacactgaatttggaaaggac

SEQ ID NO: 30068 - DNA, 1058 bp, Zea Mays
agaagactccacgcccgactgggaacaagaggtgatatgttctcaggggttggtcctctagcgatttcagctgcaaaaaaggtcaaatatgtctatgcaaatgacataaaccctaatgcagtgggataccttgagagaaacatggttcttaacaaacttgaaaagaaaatagaggtttttaacatggatgctagaaggtttgttagtgcaatatattcaagcaagcacgtgcaaccaatcacacaaatagtgatgaatttgcccaatgacgctgttgaatttttagatgtgttcaaagggattttatgcaatactaaatcagaactgcattgtgtgatgccaatgatccatgtgtacggattttctaaagctgaggatccagagcatgacttccatgagaggataaatttaacgttaggcgagaacatcgacactgttgaaatgcacagagtacggcttgttgcacccggaaaatggatgatatgtgcaacttttactcttccacagtcagtggcgtctgcacagccgaattacattacctgttgattttttgtactctctccgtcttaaaatattggcaacgactgttatgcaagcagtccttctgtgcaagcgtgcaagcaaaccatatgatccattagattacgatccaatcacagatacaaccatgtttgttagaggttttttataaagattattgagctgttggtggaagggtttaagtgttaaatgtgacatacggttggatcacgatctaatggatcaaatggtttgcttgcacgcttgcacagaaggactgcttgtatagcagtcgttgcctaaaatattagtcgttttagctcagctctggatttttatgtctatatccaaagacatgtaaaacatataaatcaaatgttatatgaatttattaattgtcgaaaatgaattttaatttgggatagagggagtactattcttactgcagcccctcgtatcttctgtactgtcgtcgaatacttcctatcagattatatagatgatgcccttgatcatctcacactgaatttggaaaggac

SEQ ID NO: 30069 - DNA, 1016 bp, Zea Mays
gaagactccacgcccgactgggaacaagagctattggaattctagattagccacagagaggcagaggctagttaatatctttagaaacttggacgttgtttgtgatatgttctcaggggttggtcctctagcgatttcagctgcaaaaaaggtcaaatatgtctatgcaaatgacataaaccctaatgcagtgggataccttgagagaaacatggttcttaacaaacttgaaaagaaaatagagatgtgttcaaagggattttatgcaatactaaatcagaactgcattgtgtgatgccaatgatccatgtgtacggattttctaaagctgaggatccagagcatgacttccatgagaggataaatttaacgttaggcgagaacatcgacactgttgaaatgcacagagtacggcttgttgcacccggaaaatggatgatatgtgcaacttttactcttccacagtcagtggcgtctgcacagccgaattacattacctgttgattttttgtactctctccgtcttaaaatattggcaacgactgttatgcaagcagtccttctgtgcaagcgtgcaagcaaaccatatgatccattagattacgatccaatcacagatacaaccatgtttgttagaggttttttataaagattattgagctgttggtggaagggtttaagtgttaaatgtgacatacggttggatcacgatctaatggatcaaatggtttgcttgcacgcttgcacagaaggactgcttgtatagcagtcgttgcctaaaatattagtcgttttagctcagctctggatttttatgtctatatccaaagacatgtaaaacatataaatcaaatgttatatgaatttattaattgtcgaaaatgaattttaatttgggatagagggagtactattcttactgcagcccctcgtatcttctgtactgtcgtcgaatacttcctatcagattatatagatgatgcccttgatcatctcacactgaatttggaaaggac

SEQ ID NO: 30070 - DNA, 910 bp, Zea Mays
taggtttttaacatggatgctagaaggtttttaacatggatgctagaaggtttgttagtgcaatatattcaagcaagcacgtgcaaccaatcacacaaatagtgatgaatttgcccaatgacgctgttgaatttttagatgtgttcaaagggattttatgcaatactaaatcagaactgcattgtgtgatgccaatgatccatgtgtacggattttctaaagctgaggatccagagcatgacttccatgagaggataaatttaacgttaggcgagaacatcgacactgttgaaatgcacagagtacggcttgttgcacccggaaaatggatgatatgtgcaacttttactcttccacagtcagtggcgtctgcacagccgaattacattacctgttgattttttgtactctctccgtcttaaaatattggcaacgactgttatgcaagcagtccttctgtgcaagcgtgcaagcaaaccatatgatccattagattacgatccaatcacagatacaaccatgtttgttagaggttttttataaagattattgagctgttggtggaagggtttaagtgttaaatgtgacatacggttggatcacgatctaatggatcaaatggtttgcttgcacgcttgcacagaaggactgcttgtatagcagtcgttgcctaaaatattagtcgttttagctcagctctggatttttatgtctatatccaaagacatgtaaaacatataaatcaaatgttatatgaatttattaattgtcgaaaatgaattttaatttgggatagagggagtactattcttactgcagcccctcgtatcttctgtactgtcgtcgaatacttcctatcagattatatagatgatgcccttgatcatctcacactgaatttggaaaggac

SEQ ID NO: 30071 - DNA, 5619 bp, Zea Mays
ttggaatctatattgataccttttatgccattggagattacatgtacggcttgtagttgcactcccttcatcctctaatgctcactgctgcatgccctgaactgaattggattctcattcatgacaacttaaggctgtaaaaaaagctcgagttggacgagccggcttgggctcgcaaccgctcggctcggctcggagcggctcgatgctcagaacgggctcgagccgagtctgtttttgtggctcgtgaaaaaagtgagccgacttgttatggcgtggctggtagtggtggcggcgcgcccaaactgcgtagggcgtagccgctggtagaggcggggtgaggtttttctctcggctccctatgttgttggtatagaagaggaatatgagatagatgaattactgcttgattccattacttgcgtcgtgtggcttatatagtccttgatctaacaaacttttcctaaaaactctccttgatctaacacactttcctaaaatctctccttatcttatttgctaacaattctatccttatctatttgctaaaaactctcaacaaactgtacttggccgatcacatcttgatcccgcccctattttggcgttggcccggccagcatcgtgcaaacgtccgaccccacatgacatctctccccccttcgatgtgcagctcgtcctcgagctagaacctggggtagcgctccatgaatgtgtcgatgtcttcctaagtagcagatgatggtggttggtcttgccactgaatgaggacctggcgcatgcctgtgtccaaccatgcctgagtgccgctgctggaactggaatagctacgccatgatgcgtaggcggcaggggttgtgtagactccggtggctgacctcgaaagaggttgaggaggccaacatggaagacatcgtgtatgtgggctctcggtggaagacgaaggcggacaactactttgttgatgacttccatcacctgatcggttcgtagaagcgcatactcagcttgtcggtggttgcctgtggcagggataggggggtacggtgccgaacccgcaaccagacccaatcgcctaccttgtaggacaactttcgatcgtagtgtgccttgtaggatgcttgggcctgctccagtctgtaccacgcgtccttaagcatctcatcgtgttcagtcattgtcttggccaccgcttctacacgcgtttctccctgcttgtatgaccttatcgttggcggatcacgactatacaccagtttgaatggcgtatcctttagggatatctggaaggcggtgttgtaggtgtactccacccagggaagccaccgcagccattggcgtggtcgatcccctgtgaaacagtgtaggtacatggatatcaccttgttggtggccttgacctggccgtctgcttggaggtggaaggcggtggtcatgtggagcttggcatcggagagggtgtggagctccttctagaacgcggatgtgaacactgggtcgcgctgcggaattccgtgtaggcgaactatctcctcgaagaagaccttggcgactccttctgccgagtaggggtggacgagggggatgaagtggccgtacttggagaagtgtggtccacaaaggtgaggatgacagacttgcctttggcagtccatcgttgaagtccggcgcgatgtcggtccaaaccagttttggaactggaaggagaagcaggaggccgcctgacagcatgtggtcggttttgtagcgctggcatgtgaggtaccccttgacgaattcctgcactgcagcacgaaggttaggggcgtagaagtcacggcagaggcgatgaagagttcgctagatgccctcgtggtcatcattgtggatgtcgtgcactatctcctggagaagggcggaggacgacatgatgtacagcttggagtcgaacgtgaccatgccgtccaccatgccccatggcgtcacatggcgcgtgtactgatgtcgtcgctgagggcggccagtgctggatcggttctgtgtgcttggcgcaagttgtcgatgaaggagaactgaggtgccgccatcgtgaatgctgaagcctcttccatgtcgcagcaggagggcatcggcgatgatgttggtgctgcccggtttgtactgaaccttgaagtcgaatcccagtagcttcccacccaatgatgttgagggatggttgccaggcgttggtcgaggaggaacttgaggctgtagtggtcggtgcggacgcagaaatgcctgccacacaggtatggcctccaatggcgaacatcctatacgaggccaatgagttccctcgtatgccgcaagggaagcatgtcgaggggccactggcctactgtagaatgccaggggtctcttgtcttgcagcaacatggctccaaactcgtaggaggaggcgtcgcactcgacgatgaaaatcttggtgaagtccgacaaggccaacacggtggcgctggtgagtgcctggaaggcggctgtggctatgtccgtccacccaaacccggacttgcgtagcagtgccgtcaagggtgcggctatgaggccgtagtgctgcacaaatttgcgatagtatcccgccaagccgaggaagctgtggagcgcccgggcgaatgccagtaccggcttggatcttccccgcatccatgggcacacctgctgagatgacgtgtccacttggtacgcttgacgaagaggcgatgttgttggagcacaccgagtaccacatgaatgtggcagaggtgatccacccaggtggtgctgtagatgaggatgttgtcgaagaagactaggacgaagcgacgcaggaagggtcgcaggatctcgttcatcagggcttggaaggtggccggggtgttggagaggccgaacggcatgacgaggaactcatatagtccgtcatgggtttggagcgccgtcttgtgtacgtcgcctgggaacatgcgcacccggtgatagctggatcggaggttgagcttggtgaagtagtgcacgccgtgtagtccatccagcagttcatcgaccactggaatagggaatgcgtccttgatagtgatgctattcagagcacggtagtcgatacaaaaacgccatgagccgtcggctttcttaacgagaaggatcggcgaggagaatgccggctggcttgggcggatgagtccttgttggagcaaggcttgacattgacgttctaactcatccttgtgggccgatgggtacctgtatggtcgcacagccaccgggacggcaccgggcaacattgtgatatggtggtcgtgcgtgcgtggcggtagtagaccggtcggcttggcgaagatctgctggaactccgtcaggatggcatcgaggaggtcaccatccgtcgttgcatggagtcgcagactggccagtcccgcgatcctgtgccagcaaacgacttgggagccctactagaactgtagggtgagctgaccgaagtcccacaacagcggtcctagcattgccaatcattgggtgcccagcacgacatcatatcctgtgagtggcaggacaaagaagtcggcgacgaatggttgctagtcgatgctgaacgtggcgtggcgatacatctcgatgcagggcacgcgttcgccattggcgaccgtgatggtcagcttgtcgcgatgttgggggtacaaatactgttgctggcatgctgtcttcggcgatgaagttgtgtgtggacctggagtcgagcaaggcgtagaggacaacgttgcccatggtgatgcgaaccttcatggtggtcgaggagcgaacgctggctatggcacgaagggagatgagcggtgcttcttcttgtggatcgggctccatgcagttgtcctcatcttcggcgtcatctaggtctagtaagaacaatcgggggcaaactttattgtgcctgcgactgaacttatgttgcagttgtagcagaggcctagccgatgtcattcttccatctctgcttgagacagcttcttgattggacgaccttcaatggtgatggtggagctctaggatctggaaggtgcctatgatatcctagccataggggatggtgatatcctggcccaaagcttaatagaattaatagagtactcatattaacaaggtgcatcttttttttcggaagcctatgtcgaaagaatctctaagttaagcgtgcttggcttggagcaatttgggatgggcgaccgaccgggaagttctctcaggtgctgtgatatgctggcctctgggatggtgatatcctggcctagttatataaaaggactggcatgtaacagaaagagatacgctgtttgatcaatacaagtcctccctcttattcttgtgatcttgtcttcttcctcgattcttctgagaaccttgagaaacattcctctgttctcttccaaattctagttgctattcaccaattgtttgatcaatacaagtcctccctcttattcttgtcttcttcctcgaatcttctgagaaccttgagaaacattcctctgttctcttccaaattctagttgctattcaccaattagtcagatgagattatcccaagtctggtacataaaatttatttggtgtgaggtcaaggaacgatgagtcaatattgccatttttctcaccaagaaaaaaaccttttgtttttgtgtttaaatgattttcaaattttaattaacatatataaagacatctatgaaaatttggcccagatgtgttcaaagggattttatgcaatactaaatcagaactgcattgtgtgatgccaatgatccatgtgtacggattttctaaagctgaggatccagagcatgacttccatgaggtaagcaccgtttactgccataacaacatttttcttttatgttgagattcgttttttatcgtattcagtatctgttatctacataatttcgtttatcagcatctatgcctaaatttgcagaggataaatttaacgttaggcgagaacatcgacactgttgaaatgcacagagtacggcttgttgcacccggaaaatggatgatatgtgcaacttttactcttccacagtcagtggcgtctgcacagccgaattacattacctgttgattttttgtactctctccgtcttaaaatattggcaacgactgttatgcaagcagtccttctgtgcaagcgtgcaagcaaaccatatgatccattagattacgatccaatcacagatacaaccatgtttgttagaggttttttataaagattattgagctgttggtggaagggtttaagtgttaaatgtgacatacggttggatcacgatctaatggatcaaatggtttgcttgcacgcttgcacagaaggactgcttgtatagcagtcgttgcctaaaatattagtcgttttagctcagctctggatttttatgtctatatccaaagacatgtaaaacatataaatcaaatgttatatgaatttattaattgtcgaaaatgaattttaatttgggatagagggagtactattcttactgcagcccctcgtatcttctgtactgtcgtcgaatacttcctatcagattatatagatgatgcccttgatcatctcacactgaatttggaaaggac

SEQ ID NO: 30072 - DNA, 2090 bp, Zea Mays
gggtgcggctatgaggccgtagtgctgcacaaatttgcgatagtatcccgccaagccgaggaagctgtggagcgcccgggcgaatgccagtaccggcttggatcttccccgcatccatgggcacacctgctgagatgacgtgtccacttggtacgcttgacgaagaggcgatgttgttggagcacaccgagtaccacatgaatgtggcagaggtgatccacccaggtggtgctgtagatgaggatgttgtcgaagaagactaggacgaagcgacgcaggaagggtcgcaggatctcgttcatcagggcttggaaggtggccggggtgttggagaggccgaacggcatgacgaggaactcatatagtccgtcatgggtttggagcgccgtcttgtgtacgtcgcctgggaacatgcgcacccggtgatagctggatcggaggttgagcttggtgaagtagtgcacgccgtgtagtccatccagcagttcatcgaccactggaatagggaatgcgtccttgatagtgatgctattcagagcacggtagtcgatacaaaaacgccatgagccgtcggctttcttaacgagaaggatcggcgaggagaatgccggctggcttgggcggatgagtccttgttggagcaaggcttgacattgacgttctaactcatccttgtgggccgatgggtacctgtatggtcgcacagccaccgggacggcaccgggcaacattgtgatatggtggtcgtgcgtgcgtggcggtagtagaccggtcggcttggcgaagatctgctggaactccgtcaggatggcatcgaggaggtcaccatccgtcgttgcatggagtcgcagactggccagtcccgcgatcctgtgccagcaaacgacttgggagccctactagaactgtagggtgagctgaccgaagtcccacaacagcggtcctagcattgccaatcattgggtgcccagcacgacatcatatcctgtgagtggcaggacaaagaagtcggcgacgaatggttgctagtcgatgctgaacgtggcgtggcgatacatctcgatgcagggcacgcgttcgccattggcgaccgtgatggtcagcttgtcgcgatgttgggggtacaaatactgttgctggcatgctgtcttcggcgatgaagttgtgtgtggacctggagtcgagcaaggcgtagaggacaacgttgcccatggtgatgcgaaccttcatggtggtcgaggagcgaacgctggctatggcacgaagggagatgagcggtgcttcttcttgtggatcgggctccatgcagttgtcctcatcttcggcgtcatctaggtctagtaagaacaatcgggggcaaactttattgtgcctgcgactgaacttatgttgcagttgtagcagaggcctagccgatgtcattcttccatctctgcttgagacagcttcttgattggacgaccttcaatggtgatggtggagctctaggatctggaaggtgcctatgatatcctagccataggggatggtgatatcctggcccaaagcttaatagaattaatagagtactcatattaacaaggtgcatcttttttttcggaagcctatgtcgaaagaatctctaagttaagcgtgcttggcttggagcaatttgggatgggcgaccgaccgggaagttctctcaggtgctgtgatatgctggcctctgggatggtgatatcctggcctagttatataaaaggactggcatgtaacagaaagagatacgctgtttgatcaatacaagtcctccctcttattcttgtgatcttgtcttcttcctcgattcttctgagaaccttgagaaacattcctctgttctcttccaaattctagttgctattcaccaattgtttgatcaatacaagtcctccctcttattcttgtcttcttcctcgaatcttctgagaaccttgagaaacattcctctgttctcttccaaattctagttgctattcaccaattagtcagatgagattatcccaagtctggtacataaaatttatttggtgtgaggtcaaggaacgatgagtcaatattgccatttttct

SEQ ID NO: 30073 - DNA, 2759 bp, Zea Mays
aagaaatcctagggggttgaatgaaatagtgacattttttcatttaaatttcagttatagtacgaaactttcaagtaccttataaattcaaagaaaaattgtaaaaacgaaaactcacttttgttagcttcggcataatacgtagcatgtgagaaaaatggtaaggattaaatatatggaatgatttactgcagtttaattatattagtgttttctgtaatttaataatatatttaaatctattaatgcgaaatttctaaaaaaattagacacgagttgattgtatatctggaggttgtagaaaaagtttcgtgcagaaatgaggttgctaggtgaggttttactaatttgctttgtttatgctagaacagggtaagaatatgtttagtattcaatcgacttgtcaacatgttctgttagtgttgttgtgttaatttttcttatatggtaaagtgatgctttgtgttaatagaaatcgtgttctgtgtttattgattagttaaatgatttagaagattgttggtgccaccgaacttattagaaagtgagtaatatcgttaggttcgtttcatttaaaatttgaaaactacttagtgatcagtactcattagtgttttaagtctttaagatttaaattatgatctggtaaaattctatgacccttgataatactctacccgctggatcatagaataatgtgatgttcatgtaatttgagtgctacgcaaattagtccgaacaagtggattagaaagtagttaatacgtttctatccttattccaaatttagatgtctaagactaatgggtccaggttttgttagtcttctggcgttggaccgtagctaaggaaaatatagcgcatctatatagtttatagattcttgatgtttgagttaaatccggttaaggtagagaaacatgcatgttgtacttagagaaatatcaatatttaacattacctaagtattatagtgtctcgccactaagtgtttaattcttgttaatatagctatatttagttttgtgttattcctgctcatatttattcatgtgcattatgcatatcatttaggtacgttaattgatcacgtgatgcggaagacgacccaagtcgaccccaggataatgagagattggacatctccgcaagacgacgtcgtcaatcggacgaaccttaagatggacagactgaacgagtgccaaggcaaaggatggtcgtcaagtgatcatcgtctaacacgcactaacgtagtgtttattccaggcaagccccagtgcatttgccatctccttgctgttttaaaatctttttcaccttatatgatgcattagatgataggagttatgtgctaaacaattgatgcatttccttccttggaaaattgattacccttccttgatacacttttatgaaaagaatttatgatgcttagccttgctctagaaaacaaattgttttgttttaaaacaaaagtgatgcttcacagtggatgggaatttttacaaagaaaagactgaggatggtggatccatcacggctgtgatgggttcaacatctgaaatgtacctctgccaggtaccaaactttgagttttaaataataaagctgagaccgggtgggtgacttgcacgagaaggaagtctcggtgtagtgtctccgtctgagtcgattaagaaccgtgtcgatgtaggcttgccgattgaggaccttttaactggccatatgcctcgtcatgggtaagctttaactcgggcagaccaataccagaaaggccaacacgcaatgggagtggagagatggcgagagtagagtgtaccctccgtggtaagaggttggacggtggtgtatctgtgctctcggttggcgtgaacccggtctggtcttgagaaacccggtggcgagttgacatatgcaagggttaagtgctacatatatcgtgtggttggagatctccagctgggtattaatcgattcggatcgtcgttacttttcggacatgaagacttggtcactgccctacacgtaggaatccagtgaactgaaggaatgataaaaagacggctagtataggccatgtgcttgaactaggatagaaagaactctagatgcagttaactttacttaacttcacaagtaaaaatggatttttaaagatccactcatagtaagcttttctgcaaaagagtctttgaatcttgttaaaccataccttgattccctaaagccagcatatccttgagagtccttttctttagacgggtaagtcttgtgaaagtacacttcatactcagggtttttgaacccatgttgttccaggtactagaattgtgttgctgtggatggtgttaagcgccggtgggcacggccttcctataagtcaaagtatcttcaaactcggatcggaaccacagtgggagaagcacgaacaatacgaagattgatgcagcgccgaagctacgcgcgagggagcttcggcataacagcatgaaagggaaccgacttaaaggggaaaaggctatttagacctcgatgaattattttatagtcattagcaaatgtaaagggcatggatgtaatttcacaagggctgcgttccatgcctataaatagatgaacaatacccctgtactgttcacgctgacttgcatttgctcgtgcatcacacttgtacttttaccttctatcaagccgaaggtacatttgtaatttgatatcatttatattttctatgataataaaatagaaatgagctgata

SEQ ID NO: 30074 - DNA, 858 bp, Zea Mays
aaatttagatgtctaagactaatgggtccaggttttgttagtcttctggcgttggaccgtagctaaggaaaatatagcgcatctatatagtttatagattcttgatgtttgagttaaatccggttaaggtagagaaacatgcatgttgtacttagagaaatatcaatatttaacattacctaagtattatagtgtctcgccactaagtgtttaattcttgttaatatagctatatttagttttgtgttattcctgctcatatttattcatgtgcattatgcatatcatttaggtacgttaattgatcacgtgatgcggaagacgacccaagtcgaccccaggataatgagagattggacatctccgcaagacgacgtcgtcaatcggacgaaccttaagatggacagactgaacgagtgccaaggcaaaggatggtcgtcaagtgatcatcgtctaacacgcactaacgtagtgtttattccaggtatcttcaaactcggatcggaaccacagtgggagaagcacgaacaatacgaagattgatgcagcgccgaagctacgcgcgagggagcttcggcataacagcatgaaagggaaccgacttaaaggggaaaaggctatttagacctcgatgaattattttatagtcattagcaaatgtaaagggcatggatgtaatttcacaagggctgcgttccatgcctataaatagatgaacaatacccctgtactgttcacgctgacttgcatttgctcgtgcatcacacttgtacttttaccttctatcaagccgaaggtacatttgtaatttgatatcatttatattttctatgataataaaatagaaatgagctgata

SEQ ID NO: 30075 - DNA, 1169 bp, Zea Mays
cagcagtgctgttctgtattcccaaattgccaccctgttctgcgtactcgtcgaaacgacgataaccacacgtctcgaaaccctaaggctgccccaaattgttatcccaaaccctagacctaaacggctccatgctgtgagaccaccaacagtgtccatggctctggacgccccggtggagcgacgggacgaggtacagatcgcgatggggaacggaaacggcgtggcgccgtctcaaccgtcgcggccagccggtcggccaacggctgctgcggcggcagcgccatacgcggacaggcggctgcggctgaacccaaatgcggatcacaagccggaagactacagcgacgtgcgcggcgagtacgcgccggccgtgtacagcgcactcgagcggcatctcccacccagcctcatcgatgccgaccgcgatgtcaagctacacttcatgcgggacattctcgcgcgctactggccgcagggcgagcgtaacaaggtgcaaaggcacagagaatataggcagaggatactccacctttacaagcctcttcatgaagaattatacaatatgcatccttcagtgttcttcttaccaacattccttgaagcagttaggagcaatacagaagaatgctttagaagtattatgactgagccaattcctggtgtttattcgtttgctatgttgcagcctactttctgtgagatgttattggaggaggtagagaactttgaaaaatgggtccatgctatgaaatttaagataatgaggcctaatacaatgaacaagtatggtgctgtccttgatgattttggcctggaagctatgctgaaccagttcatggaacagttcatagctccaatttctaaaggttgtctgaatgacttctatgttgtcacatatatcgatcactttatttcagttgtttctcattaatcttatgctctgggttgatctttagttctttatcctgaggttggtggaggaacattggactcccatcacgcttttattgttgaatatgggaaagacagggatgttgaactaggaaatgtatgactacacacatattcctggttgggctgtactccaccatggtcgacacaggcatggtgctcgagctacttcatctggtctcagaataaatctgcttttgtggtgccggaggtat

SEQ ID NO: 30076 - DNA, 882 bp, Zea Mays
cttgtttgtttatatgcttccatacaaattagtgccactggcaacaaccaacaaattaagagtgggcagcaaaattgcttgcacatggttttctcttttctttgcactccatagatgaggtcctctgccattctcactctgccagagaagtgtgcctttcgtgctctgctggtgcaaaggcacagagaatataggcagaggatactccacctttacaagcctcttcatgaagaattatacaatatgcatccttcagtgttcttcttaccaacattccttgaagcagttaggagcaatacagaagaatgctttagaagtattatgactgagccaattcctggtgtttattcgtttgctatgttgcagcctactttctgtgagatgttattggaggaggtagagaactttgaaaaatgggtccatgctatgaaatttaagataatgaggcctaatacaatgaacaagtatggtgctgtccttgatgattttggcctggaagctatgctgaaccagttcatggaacagttcatagctccaatttctaaagttctttatcctgaggttggtggaggaacattggactcccatcacgcttttattgttgaatatgggaaagacagggatgttgaactaggttttcatgttgatgattcagaagttacattaaatgtttgccttggaaaacaattctttggtggtgaattatactttcgaggtattcggtgtgagaatcatgtgaattcagagacacaacatgaggaaatgtatgactacacacatattcctggttgggctgtactccaccatggtcgacacaggcatggtgctcgagctacttcatctggtctcagaataaatctgcttttgtggtgccggaggtat

SEQ ID NO: 30077 - DNA, 1945 bp, Zea Mays
agaggtcgtgacaaacggcgcctaaaaatacacggagcctgcacgcgtgtttctccacatgccctctccttctcggatcctctaccgtaatctcccggcgacgccgccgccatgtcttcccagtcttctgcaggaggtccggcgatccatcatccccactccaactaccacccgtacatctttcagcatgaccctccgctccactctaattcccgccgtcgccgccgtaaccatgatgacccatatcaaccctatctgcctctaccccacgctcactcccacggagccactgccgtcgttaccggcaccgttcgttgccatgtcccccgggatccacttgtgctctcacacctccaggagcgcctctttccgactctccctcaacatcacccgatcgcgggtccacccccgacgaagcgggcccgccgcgcgccagatactccgtgggatccgccgccgccaacgctgcagccggcacttgtcccggtggcgctagagaggcctccggatgtaggacattctgccggggcgttgctttcgcgtgacgagatcgagaggcggtctccatcaagaagggacgggatcgattccgcgcttgaggccaggctgcgtgcgtcctactgcgcctacctgcattgcctcggcaaccggctcgggccgcagacaacaattgcgacggctgtggtgttctgccatcggttcttcttccacagatctcatgcctgccatgatagatttttggttgcgactgcagccttgttcctggcagcaaaggcagaagaaacagcatgccttttgaatactgttcttagggcttcatgtgaggtttctcaaaatcaggaattcaatcttcttccttacatgctatgtggtcaggactggtttgaacagtacagagagagtgtaatacaagcggagcaaatgatacttacaacacttgattttgaactcgaagtagcccacccatatgcttccctatcctctgctttgggcaaactaggactcacacatactgttctgtttaatgtggcttggaatctgatcaatgaagggctacgaagttcactttggcttcagttcaagccccatcatattgctgctggagctgcattccttgctgcaaagttcctccactatgacatcacattccatccaaatttctggcatgaattcaagacaagtccatatattgttcaagatgttgtccagcagttgaaggagctactttaggatacaacattcaatgtatttacataatactcagagatcctcttggtttatacgctgtagtgagtagtgatcactgccaaaagtacgtacacattagcatgtggtcactttcatcaattactgaacatctttcatgtaggtttttacaaccacagtgctatgtacaaaaggggaagatgttattcaaaagttgcccttttagttttggggaggtaaaagcaaacaatctttagaagagatgtgacgaacaacaagagataaaaaaggcaaaaaggtgtaagagatgtaaaaagttgatgaaatgttggatcccttaattggttgtccggttgtgattatctgatatatatagaggatggtttatcccaacaataaacgagtcgaaatcgtaaccttcacattatctttagtccaaaattgatttaaaaaccgatctagaaagtattcgatttgaacttgaacagaaaaactgacttgtgggtcccaaaacaaaccatgatgctttcagtagaaggaccgagcagctggcttggccgagcaacaacaggaaaatcggttcggctggtttgagacaagggaattggtttggttggtttgggaatcgacatcgtcggccctgcaggctagacatccatctcctttgctttgtaggcttcaaatgtagtgttccaataatttatttgttattattttgttgtctggaattttgctagtc

SEQ ID NO: 30078 - DNA, 1067 bp, Zea Mays
aaaaatacacggagcctgcacgcgtgtttctccacatgccctctccttctcggatcctctaccgtaatctcccggcgacgccgccgccatgtcttcccagtcttctgcaggaggtccggcgatccatcatccccactccaactaccacccgtacatctttcagcatgaccctccgctccactctaattcccgccgtcgccgccgtaaccatgatgacccatatcaaccctatctgcctctaccccacgctcactcccacggagccactgccgtcgttaccggcaccgttcgttgccatgtcccccgggatccacttgtgctctcacacctccaggagcgcctctttccgactctccctcaacatcacccgatcgcgggtccacccccgacgaagcgggcccgccgcgcgccagatactccgtgggatccgccgccgccaacgctgcagccggcacttgtcccggtggcgctagagaggcctccggatgtaggacattctgccggggcgttgctttcgcgtgacgagatcgagaggcggtctccatcaagaagggacgggatcgattccgcgcttgaggccaggctgcgtgcgtcctactgcgcctacctgcattgcctcggcaaccggctcgggccgcagacaacaattgcgacggctgtggtgttctgccatcggttcttcttccacagatctcatgcctgccatgatagatttttggttgcgactgcagccttgttcctggcagcaaaggcagaagaaacagcatgccttttgaatactgttcttagggcttcatgtgaggtttctcaaaatcaggaattcaatcttcttccttacatgctatgtggtcaggactggtttgaacagtacagagagagtgtaatacaagcggagcaaatgatacttacaacacttgattttgaactcgaagtagcccacccatatgcttccctatcctctgctttgggcaaactaggactcacacatactgttctgtttaatgtggcttggaatctgatcaatgaagggcgaaccacacctgagacctggtgcctcacccctctga

SEQ ID NO: 30079 - DNA, 1919 bp, Zea Mays
aaaaatacacggagcctgcacgcgtgtttctccacatgccctctccttctcggatcctctaccgtaatctcccggcgacgccgccgccatgtcttcccagtcttctgcaggaggtccggcgatccatcatccccactccaactaccacccgtacatctttcagcatgaccctccgctccactctaattcccgccgtcgccgccgtaaccatgatgacccatatcaaccctatctgcctctaccccacgctcactcccacggagccactgccgtcgttaccggcaccgttcgttgccatgtcccccgggatccacttgtgctctcacacctccaggagcgcctctttccgactctccctcaacatcacccgatcgcgggtccacccccgacgaagcgggcccgccgcgcgccagatactccgtgggatccgccgccgccaacgctgcagccggcacttgtcccggtggcgctagagaggcctccggatgtaggacattctgccggggcgttgctttcgcgtgacgagatcgagaggcggtctccatcaagaagggacgggatcgattccgcgcttgaggccaggctgcgtgcgtcctactgcgcctacctgcattgcctcggcaaccggctcgggccgcagacaacaattgcgacggctgtggtgttctgccatcggttcttcttccacagatctcatgcctgccatgatagatttttggttgcgactgcagccttgttcctggcagcaaaggcagaagaaacagcatgccttttgaatactgttcttagggcttcatgtgaggtttctcaaaatcaggaattcaatcttcttccttacatgctatgtggtgactggtttgaacagtacagagagagtgtaatacaagcggagcaaatgatacttacaacacttgattttgaactcgaagtagcccacccatatgcttccctatcctctgctttgggcaaactaggactcacacatactgttctgtttaatgtggcttggaatctgatcaatgaagggctacgaagttcactttggcttcagttcaagccccatcatattgctgctggagctgcattccttgctgcaaagttcctccactatgacatcacattccatccaaatttctggcatgaattcaagacaagtccatatattgttcaagatgttgtccagcagttgaaggagctactttaggatacaacattcaatgtatttacataatactcagagatcctcttggtttatacgctgtagtgagtagtgatcactgccaaaagtacgtacacattagcatgtggtcactttcatcaattactgaacatctttcatgtaggtttttacaaccacagtgctatgtacaaaaggggaagatgttattcaaaagttgcccttttagttttggggaggtaaaagcaaacaatctttagaagagatgtgacgaacaacaagagataaaaaaggcaaaaaggtgtaagagatgtaaaaagttgatgaaatgttggatcccttaattggttgtccggttgtgattatctgatatatatagaggatggtttatcccaacaataaacgagtcgaaatcgtaaccttcacattatctttagtccaaaattgatttaaaaaccgatctagaaagtattcgatttgaacttgaacagaaaaactgacttgtgggtcccaaaacaaaccatgatgctttcagtagaaggaccgagcagctggcttggccgagcaacaacaggaaaatcggttcggctggtttgagacaagggaattggtttggttggtttgggaatcgacatcgtcggccctgcaggctagacatccatctcctttgctttgtaggcttcaaatgtagtgttccaataatttatttgttattattttgttgtctggaattttgctagtc

SEQ ID NO: 30080 - DNA, 1869 bp, Zea Mays
aaaaatacacggagcctgcacgcgtgtttctccacatgccctctccttctcggatcctctaccgtaatctcccggcgacgccgccgccatgtcttcccagtcttctgcaggaggtccggcgatccatcatccccactccaactaccacccgtacatctttcagcatgaccctccgctccactctaattcccgccgtcgccgccgtaaccatgatgacccatatcaaccctatctgcctctaccccacgctcactcccacggagccactgccgtcgttaccggcaccgttcgttgccatgtcccccgggatccacttgtgctctcacacctccaggagcgcctctttccgactctccctcaacatcacccgatcgcgggtccacccccgacgaagcgggcccgccgcgcgccagatactccgtgggatccgccgccgccaacgctgcagccggcacttgtcccggtggcgctagagaggcctccggatgtaggacattctgccggggcgttgctttcgcgtgacgagatcgagaggcggtctccatcaagaagggacgggatcgattccgcgcttgaggccaggctgcgtgcgtcctactgcgcctacctgcattgcctcggcaaccggctcgggccgcagacaacaattgcgacggctgtggtgttctgccatcggttcttcttccacagatctcatgcctgccatgatagatttttggttgcgactgcagccttgttcctggcagcaaaggcagaagaaacagcatgccttttgaatactgttcttagggcttcatcaggactggtttgaacagtacagagagagtgtaatacaagcggagcaaatgatacttacaacacttgattttgaactcgaagtagcccacccatatgcttccctatcctctgctttgggcaaactaggactcacacatactgttctgtttaatgtggcttggaatctgatcaatgaagggctacgaagttcactttggcttcagttcaagccccatcatattgctgctggagctgcattccttgctgcaaagttcctccactatgacatcacattccatccaaatttctggcatgaattcaagacaagtccatatattgttcaagatgttgtccagcagttgaaggagctactttaggatacaacattcaatgtatttacataatactcagagatcctcttggtttatacgctgtagtgagtagtgatcactgccaaaagtacgtacacattagcatgtggtcactttcatcaattactgaacatctttcatgtaggtttttacaaccacagtgctatgtacaaaaggggaagatgttattcaaaagttgcccttttagttttggggaggtaaaagcaaacaatctttagaagagatgtgacgaacaacaagagataaaaaaggcaaaaaggtgtaagagatgtaaaaagttgatgaaatgttggatcccttaattggttgtccggttgtgattatctgatatatatagaggatggtttatcccaacaataaacgagtcgaaatcgtaaccttcacattatctttagtccaaaattgatttaaaaaccgatctagaaagtattcgatttgaacttgaacagaaaaactgacttgtgggtcccaaaacaaaccatgatgctttcagtagaaggaccgagcagctggcttggccgagcaacaacaggaaaatcggttcggctggtttgagacaagggaattggtttggttggtttgggaatcgacatcgtcggccctgcaggctagacatccatctcctttgctttgtaggcttcaaatgtagtgttccaataatttatttgttattattttgttgtctggaattttgctagtc

SEQ ID NO: 30081 - DNA, 1872 bp, Zea Mays
aaaaatacacggagcctgcacgcgtgtttctccacatgccctctccttctcggatcctctaccgtaatctcccggcgacgccgccgccatgtcttcccagtcttctgcaggaggtccggcgatccatcatccccactccaactaccacccgtacatctttcagcatgaccctccgctccactctaattcccgccgtcgccgccgtaaccatgatgacccatatcaaccctatctgcctctaccccacgctcactcccacggagccactgccgtcgttaccggcaccgttcgttgccatgtcccccgggatccacttgtgctctcacacctccaggagcgcctctttccgactctccctcaacatcacccgatcgcgggtccacccccgacgaagcgggcccgccgcgcgccagatactccgtgggatccgccgccgccaacgctgcagccggcacttgtcccggtggcgctagagaggcctccggatgtaggacattctgccggggcgttgctttcgcgtgacgagatcgagaggcggtctccatcaagaagggacgggatcgattccgcgcttgaggccaggctgcgtgcgtcctactgcgcctacctgcattgcctcggcaaccggctcgggttgccgcagacaacaattgcgacggctgtggtgttctgccatcggttcttcttccacagatctcatgcctgccatgatagatttttggttgcgactgcagccttgttcctggcagcaaaggcagaagaaacagcatgccttttgaatactgttcttagggcttcatcaggactggtttgaacagtacagagagagtgtaatacaagcggagcaaatgatacttacaacacttgattttgaactcgaagtagcccacccatatgcttccctatcctctgctttgggcaaactaggactcacacatactgttctgtttaatgtggcttggaatctgatcaatgaagggctacgaagttcactttggcttcagttcaagccccatcatattgctgctggagctgcattccttgctgcaaagttcctccactatgacatcacattccatccaaatttctggcatgaattcaagacaagtccatatattgttcaagatgttgtccagcagttgaaggagctactttaggatacaacattcaatgtatttacataatactcagagatcctcttggtttatacgctgtagtgagtagtgatcactgccaaaagtacgtacacattagcatgtggtcactttcatcaattactgaacatctttcatgtaggtttttacaaccacagtgctatgtacaaaaggggaagatgttattcaaaagttgcccttttagttttggggaggtaaaagcaaacaatctttagaagagatgtgacgaacaacaagagataaaaaaggcaaaaaggtgtaagagatgtaaaaagttgatgaaatgttggatcccttaattggttgtccggttgtgattatctgatatatatagaggatggtttatcccaacaataaacgagtcgaaatcgtaaccttcacattatctttagtccaaaattgatttaaaaaccgatctagaaagtattcgatttgaacttgaacagaaaaactgacttgtgggtcccaaaacaaaccatgatgctttcagtagaaggaccgagcagctggcttggccgagcaacaacaggaaaatcggttcggctggtttgagacaagggaattggtttggttggtttgggaatcgacatcgtcggccctgcaggctagacatccatctcctttgctttgtaggcttcaaatgtagtgttccaataatttatttgttattattttgttgtctggaattttgctagtc

SEQ ID NO: 30082 - DNA, 1845 bp, Zea Mays
aaaaatacacggagcctgcacgcgtgtttctccacatgccctctccttctcggatcctctaccgtaatctcccggcgacgccgccgccatgtcttcccagtcttctgcaggaggtccggcgatccatcatccccactccaactaccacccgtacatctttcagcatgaccctccgctccactctaattcccgccgtcgccgccgtaaccatgatgacccatatcaaccctatctgcctctaccccacgctcactcccacggagccactgccgtcgttaccggcaccgttcgttgccatgtcccccgggatccacttgtgctctcacacctccaggagcgcctctttccgactctccctcaacatcacccgatcgcgggtccacccccgacgaagcgggcccgccgcgcgccagatactccgtgggatccgccgccgccaacgctgcagccggcacttgtcccggtggcgctagagaggcctccggatgtaggacattctgccggggcgttgctttcgcgtgacgagatcgagaggcggtctccatcaagaagggacgggatcgattccgcgcttgaggccaggctgcgtgcgtcctactgcgcctacctgcattgcctcggcaaccggctcgggttgccgcagacaacaattgcgacggctgtggtgttctgccatcggttcttcttccacagatctcatgcctgccatgatagatttttggttgcgactgcagccttgttcctggcagcaaaggcagaagaaacagcatgccttttgaatactgttcttagggcttcatgtgaggtttctcaaaatcaggaattcaatcttcttccttacatgctatgtggtcaggactggtttgaacagtacagagagagtgtaatacaagcggagcaaatgatacttacaacacttgattttgaactcgaagtagcccacccatatgcttccctatcctctgctttgggcaaactaggactcacacatactgttctgtttaatgtggcttggaatctgatcaatgaagggctacgaagttcactttggcttcagttcaagccccatcatattgctgctggagctgcattccttgctgcaaagttcctccactatgacatcacattccatccaaatttctggcatgaattcaagacaagtccatatattgttcaagatgttgtccagcagttgaaggagctactttaggatacaacattcaatgtatttacataatactcagagatcctcttggtttatacgctgtagtttttacaaccacagtgctatgtacaaaaggggaagatgttattcaaaagttgcccttttagttttggggaggtaaaagcaaacaatctttagaagagatgtgacgaacaacaagagataaaaaaggcaaaaaggtgtaagagatgtaaaaagttgatgaaatgttggatcccttaattggttgtccggttgtgattatctgatatatatagaggatggtttatcccaacaataaacgagtcgaaatcgtaaccttcacattatctttagtccaaaattgatttaaaaaccgatctagaaagtattcgatttgaacttgaacagaaaaactgacttgtgggtcccaaaacaaaccatgatgctttcagtagaaggaccgagcagctggcttggccgagcaacaacaggaaaatcggttcggctggtttgagacaagggaattggtttggttggtttgggaatcgacatcgtcggccctgcaggctagacatccatctcctttgctttgtaggcttcaaatgtagtgttccaataatttatttgttattattttgttgtctggaattttgctagtc

SEQ ID NO: 30083 - DNA, 1922 bp, Zea Mays
aaaaatacacggagcctgcacgcgtgtttctccacatgccctctccttctcggatcctctaccgtaatctcccggcgacgccgccgccatgtcttcccagtcttctgcaggaggtccggcgatccatcatccccactccaactaccacccgtacatctttcagcatgaccctccgctccactctaattcccgccgtcgccgccgtaaccatgatgacccatatcaaccctatctgcctctaccccacgctcactcccacggagccactgccgtcgttaccggcaccgttcgttgccatgtcccccgggatccacttgtgctctcacacctccaggagcgcctctttccgactctccctcaacatcacccgatcgcgggtccacccccgacgaagcgggcccgccgcgcgccagatactccgtgggatccgccgccgccaacgctgcagccggcacttgtcccggtggcgctagagaggcctccggatgtaggacattctgccggggcgttgctttcgcgtgacgagatcgagaggcggtctccatcaagaagggacgggatcgattccgcgcttgaggccaggctgcgtgcgtcctactgcgcctacctgcattgcctcggcaaccggctcgggttgccgcagacaacaattgcgacggctgtggtgttctgccatcggttcttcttccacagatctcatgcctgccatgatagatttttggttgcgactgcagccttgttcctggcagcaaaggcagaagaaacagcatgccttttgaatactgttcttagggcttcatgtgaggtttctcaaaatcaggaattcaatcttcttccttacatgctatgtggtgactggtttgaacagtacagagagagtgtaatacaagcggagcaaatgatacttacaacacttgattttgaactcgaagtagcccacccatatgcttccctatcctctgctttgggcaaactaggactcacacatactgttctgtttaatgtggcttggaatctgatcaatgaagggctacgaagttcactttggcttcagttcaagccccatcatattgctgctggagctgcattccttgctgcaaagttcctccactatgacatcacattccatccaaatttctggcatgaattcaagacaagtccatatattgttcaagatgttgtccagcagttgaaggagctactttaggatacaacattcaatgtatttacataatactcagagatcctcttggtttatacgctgtagtgagtagtgatcactgccaaaagtacgtacacattagcatgtggtcactttcatcaattactgaacatctttcatgtaggtttttacaaccacagtgctatgtacaaaaggggaagatgttattcaaaagttgcccttttagttttggggaggtaaaagcaaacaatctttagaagagatgtgacgaacaacaagagataaaaaaggcaaaaaggtgtaagagatgtaaaaagttgatgaaatgttggatcccttaattggttgtccggttgtgattatctgatatatatagaggatggtttatcccaacaataaacgagtcgaaatcgtaaccttcacattatctttagtccaaaattgatttaaaaaccgatctagaaagtattcgatttgaacttgaacagaaaaactgacttgtgggtcccaaaacaaaccatgatgctttcagtagaaggaccgagcagctggcttggccgagcaacaacaggaaaatcggttcggctggtttgagacaagggaattggtttggttggtttgggaatcgacatcgtcggccctgcaggctagacatccatctcctttgctttgtaggcttcaaatgtagtgttccaataatttatttgttattattttgttgtctggaattttgctagtc

SEQ ID NO: 30084 - DNA, 1801 bp, Zea Mays
aaaaatacacggagcctgcacgcgtgtttctccacatgccctctccttctcggatcctctaccgtaatctcccggcgacgccgccgccatgtcttcccagtcttctgcaggaggtccggcgatccatcatccccactccaactaccacccgtacatctttcagcatgaccctccgctccactctaattcccgccgtcgccgccgtaaccatgatgacccatatcaaccctatctgcctctaccccacgctcactcccacggagccactgccgtcgttaccggcaccgttcgttgccatgtcccccgggatccacttgtgctctcacacctccaggagcgcctctttccgactctccctcaacatcacccgatcgcgggtccacccccgacgaagcgggcccgccgcgcgccagatactccgtgggatccgccgccgccaacgctgcagccggcacttgtcccggtggcgctagagaggcctccggatgtaggacattctgccggggcgttgctttcgcgtgacgagatcgagaggcggtctccatcaagaagggacgggatcgattccgcgcttgaggccaggctgcgtgcgtcctactgcgcctacctgcattgcctcggcaaccggctcgggttgccgcagacaacaattgcgacggctgtggtgttctgccatcggttcttcttccacagatctcatgcctgccatgatagatttttggttgcgactgcagccttgttcctggcagcaaaggcagaagaaacagcatgccttttgaatactgttcttagggcttcatgtgaggtttctcaaaatcaggaattcaatcttcttccttacatgctatgtggtcaggactggtttgaacagtacagagagagtgtaatacaagcggagcaaatgatacttacaacacttgattttgaactcgaagtagcccacccatatgcttccctatcctctgctttgggcaaactaggactcacacatactgttctgtttaatgtggcttggaatctgatcaatgaagggctacgaagttcactttggcttcagttcaagccccatcatattgctgctggagctgcattccttgctgcaaagttcctccactatgacatcacattccatccaaatttctggcatgaattcaagacaagtccatatattgttcaagatgttgtccagcagttgaaggagctactttaggatacaacattcaatgtttttacaaccacagtgctatgtacaaaaggggaagatgttattcaaaagttgcccttttagttttggggaggtaaaagcaaacaatctttagaagagatgtgacgaacaacaagagataaaaaaggcaaaaaggtgtaagagatgtaaaaagttgatgaaatgttggatcccttaattggttgtccggttgtgattatctgatatatatagaggatggtttatcccaacaataaacgagtcgaaatcgtaaccttcacattatctttagtccaaaattgatttaaaaaccgatctagaaagtattcgatttgaacttgaacagaaaaactgacttgtgggtcccaaaacaaaccatgatgctttcagtagaaggaccgagcagctggcttggccgagcaacaacaggaaaatcggttcggctggtttgagacaagggaattggtttggttggtttgggaatcgacatcgtcggccctgcaggctagacatccatctcctttgctttgtaggcttcaaatgtagtgttccaataatttatttgttattattttgttgtctggaattttgctagtc

SEQ ID NO: 30085 - DNA, 1453 bp, Zea Mays
tgatcacccactctagaatgacttaacaaatttaagttatctgtgatctttgtaaatcatttttaagttatttcagggtgggtgatcatcacctgggggctggggtgacaaatagcgctgccctataaacacacaagctgcaacactgtttattctgaaatgtctagcattcaagctgcaacatcctatcacttgatgacagaatctaagtgtactgaacttcatgtagtcttgttggatatattttcttgctcctggtgctaacccagcattattttgcatgttcatgtggatcatgtaacttggcacatgaaggcttttttaacttggttgcgactgcagccttgttcctggcagcaaaggcagaagaaacagcatgccttttgaatactgttcttagggcttcatgtgaggtttctcaaaatcaggaattcaatcttcttccttacatgctatgtggtcaggactggtttgaacagtacagagagagtgtaatacaagcggagcaaatgatacttacaacacttgattttgaactcgaagtagcccacccatatgcttccctatcctctgctttgggcaaactaggactcacacatactgttctgtttaatgtggcttggaatctgatcaatgaagggctacgaagttcactttggcttcagttcaagccccatcatattgctgctggagctgcattccttgctgcaaagttcctccactatgacatcacattccatccaaatttctggcatgaattcaagacaagtccatatattgttcaagatgttgtccagcagttgaaggagctactttaggatacaacattcaatgtatttacataatactcagagatcctcttggtttatacgctgtagtttttacaaccacagtgctatgtacaaaaggggaagatgttattcaaaagttgcccttttagttttggggaggtaaaagcaaacaatctttagaagagatgtgacgaacaacaagagataaaaaaggcaaaaaggtgtaagagatgtaaaaagttgatgaaatgttggatcccttaattggttgtccggttgtgattatctgatatatatagaggatggtttatcccaacaataaacgagtcgaaatcgtaaccttcacattatctttagtccaaaattgatttaaaaaccgatctagaaagtattcgatttgaacttgaacagaaaaactgacttgtgggtcccaaaacaaaccatgatgctttcagtagaaggaccgagcagctggcttggccgagcaacaacaggaaaatcggttcggctggtttgagacaagggaattggtttggttggtttgggaatcgacatcgtcggccctgcaggctagacatccatctcctttgctttgtaggcttcaaatgtagtgttccaataatttatttgttattattttgttgtctggaattttgctagtc

SEQ ID NO: 30086 - DNA, 1338 bp, Zea Mays
ttcagggtgggtgatcatcacctgggggctggggtgacaaatagcgctgccctataaacacacaagctgcaacactgtttattctgaaatgtctagcattcaagctgcaacatcctatcacttgatgacagaatctaagtgtactgaacttcatgtagtcttgttggatatattttcttgctcctggtgctaacccagcattattttgcatgttcatgtggatcatgtaacttggcacatgaaggcttttttaacttggttgcgactgcagccttgttcctggcagcaaaggcagaagaaacagcatgccttttgaatactgttcttagggcttcatgtgaggtttctcaaaatcaggaattcaatcttcttccttacatgctatgtggtcaggactggtttgaacagtacagagagagtgtaatacaagcggagcaaatgatacttacaacacttgattttgaactcgaagtagcccacccatatgcttccctatcctctgctttgggcaaactaggactcacacatactgttctgtttaatgtggcttggaatctgatcaatgaagggctacgaagttcactttggcttcagttcaagccccatcatattgctgctggagctgcattccttgctgcaaagttcctccactatgacatcacattccatccaaatttctggcatgaattcaagacaagtccatatattgttcaagatgttgtccagcagttgaaggagctactttaggatacaacattcaatgtttttacaaccacagtgctatgtacaaaaggggaagatgttattcaaaagttgcccttttagttttggggaggtaaaagcaaacaatctttagaagagatgtgacgaacaacaagagataaaaaaggcaaaaaggtgtaagagatgtaaaaagttgatgaaatgttggatcccttaattggttgtccggttgtgattatctgatatatatagaggatggtttatcccaacaataaacgagtcgaaatcgtaaccttcacattatctttagtccaaaattgatttaaaaaccgatctagaaagtattcgatttgaacttgaacagaaaaactgacttgtgggtcccaaaacaaaccatgatgctttcagtagaaggaccgagcagctggcttggccgagcaacaacaggaaaatcggttcggctggtttgagacaagggaattggtttggttggtttgggaatcgacatcgtcggccctgcaggctagacatccatctcctttgctttgtaggcttcaaatgtagtgttccaataatttatttgttattattttgttgtctggaattttgctagtc

SEQ ID NO: 30087 - DNA, 473 bp, Zea Mays
ctaagtgtactgaacttcatgtagtcttgttggatatattttcttgctcctggtgctaacccagcattattttgcatgttcatgtggatcatgtaacttggcacatgaaggcttttttaacttggttgcgactgcagccttgttcctggcagcaaaggcagaagaaacagcatgccttttgaatactgttcttagggcttcatgtgaggtttctcaaaatcaggaattcaatcttcttccttacatgctatgtggtcaggactggtttgaacagtacagagagagtgtaatacaagcggagcaaatgatacttacaacacttgattttgaactcgaagtagcccacccatatgcttccctatcctctgctttgggcaaactaggactcacacatactgttctgtttaatgtggcttggaatctgatcaatgaagggcgaaccacacctgagacctggtgcctcacccctctga

SEQ ID NO: 30088 - DNA, 1214 bp, Zea Mays
cagcattattttgcatgttcatgtggatcatgtaacttggcacatgaaggcttttttaacttggttgcgactgcagccttgttcctggcagcaaaggcagaagaaacagcatgccttttgaatactgttcttagggcttcatcaggactggtttgaacagtacagagagagtgtaatacaagcggagcaaatgatacttacaacacttgattttgaactcgaagtagcccacccatatgcttccctatcctctgctttgggcaaactaggactcacacatactgttctgtttaatgtggcttggaatctgatcaatgaagggctacgaagttcactttggcttcagttcaagccccatcatattgctgctggagctgcattccttgctgcaaagttcctccactatgacatcacattccatccaaatttctggcatgaattcaagacaagtccatatattgttcaagatgttgtccagcagttgaaggagctactttaggatacaacattcaatgtatttacataatactcagagatcctcttggtttatacgctgtagtgagtagtgatcactgccaaaagtacgtacacattagcatgtggtcactttcatcaattactgaacatctttcatgtaggtttttacaaccacagtgctatgtacaaaaggggaagatgttattcaaaagttgcccttttagttttggggaggtaaaagcaaacaatctttagaagagatgtgacgaacaacaagagataaaaaaggcaaaaaggtgtaagagatgtaaaaagttgatgaaatgttggatcccttaattggttgtccggttgtgattatctgatatatatagaggatggtttatcccaacaataaacgagtcgaaatcgtaaccttcacattatctttagtccaaaattgatttaaaaaccgatctagaaagtattcgatttgaacttgaacagaaaaactgacttgtgggtcccaaaacaaaccatgatgctttcagtagaaggaccgagcagctggcttggccgagcaacaacaggaaaatcggttcggctggtttgagacaagggaattggtttggttggtttgggaatcgacatcgtcggccctgcaggctagacatccatctcctttgctttgtaggcttcaaatgtagtgttccaataatttatttgttattattttgttgtctggaattttgctagtc

SEQ ID NO: 30089 - DNA, 364 bp, Zea Mays
acttggcacatgaaggcttttttaacttggttgcgactgcagccttgttcctggcagcaaaggcagaagaaacagcatgccttttgaatactgttcttagggcttcatgtgaggtttctcaaaatcaggaattcaatcttcttccttacatgctatgtggtcaggactggtttgaacagtacagagagagtgtaatacaagcggagcaaatgatacttacaacacttgattttgaactcgaagtagcccacccatatgcttccctatcctctgctttgggcaaactaggactcacacatactgttctgtttaatgtggcttggaatctgatcaatgaagggagtggcatatgcccctggaggtg

SEQ ID NO: 30090 - DNA, 934 bp, Zea Mays
gcctgagttgctcctaatgcatcatccacagcttgccaccggctacgaagttcactttggcttcagttcaagccccatcatattgctgctggagctgcattccttgctgcaaagttcctccactatgacatcacattccatccaaatttctggcatgaattcaagacaagtccatatattgttcaagatgttgtccagcagttgaaggagctactttaggatacaacattcaatgtatttacataatactcagagatcctcttggtttatacgctgtagtgagtagtgatcactgccaaaagtacgtacacattagcatgtggtcactttcatcaattactgaacatctttcatgtaggtttttacaaccacagtgctatgtacaaaaggggaagatgttattcaaaagttgcccttttagttttggggaggtaaaagcaaacaatctttagaagagatgtgacgaacaacaagagataaaaaaggcaaaaaggtgtaagagatgtaaaaagttgatgaaatgttggatcccttaattggttgtccggttgtgattatctgatatatatagaggatggtttatcccaacaataaacgagtcgaaatcgtaaccttcacattatctttagtccaaaattgatttaaaaaccgatctagaaagtattcgatttgaacttgaacagaaaaactgacttgtgggtcccaaaacaaaccatgatgctttcagtagaaggaccgagcagctggcttggccgagcaacaacaggaaaatcggttcggctggtttgagacaagggaattggtttggttggtttgggaatcgacatcgtcggccctgcaggctagacatccatctcctttgctttgtaggcttcaaatgtagtgttccaataatttatttgttattattttgttgtctggaattttgctagtc

SEQ ID NO: 30091 - DNA, 919 bp, Zea Mays
ctgaaacaaatgacttcacttttcatgctacgaagttcactttggcttcagttcaagccccatcatattgctgctggagctgcattccttgctgcaaagttcctccactatgacatcacattccatccaaatttctggcatgaattcaagacaagtccatatattgttcaagatgttgtccagcagttgaaggagctactttaggatacaacattcaatgtatttacataatactcagagatcctcttggtttatacgctgtagtgagtagtgatcactgccaaaagtacgtacacattagcatgtggtcactttcatcaattactgaacatctttcatgtaggtttttacaaccacagtgctatgtacaaaaggggaagatgttattcaaaagttgcccttttagttttggggaggtaaaagcaaacaatctttagaagagatgtgacgaacaacaagagataaaaaaggcaaaaaggtgtaagagatgtaaaaagttgatgaaatgttggatcccttaattggttgtccggttgtgattatctgatatatatagaggatggtttatcccaacaataaacgagtcgaaatcgtaaccttcacattatctttagtccaaaattgatttaaaaaccgatctagaaagtattcgatttgaacttgaacagaaaaactgacttgtgggtcccaaaacaaaccatgatgctttcagtagaaggaccgagcagctggcttggccgagcaacaacaggaaaatcggttcggctggtttgagacaagggaattggtttggttggtttgggaatcgacatcgtcggccctgcaggctagacatccatctcctttgctttgtaggcttcaaatgtagtgttccaataatttatttgttattattttgttgtctggaattttgctagtc

SEQ ID NO: 30092 - DNA, 2441 bp, Zea Mays
gaggtggcaaatgtaccggggcttgcctggataacactaggttagtgtttgttaggtggcgaccatcttttgtcttcgcacttgtttagattatccatcttcaagttcgtccatcagcatcatcttgtggtcgactcatctttggtcctccgcatcacgtgttccactagcgtacctcatgagatgcataatgcacatgcatgaatcatatagcaaataacacaaactatgatgatgctacacaatagagaattgcacatttagcagcgaggcacattacaacacacataagcaaatattagatatagatatattactaagtacaactaatacgtttttccaacttaactggatctaacacaaacattaaaataataaaccaagctcaagtcctatataaaccttagctaaagcataacattgataatctaataaaattccgactcaccattataggacatccacgacttagaataagaatataagccattcaactagtttttataattattattctagactattatgactaacacgccaactaaacaaaatatctcatttatctataattcaacaagtagaacattatcatatcacatatagttctgcaaaactgctttgtaacaacccaaatatctaaagcgtttatgcgcacttgctattatgaaaatcttaggtttcaattaaaaacgactgatcgatgctactataacgcaagggatcatcatcatcctgtaataaggattctctcaagtaacactaaaagtactaccggctagacaatttcaaaaatgctaatcccacttcttacattattaatttaatcgtgccttgcatacaagtctaacaacacatgacacaactattgcataggaaatattactgcaaacaccttatggcaacatataacacacaaaaaaaataagaaaggtattcttcccaaagcatcgccacaatataactaaccaatccaactaaccgtaaaaacaaatcagcttaccataactgaatcgacttaacagatgagagacgacgatgatctacggttcaaaccttttcttgagcatctggcgagtgatgggcacatatctctcttcttcaccaccttgcccataaacataaccaaaagccaaaagagagcagacccgctcccctgagtcgagtagcacacaaatgacaaacacaacaaagtagatgtcgtcgaaggcatgctcgcgtcaagcagatcaaacgcgagacacaaggcgtgcaaccacaggcatgaggctggaagagcagcgaggtgaagtttgacaatcggtgcattgctgtcgaggtggtgctacgacgatgaagacgacgggatcgaacgatcgacgggatcgaacgatgcttcaactctatactacagatttcatcgagcagcccctaagtggcagcaataaggctacacacaacgtggctggccaaacaatacgacgacaagagcaaggaggtaccacagcacacaaaggacggcaagaagaagtttggcgccaactatgacgtgcgcgcatattcctaggattcgacgagctgggcagagcagagagccgaccccatgtggcaccgacgacaacgctaactcgcaaagctttcccgctgcacacagaacgccggtacggcatcacggcagactccaaaacattaacagtgaagaccatagaacaagcaggctgggcgccagagatcagagacgcgcaggggaggagatccagcgcagggagcagcaaccgaccatggcagaaggagctgcgcagcggccaggtgaaatccgaacaggggctaaggagatgggcgtgcacgcacagagcagtaggagcgaccgagctagagccggcgcacgcagggaagaggacgagggcgcagggagctcgcagcggtgctccacgacggccatcaccggcgtcgagcaggggcacaatttggcgagctgggaagcagggaggagaaaggtctgcgcgccgccgacggacagggacatggcgcaagcagggagcgcgggcctaggcgaaatccgagcaaaaccatggactcggcggggaagctccacggctggaggttgaagaaaggggagaaacgccgtacaggggcagggcgagctcgccagagatggagctcggccggcagagggacgcgcggttggggaagatggagcgcgcatccatgggcgagctggagggagcgcagcttgcgaggaagatcaggggatggaagccggccaccatggcagcaggaagcggtgacggagtggagcagggagtgtgcctgcgtagcttggagacgagcgtgagaagcaaagagagaataatctggtccagagcctgcgcggtgtgagcggatgagaacgacgccaagaaatatccagtgaataagataagcctgaagaaaaatctgcgcaaggaagatatggccgggagaag

SEQ ID NO: 30093 - DNA, 1067 bp, Zea Mays
caacacgttctgtcgttctcgcttgaggcggcccgcggccttctcgaagccctccgctcgctccgtgctcgtggctcccgcacgatccccacattccttggccggctccgcgctcgtgctctcgttgggatcgttgtcagttcaggtacggtggcgatgaggtcgtccgtggcccgcctgattcgctcctcctctgcctcgccctcccgtctcagtggaaatgcattcttcggcaatgccacacccagtgatcagaggcacattgagaagccttttaaagtgaaggaggcagaacctgtgaatgtgacaaaaccttcaccacacaagctgctggttctaggaggaagtggtttcgttggatcacacgtttgcaaagaggctttggacaaaggtttagttgtctctagtcttaatagatcgggaaagccatccttaaatgaaccttgggctgacaaagttatatggaaccaaggcaacctccttgaaccagcttcattgaaggatgctatggataatgtttctgcagtggtatcttgtgtcggaggttttggatcaaattcattcatgtataagattaatgggactgcaaacatcaatgccatcagggctgcagctgagaaaggtgtaaagagatttgtatatgtgtcagctgcagactttggattagtgaattatttattgcaaggctattacgagggcaagagggcttctgaagctgaattgttgtcaaagtttacatatggaggagtgatactgaggcctggttttattcatggaactcgtcgagtgggcagtgtaaagatacctcttggtcttgtcggttctcctatgcagatggtgatacttctctttcctcacttctttgaatccatttaaatactaagtgaagtctaagttattattatgggtggtatgcatattttggttttcagctactggcagtgaggtagctgcaacaatgcacctaaaattggttgtaatagattcttttccatggctttatgtgttctaattcatgtataatctagtggcaaatcaaacttaattgaagtagttttagtgccata

SEQ ID NO: 30094 - DNA, 1458 bp, Zea Mays
caacacgttctgtcgttctcgcttgaggcggcccgcggccttctcgaagccctccgctcgctccgtgctcgtggctcccgcacgatccccacattccttggccggctccgcgctcgtgctctcgttgggatcgttgtcagttcaggtacggtggcgatgaggtcgtccgtggcccgcctgattcgctcctcctctgcctcgccctcccgtctcaggtgagagctcccgcccctcgtatgatgcgcgtctgcagttgtctcggcggacatgttcctggaaggaaagggttaagtttccagcaagatttggcatcgcgatggccgatgggtggcttatagtgacaattaggcattaagggaatttattctacttagtgcaaatcgattggagaggaaactgccatttgataacagttccagccagggcgggtcctgatattttggaaatgcattcttcggcaatgccacacccagtgatcagaggcacattgagaagccttttaaagtgaaggaggcagaacctgtgaatgtgacaaaaccttcaccacacaagctgctggttctaggaggaagtggtttcgttggatcacacgtttgcaaagaggctttggacaaaggtttagttgtctctagtcttaatagatcgggaaagccatccttaaatgaaccttgggctgacaaagttatatggaaccaaggcaacctccttgaaccagcttcattgaaggatgctatggataatgtttctgcagtggtatcttgtgtcggaggttttggatcaaattcattcatgtataagattaatgggactgcaaacatcaatgccatcagggctgcagctgagaaaggtgtaaagagatttgtatatgtgtcagctgcagactttggattagtgaattatttattgcaaggctattacgagggcaagagggcttctgaagctgaattgttgtcaaagtttacatatggaggagtgatactgaggcctggttttattcatggaactcgtcgagtgggcagtgtaaagatacctcttggtcttgtcggttctcctatgcagatggtgctccaaaatataaaacctttgactaggttaccacttatcgggccgctattgactcctcccgtcagtgctgcctccgtggggaaggtcgctgtgagagcagcgacggatccggtgtttcctcctggcatcgttgatgtctacgggatcatgcgttacagcgagcaaaactaagctgcctcattcaccgggcagtatatacatgccgctgtacttttgttacagctgtttctttgtttgttttacatgtactggtatccttctttaactcacttgtttacgagacgataaacattcaataaatatgtattttagcgacatgtctgtggtactgtttttttttaaaatattttatcgtatcttgagcactcaactgcaacgcgttttaaaaaaaat

SEQ ID NO: 30095 - DNA, 1163 bp, Zea Mays
caacacgttctgtcgttctcgcttgaggcggcccgcggccttctcgaagccctccgctcgctccgtgctcgtggctcccgcacgatccccacattccttggccggctccgcgctcgtgctctcgttgggatcgttgtcagttcagtggaaatgcattcttcggcaatgccacacccagtgatcagaggcacattgagaagccttttaaagtgaaggaggcagaacctgtgaatgtgacaaaaccttcaccacacaagctgctggttctaggaggaagtggtttcgttggatcacacgtttgcaaagaggctttggacaaaggtttagttgtctctagtcttaatagatcgggaaagccatccttaaatgaaccttgggctgacaaagttatatggaaccaaggcaacctccttgaaccagcttcattgaaggatgctatggataatgtttctgcagtggtatcttgtgtcggaggttttggatcaaattcattcatgtataagattaatgggactgcaaacatcaatgccatcagggctgcagctgagaaaggtgtaaagagatttgtatatgtgtcagctgcagactttggattagtgaattatttattgcaaggctattacgagggcaagagggcttctgaagctgaattgttgtcaaagtttacatatggaggagtgatactgaggcctggttttattcatggaactcgtcgagtgggcagtgtaaagatacctcttggtcttgtcggttctcctatgcagatggtgctccaaaatataaaacctttgactaggttaccacttatcgggccgctattgactcctcccgtcagtgctgcctccgtggggaaggtcgctgtgagagcagcgacggatccggtgtttcctcctggcatcgttgatgtctacgggatcatgcgttacagcgagcaaaactaagctgcctcattcaccgggcagtatatacatgccgctgtacttttgttacagctgtttctttgtttgttttacatgtactggtatccttctttaactcacttgtttacgagacgataaacattcaataaatatgtattttagcgacatgtctgtggtactgtttttttttaaaatattttatcgtatcttgagcactcaactgcaacgcgttttaaaaaaaat

SEQ ID NO: 30096 - DNA, 1318 bp, Zea Mays
ctaggctgcctgcctgtttccctgtcaagagcttctgctgtttgatctatggatgccctacggtgcttcatctgattatataaattggagtgaacatgcagtgcatagttaaggtctagaggtctcactctcccctgaaaatatcaagtcgagctgtcagtttgggggaaaggaaatatctttatctctctgttgttctccaatttgtgcacacactgagataagtttggggtggacaacaaagggtctcgagctccagttcctgcagcagaaaatatcaactttggatccactagtgcctccttgtaaccctgctgttggtggccctgcaacgtctcaacttgtccatgaggtagatgcccttggtggtaaaattggaaaaattactgataggtgctacttgcaaaagcgtgtactgaacagctcaaaaggccctgctatatgtgcactgcgtgctcagcctgataagagagagtatgcaatagagatgaagaacagtgtggaaagcacagaaaatcttttcattagagaagcaatggctacagaggttttaattggaaaaaatgacaccattgagggtgtttgcactttcttcagcatggactttatgcaccatctgttgtacttagcaccagaacattcatgagtgtttctggggccaagctgctcggctcctggggcgtggacctccccatcaggccgctgcacacgctccacctctactggcgcgtgaagcccggccaggagcagactgtctcgacgagcgccgggttcccgaccttctccagctacggcgacccgcccgtgtacggcgcgccgtcgctggagctcccggggctcatcaagatcagctgcattagatcttagagtacactgttttacacaatttggagttgttactactatcaagctttagactttagactttggagtacactgtttttacactgtattaagctttagccttttatgctacagtgtgtaaaaaagcaagctttagacagttaggctaatctatagacagtgtaaagcttgattttttgacaatacagttcaaattcttagaacaatgcggtctgaaagtttaatacagttctgacaatagagttgagtacactgttttgaggctaatatgtcaagcttagataccagtttgtcaagcttgttttagtccaaatttgtatttacttagctgtgtaaattgtgtacaatttgaagactgttttagttggtgtagaaattgtgtagaatttctagatagttttatgttgctcggtgtgagacgtgtaaattgtggcttctgtattttttatgccca

SEQ ID NO: 30097 - DNA, 1366 bp, Zea Mays
tgacagtgcagtgtgtttggttgcttgaacaaatatctaggccagactacgctcgtgcaaaataaccatctcatccaggcccatcacaaacggccaaaatctccgtttcttcggagccaggctccactcattccctgtcgtcgcagctcagagcacgcgcagccgcctcgcctcgcctggagctcacgcagccgcctcgcctggagctcgcgcagccgcctcgccttgcctggagcttgcgcagccacctcgtctggatctcgtgctagggttggagccagggtcctctcgcagccgcctctatcctcgcctggagctcgcgctagggttcctctcgcagccgccgctgttgagccttgtaaccctgctgttggtggccctgcaacgtctcaacttgtccatgaggtagatgcccttggtggtaaaattggaaaaattactgataggtgctacttgcaaaagcgtgtactgaacagctcaaaaggccctgctatatgtgcactgcgtgctcagcctgataagagagagtatgcaatagagatgaagaacagtgtggaaagaaaatcttttcattagagaagcaatggctacagaggttttaattggaaaaaatgacaccattgagggtgtttgcactttcttcagcatggactttatgcaccatctgttgtacttagcaccagaacattcatgagtgtttctggggccaagctgctcggctcctggggcgtggacctccccatcaggccgctgcacacgctccacctctactggcgcgtgaagcccggccaggagcagactgtctcgacgagcgccgggttcccgaccttctccagctacggcgacccgcccgtgtacggcgcgccgtcgctggagctcccggggctcatcaagatcagctgcattagatcttagagtacactgttttacacaatttggagttgttactactatcaagctttagactttagactttggagtacactgtttttacactgtattaagctttagccttttatgctacagtgtgtaaaaaagcaagctttagacagttaggctaatctatagacagtgtaaagcttgattttttgacaatacagttcaaattcttagaacaatgcggtctgaaagtttaatacagttctgacaatagagttgagtacactgttttgaggctaatatgtcaagcttagataccagtttgtcaagcttgttttagtccaaatttgtatttacttagctgtgtaaattgtgtacaatttgaagactgttttagttggtgtagaaattgtgtagaatttctagatagttttatgttgctcggtgtgagacgtgtaaattgtggcttctgtattttttatgccca

SEQ ID NO: 30098 - DNA, 292 bp, Zea Mays
caaacggccaaaatctccgtttcttcggagccaggctccactcattccctgtcgtcgcagctcagagcacgcgcagccgcctcgcctcgcctggagctcacgcagccgcctcgcctggagctcgcgcagccgcctcgccttgcctggagcttgcgcagccacctcgtctggatctcgtgctagggttggagccagggtcctctcgcagccgcctctatcctcgcctggagctcgcgctagggttcctctcgcagccgccgctgttgaggtaacgaggttggcattgtggtcg

SEQ ID NO: 30099 - DNA, 1179 bp, Zea Mays
aaaatctccgtttcttcggagccaggctccactcattccctgtcgtcgcagctcagagcacgcgcagccgcctcgcctcgcctggagctcacgcagccgcctcgcctggagctcgcgcagccgcctcgccttgcctggagcttgcgcagccacctcgtctggatctcgtgctagggttggagccagggtcctctcgcagccgcctctatcctcgcctggagctcgcgctagggttcctctcgcagccgccgctgttgaggtgctacttgcaaaagcgtgtactgaacagctcaaaaggccctgctatatgtgcactgcgtgctcagcctgataagagagagtatgcaatagagatgaagaacagtgtggaaagaaaatcttttcattagagaagcaatggctacagaggttttaattggaaaaaatgacaccattgagggtgtttgcactttcttcagcatggactttatgcaccatctgttgtacttagcaccagaacattcatgagtgtttctggggccaagctgctcggctcctggggcgtggacctccccatcaggccgctgcacacgctccacctctactggcgcgtgaagcccggccaggagcagactgtctcgacgagcgccgggttcccgaccttctccagctacggcgacccgcccgtgtacggcgcgccgtcgctggagctcccggggctcatcaagatcagctgcattagatcttagagtacactgttttacacaatttggagttgttactactatcaagctttagactttagactttggagtacactgtttttacactgtattaagctttagccttttatgctacagtgtgtaaaaaagcaagctttagacagttaggctaatctatagacagtgtaaagcttgattttttgacaatacagttcaaattcttagaacaatgcggtctgaaagtttaatacagttctgacaatagagttgagtacactgttttgaggctaatatgtcaagcttagataccagtttgtcaagcttgttttagtccaaatttgtatttacttagctgtgtaaattgtgtacaatttgaagactgttttagttggtgtagaaattgtgtagaatttctagatagttttatgttgctcggtgtgagacgtgtaaattgtggcttctgtattttttatgccca

SEQ ID NO: 30100 - DNA, 1042 bp, Zea Mays
caacattgaccggattccgtggcagccttgtaaccctgctgttggtggccctgcaacgtctcaacttgtccatgaggtagatgcccttggtggtaaaattggaaaaattactgataggtgctacttgcaaaagcgtgtactgaacagctcaaaaggccctgctatatgtgcactgcgtgctcagcctgataagagagagtatgcaatagagatgaagaacagtgtggaaagcacagaaaatcttttcattagagaagcaatggctacagaggttttaattggaaaaaatgacaccattgagggtgtttgcactttcttcagcatggactttatgcaccatctgttgtacttagcaccagaacattcatgagtgtttctggggccaagctgctcggctcctggggcgtggacctccccatcaggccgctgcacacgctccacctctactggcgcgtgaagcccggccaggagcagactgtctcgacgagcgccgggttcccgaccttctccagctacggcgacccgcccgtgtacggcgcgccgtcgctggagctcccggggctcatcaagatcagctgcattagatcttagagtacactgttttacacaatttggagttgttactactatcaagctttagactttagactttggagtacactgtttttacactgtattaagctttagccttttatgctacagtgtgtaaaaaagcaagctttagacagttaggctaatctatagacagtgtaaagcttgattttttgacaatacagttcaaattcttagaacaatgcggtctgaaagtttaatacagttctgacaatagagttgagtacactgttttgaggctaatatgtcaagcttagataccagtttgtcaagcttgttttagtccaaatttgtatttacttagctgtgtaaattgtgtacaatttgaagactgttttagttggtgtagaaattgtgtagaatttctagatagttttatgttgctcggtgtgagacgtgtaaattgtggcttctgtattttttatgccca

SEQ ID NO: 30101 - DNA, 738 bp, Zea Mays
gtttccttagacaattagtccaaggtagaagttcttgtgttaattaagaacaataatggacccatgtttcgaatggtggtgctatatggggtaccttgggtgttttgcttggagtggtcgaattcgaggacgaattctttttaaggggggtagagtgtaatatcccaaaaaaatattgaccaaaagttgatcttcggtgcgtggatgagggaaagagttgtgggccgttggatgcaaagtcaggagacatctgaggcgtcgtttctttctcccacaaaaccctagtggtcgccccctccctttttcccttttcttggccgccaacacccccttttccccaccattggccgcccctcccccttccccttacagccgccctccactgcttcctcctccctctagatctccccccacgcagcaaggatcgagatgaggaggagcaagatggattgaaaaggaagagaggatcaaggagatgttctacccccatctcttgcagattttcttggggaaaccctaggtaaggatgggatccttgttcctccctataattatgtgcttttggaggttgtggatcatgtggattgaaggattagaggttggattagatgtggggttaggttttgatctcgaatttaatttctgcagaatggcagattcgacagtttctgttcatgccagttttccgtggtcttagtggcctcaaaaaaataaaaagtctatatatgagtcgtagat

SEQ ID NO: 30102 - DNA, 297 bp, Zea Mays
acaggttctctggaggacatggttgctggagtgacttggccgtccatcttgccacggggttggacagtcgagtgggaccctacctcggctgaggaggagcatgaggagtgatgggacaggcttccccatctctctgtatatttaccgttagttttattccgctgcacttcgaataatgatgactacttttgctaaaactccgatgatgatgtaataagtttaatactcctgaatgtatggttttatgctttattgtatttgctctgtgactcaccgtcgagtgagattgtggtacat

SEQ ID NO: 30103 - DNA, 616 bp, Zea Mays
aagaaaaatagattgaacatcataacgatacaggtgtaactattttctcctatcaaaggtcgaaattttggaagtttaatttgatgctttctaaaagaacaactattttagaaactaaggtcatatctatatagagataaaattatgacaagagtaacaagccatgaaatggtgaaaacatgtgtatgttaatgtattgttagtgaacataccttacccatggtacttcgttgcgttttgccatcaaagtaacagactgtgcgcattccagtccaaacacctcattaaaattgggcaacatatactccacgaccttggtggccaatcctactaaaatgcatccacagaaaagaaatcgttgtcacttgaatcagtgtacaatgacagatagctacaaaccactacaattaaaacccatgcccaattttagtaaacaatctagattcagtctagtcaagcataacagagtttcaaccgatcatttgaaaatgtgaatcaatcaaataactgcacagaatactatgcagaacatggcactcaccttgctggaaactgacatgtgatccacctccttatctttgtcatcctcatataaatcatcgtaggcatagcgagc

SEQ ID NO: 30104 - DNA, 2355 bp, Zea Mays
tccgctgatatctctcgctcatccgctgatctctctccctcacgttttctctggtgctttcctgtagccagttctttatcctcatccactcacaccaccgcgcatggccattggccttatcttcagccacgcgatatttcttttgctcagtgttgtctctgttcttcccccacatcggcatcctacccaggctgagcttggcccctgcgccctcccatctccctcagctcatccatctccatgctcagtctgtgctcttttgtcgtcgtggtcgcctgggtcgtctcatcgccctgcgtcgtcgacctcgctctggcagtcaggctcctgtgttgtaacatggctgtcgtcgcctacctccctgtgccctgctcctacttcgtggtcgtgtcgtgtgccagggctatccgcagcttgcctgcaccaagtccgggcatgtccatcgccgttcctcgtgcagctcgctgccggctactgtcaacctcgcccatggtcgtcaatccgcccatgtccggtgcctgccctccacgccggtcatccttgccatgaacccctccatgctcggcctcaacatcagtcgcaccatcatctgcaatagagcagatgagcccctccaccaatgccctcgcttacaactccatggcctcgcctgatacaaagtcgtcgctttccctggacagcggcgttgccgggcaccatgttgctcatttcggccatgttcctcttcgggctcagcagctaagcgtcctgtctgaccctagcaccttgcaccgtcctcgccgtcaattcctcagtgacgccttggctcctgcagccgcgtccgtgacgtgctcgtcatccccagcgactcgtttcctgctgcacgctacactgagcccggtagccgtattccatcagcttattagataattaagggtgtattttttgtgtatgattgaggaggagagaaatcaccggaatgtgtggagaagaagcgtagtctaatacgacacccgccaagtgctcgacaaaatgtctaaacttggaatcgtcgctgtttctgtagatttcgggtcgagtttaattatggtgagttcattcgttatttccgtcaactaaataaatggtaggattaaatagaaaaatcgattgcgatgattctcttgtctattacttgatgtggagattaaagttgaattttaggtttatgcgataagtatattggtagatatatatgttgtgtgatgttttattagttgggatattataaaggttaattcagaagcctggtttaaataattagttaagttgcttctgttcatagttcgagtttggcatcccaaaataatgagtttaagtaattcgtgtttcagtgttacgctttagtcaaagaggtgaaactcatatggtctattgttttcctaataaatgagctaggtcctttttaatttttaaacagaaaacatgtggtgtatatgctcgttaattgtaaaatagtagctctagtgttccaatgggtttggaatgtttattagtaaattaattgtatgttgattgatgtctagtctagatttcccgattttggtgcatgtctcactgagttaatgaattaatacgttaaagcataataagtagttttagtttcaatcaacattagcaaagtgtagttatatgatcaaaggaacgaagttgatggtctattactactctccactaattgcactgttaatcctgcatattactaaacaaccaacgtctatataattgtaagataagtatctattaagtaggtcatcgtctctagtgtgttttctttgatgtgtactaattgtagaacacgttgaatgattatttcatttagcccaagtctatctatagtctttagaaaccatagcggatgcggatgcacttaaccagtcctgatgttagaagagttaataaaaagttaggaaccaaaaaaatgctttcacacatggatgttaatcataatatcttgtgatgttagtttgatttatatctggttatgttggaggagcatgattgtcgtaagtaacaatatatcgatagttagtgtttgtaatgcctcgccattaagtgttttatttctttttttgcatagcatcgtaatctcttgtgttattcttccttatgttcatacatgtgcattatgcatatcatttaggtacgttaattgatcacgtgatgcgaaggacaaaatttaagttgaccccatgatgttgtaaagcgtgagctactccacaaggtgatgctaatggacgaacctaaagatggacagacgaagcaagtactggaacaaaggctgagcgtcaagtgatcgacgtctaacaaacactaacctagtgtttcttccaggca

SEQ ID NO: 30105 - DNA, 1073 bp, Zea Mays
tccgctgatatctctcgctcatccgctgatctctctccctcacgttttctctggtgctttcctgtagccagttctttatcctcatccactcacaccaccgcgcatggccattggccttatcttcagccacgcgatatttcttttgctcagtgttgtctctgttcttcccccacatcggcatcctacccaggctgagcttggcccctgcgccctcccatctccctcagctcatccatctccatgctcagtctgtgctcttttgtcgtcgtggtcgcctgggtcgtctcatcgccctgcgtcgtcgacctcgctctggcagtcaggctcctgtgttgtaacatggctgtcgtcgcctacctccctgtgccctgctcctacttcgtggtcgtgtcgtgtgccagggctatccgcagcttgcctgcaccaagtccgggcatgtccatcgccgttcctcgtgcagctcgctgccggctactgtcaacctcgcccatggtcgtcaatccgcccatgtccggtgcctgccctccacgccggtcatccttgccatgaacccctccatgctcggcctcaacatcagtcgcaccatcatctgcaatagagcagatgagcccctccaccaatgccctcgcttacaactccatggcctcgcctgatacaaagtcgtcgctttccctggacagcggcgttgccgggcaccatgttgctcatttcggccatgttcctcttcgggctcagcagctaagcgtcctgtctgaccctagcaccttgcaccgtcctcgccgtcaattcctcagtgacgccttggctcctgcagccgcgtccgtgacgtgctcgtcatccccagcgactcgtttcctgctgcacgctacactgagcccggtacgttaattgatcacgtgatgcgaaggacaaaatttaagttgaccccatgatgttgtaaagcgtgagctactccacaaggtgatgctaatggacgaacctaaagatggacagacgaagcaagtactggaacaaaggctgagcgtcaagtgatcgacgtctaacaaacactaacctagtgtttcttccaggca

SEQ ID NO: 30106 - DNA, 1262 bp, Zea Mays
tccgctgatatctctcgctcatccgctgatctctctccctcacgttttctctggtgctttcctgtagccagttctttatcctcatccactcacaccaccgcgcatggccattggccttatcttcagccacgcgatatttcttttgctcagtgttgtctctgttcttcccccacatcggcatcctacccaggctgagcttggcccctgcgccctcccatctccctcagctcatccatctccatgctcagtctgtgctcttttgtcgtcgtggtcgcctgggtcgtctcatcgccctgcgtcgtcgacctcgctctggcagtcaggctcctgtgttgtaacatggctgtcgtcgcctacctccctgtgccctgctcctacttcgtggtcgtgtcgtgtgccagggctatccgcagcttgcctgcaccaagtccgggcatgtccatcgccgttcctcgtgcagctcgctgccggctactgtcaacctcgcccatggtcgtcaatccgcccatgtccggtgcctgccctccacgccggtcatccttgccatgaacccctccatgctcggcctcaacatcagtcgcaccatcatctgcaatagagcagatgagcccctccaccaatgccctcgcttacaactccatggcctcgcctgatacaaagtcgtcgctttccctggacagcggcgttgccgggcaccatgttgctcatttcggccatgttcctcttcgggctcagcagctaagcgtcctgtctgaccctagcaccttgcaccgtcctcgccgtcaattcctcagtgacgccttggctcctgcagccgcgtccgtgacgtgctcgtcatccccagcgactcgtttcctgctgcacgctacactgagcccggtagccgtattccatcagcttattagataattaagggtgtattttttgtgtatgattgaggaggagagaaatcaccggaatgtgtggagaagaagcgtagtctaatacgacacccgccaagtgctcgacaaaatgtctaaacttggaatcgtcgctgtttctgtagatttcgggtcgagtttaattatggtacgttaattgatcacgtgatgcgaaggacaaaatttaagttgaccccatgatgttgtaaagcgtgagctactccacaaggtgatgctaatggacgaacctaaagatggacagacgaagcaagtactggaacaaaggctgagcgtcaagtgatcgacgtctaacaaacactaacctagtgtttcttccaggca

SEQ ID NO: 30107 - DNA, 2981 bp, Zea Mays
cctttccactccccgcctcgcgagaccacacgcgacggctgcctccaccacgccgatggcgaccgctcactcacccagctgaacaactccgccgagcacgcgcaagcagcaggagcgatagagatagaggaaggcgacgaggagctcggtccgagctactagctgcggctgcggcgaccatggagttggaccggctgctgctcgaccagctggctggcgaggccctgcgggagctgctgcacgccgtccagggcaccctgttctgccgctccactgccgagcgcctgcgccggagcgtcgagccgctgttgccgctcgtgcagggcctcggcccgcacgcccagcgctccgcgggggacctcggcgagctcgcggcgcgggtcagggaggcgctcgacctggcccgccgcgccgccacgtccccgcgctggaacgtctaccgctccgcgcagctgtcgcgccggatggaggcggccgaccgcggcatcgcgcgctggctggagcgccacgcccccgcgcacgtcatcggcaacgtgcgcggtctccgcgacgagtcccacgcgcgcatcgcccgcctcgagcgccgcgttgacgagatcgccgccagcgccgcgcagccgccgcccccagccctctccgtccccgtcgcgccgcacaagggcgtgaccatgccgatggaggtgccaactcacaagggcatggctatgccgatgccgatgccggttcctgtgcaggcggtgcccgccaaagccggggtggtggccatggacatggacctcaccgagggacacgaaaacgaggggatggttggcgccggcgttaaggtggccaaggaaaaggtgaaggagatggttatgagcggcggcggcggcggctgggaggtggtcggtatctccggcatgggcggcagcggcaagaccacgctcgccatggagatcttcagggatcataaggtccgagcctacttcaatgataggatcttctttgagacgatctcacaatccgcaaacttggaggccatcaagatgaagctgtgggagcagatcagcggcaacatggtgctcggtgcatacaaccagatcccagaatggcagctcaagttaggaccaagagaccgagggcctgtccttgtgatccttgacgacgtttggtctctcccacagctcgaggagctcaccttcaggttccctgggtgcaagactctagttgtatcgaggttcaagttccccacactggtaaaacagacatacgaaatgcagttgctagacgaggcggcggccttgtccgtcttctgccgtgccgctttcgatcaggagtgtgttccgcggactgctgacaagagattggtcaggcaggtctctgcagagtgcaggggccttccactggctctgaaggttattggtgcgtcattgcgcgaccagcctcctaagatctggctcagcgccaagaaccggctgtctcgaggagaggctatttccgactcccatgagaccaagcttctagagaggatggcggcaagtgtcgagtgcttgtcggagaaggtcagagactgcttccttgatctgggatgcttcccggaggacaagaagatcccccttgatgtcttgatcaacatctggatggaggttcatgatcttgatgaaccagatgctttcgccatcttggttgagctttcgaacaagaaccttcttaccctcgttaacgatgcacagaacaaggctggagatttgtacagcagctaccatgactactcggtgacacagcatgatgtgctgagagatcttgctcttcacatgagtgggcgtgaccctctgaacaagcgtaggcggttggtgatgccgagaagagaagagacacttccaaaggactggcagaggaataaggataccccgtttgaagctcagatagtttccattcatacaggtgaaatgaagggatctgactggttccagatgaacttccccaaggcagaagtgctcatcctcaacttcgcctcaagcctgtactacctcccgccgttcatcgcgtcgatgcagaacctgaaagccctggtgctgatcaactacggcaccagcagcgcggcccttgacaacctatccgccttcaccacgctgaacggcctgaggagtctctggctggagaagatcaggctcccgccgctgccgaagaccaccatcccgctgaagaacctgcacaagatctcgctcgtcctctgcgagctgaacagcagcctgagagggtcgacgatggacctgtccatgacattcccgcgcctctccaacctcacgatcgaccactgcatagacctaaaggagctgccagcaagcatctgcgagatcggctccctggagaccgtctccatctccaactgccacgacctcaccgagctgccatacgagctgggcaagctgcactgcctcagcatcctccgggtgtacgcctgcccggcgctgtggcggctcccggcgtcggtgtgcagcctgaagaggctcaagtacctcgacatatcccagtgcatcaacctgacggacctcccggaggagctcggacacctgacgagcctcgagaagatcgacatgcgggagtgctcgcgcctgaggagcctcccgaggtcgtcgtcctccctcaagtccctcggccacgtcgtgtgcgacgaggagacggcgctgctgtggcgggaggccgagcaggtcatccctgacctccgggtgcaggtggccgaagagtgctacaacctggactggctagcggactgatgtcagattctggatgctaccgcttccaaactgaccatgtacatatatgatgataacgatgatgtttagatgttgcttcccctgtgtagtgcagggaagagaatcatcaatccactggccgattttgacatgttcagtcagtgttcatcacgcatccactccaaggttattaaaacggatgagacatagcataggacgactttgttggagcaacatatgcaacag

SEQ ID NO: 30108 - DNA, 1621 bp, Zea Mays
gtttacgtgcgtgtcgtgcaattagcctacttcaatgataggatcttctttgagacgatctcacaatccgcaaacttggaggccatcaagatgaagctgtgggagcagatcagcggcaacatggtgctcggtgcatacaaccagatcccagaatggcagctcaagttaggaccaagagaccgagggcctgtccttgtgatccttgacgacgtttggtctctcccacagctcgaggagctcaccttcaggttccctgggtgcaagactctagttgtatcgaggttcaagttccccacactggtaaaacagacatacgaaatgcagttgctagacgaggcggcggccttgtccgtcttctgccgtgccgctttcgatcaggagtgtgttccgcggactgctgacaagagattggtcaggcaggtctctgcagagtgcaggggccttccactggctctgaaggttattggtgcgtcattgcgcgaccagcctcctaagatctggctcagcgccaagaaccggctgtctcgaggagaggctatttccgactcccatgagaccaagcttctagagaggatggcggcaagtgtcgagtgcttgtcggagaaggtcagagactgcttccttgatctgggatgcttcccggaggacaagaagatcccccttgatgtcttgatcaacatctggatggaggttcatgatcttgatgaaccagatgctttcgccatcttggttgagctttcgaacaagaaccttcttaccctcgttaacgatgcacagaacaaggctggagatttgtacagcagctaccatgactactcggtgacacagcatgatgtgctgagagatcttgctcttcacatgagtgggcgtgaccctctgaacaagcgtaggcggttggtgatgccgagaagagaagagacacttccaaaggactggcagaggaataaggataccccgtttgaagctcagatagtttccattcatacaggtgaaatgaagggatctgactggttccagatgaacttccccaaggcagaagtgctcatcctcaacttcgcctcaagcctgtactacctcccgccgttcatcgcgtcgatgcagaacctgaaagccctggtgctgatcaactacggcaccagcagcgcggcccttgacaacctatccgccttcaccacgctgaacggcctgaggagtctctggctggagaagatcaggctcccgccgctgccgaagaccaccatcccgctgaagaacctgcacaagatctcgctcgtcctctgcgagctgaacagcagcctgaggagcctcccgaggtcgtcgtcctccctcaagtccctcggccacgtcgtgtgcgacgaggagacggcgctgctgtggcgggaggccgagcaggtcatccctgacctccgggtgcaggtggccgaagagtgctacaacctggactggctagcggactgatgtcagattctggatgctaccgcttccaaactgaccatgtacatatatgatgataacgatgatgtttagatgttgcttcccctgtgtagtgcagggaagagaatcatcaatccactggccgattttgacatgttcagtcagtgttcatcacgcatccactcca

SEQ ID NO: 30109 - DNA, 3521 bp, Zea Mays
cagcttcctccttgtactcgtacgcggcggcggcggcgaggtctctgggaccgggcggcggcgtgcgcccatgcggcgctcctcctcgtactcgtacgcctcctccaggagcacttccgttcccgcgccgcctcttccaggtgcacgcgctgctccttgacccacagtgctctctcccactccggccagcccatctctccctccgcggccagcagctttctcttccagtccggccagcgagcccctgcgcatccacttccaggcgtagcagcggcgtgtagggactccgctcgtggcggccggcggcggcggcattctgccattgccaactactcacataatcccaggcgctggcctctcgcatgcacgagcacaagctatgctcaggcacctaaccaacaacccattgctctcgcgccgatgccaccgcatgttccatcacaaccggctctgtaccaccgccacatcctcggcggccgccggtgagatcgcgccggatcccgccgcatacgagactaccgttggcgttgaatatgacctcgcgcaggagttgcgcagccacctcgtgcgcgacacctgcaggctgctcgagctccgggactcgtggagcgccaagctggaggcgcagctccggcacttcctccgcgcgctgacgccatcgcaggtccgcgccgtgctgcgcgcgcaggcgcagcgggacgcccgcgctgcgttcgagttctttcgctgggccgaccgccagtggaaataccgtcacgccccggaggtgttcgacgaaatgctggcgctcctcagccgcaccaggctccacgacccggcgcgccgcgtcgtgcgcctcatgatccggcgtggtatacgccggggcacgcggcagtttgcacacctcatgctctcgtacagccgcgccgggaagctccgctccgccatgcgcgtgctccagctcatgcagaaagatgggtgcgcgcccgacatatgtatatgcaacgtggctgtgaacgtgcttgttgtggccggacgtgttgacaaggcgctcgagtttgcggaaaggatgaggcgtgttggggtcgatccggacgtggtcacatacaattgcctaatcaagggattatgcggtgctcggcggattgttgaggcattggagatgattggctcaatgctgcaaaatgggtgcccgccagataagattagctactttacagtgatgagcttcttgtgtaaggagaaaagggtggcagaggtgtggaatttgctcgagaggatgaggaatgatgcaggtatatttcctgatcagatcacgtataacatgcttattcatggccttgcaaagcatggtcatgcagatgaggcgttgactttcttgagggagtcagaggggaaaagattccgtgttgatcaggttggctatagtgcgattgtgcattcgttttgcttgaatggtaggatgtcagaggcaaaggaaattataggcgagatgatttcaaaggggtgccgccctgatgttgtaacttatagtgcggttgtagatggattctgccggattggggaactcgatcaagcaagaaagatgatgaagcatatgtataagaatggttgcaagccaaatacagtcacacatactgcactgttaaatgggctttgcaaagttgggaaatcttcagaagcatgggaactgctaaacaagagcgaagaagagtggtggactccaagtggtatcacatacagtgttattatgcatggatttcggagggaagggaagctagtggaatcatgtgatgtggtaatgcagatgttgcagaagggtttcttccccacggctgtggagattaacttgttgattcacgcgctatgcaaggaacaaaaaccagcacgtgccaaagacttcatggagcagtgccaaagcaagggctgctttattaatgttgttaatttcacaactgtaatccatggattttctcggcagggtgatctggaatcagcactatctttactggatgacatgtatctcaccaacaggcatcctgatgttgttacatacactgttgttgttgatgctttaggaaggaaaggtaaaatgaaagaagcaacagcgcttgtagagaaaatgcttaacagaggtttgctccctacacctgtcacatacaggactgtgatacataggtattgtgaaaagggtgcggtggaagatttactcaatctgctggataagatgttaacaaaacaagggtttagtagtgcatataatcaggtcatcgaaaagctatgtgcatttggtaaacttagtgaggcttacaatctgctcagcaaggtactaagaagtgcctcaaaaagagatgctcaaacatgccacattttgatggatagttttctgaacagaggactcccacttcaatcatataatgtggcctgccgcatgttccagagaaatttaattcctgatcttaaattatgtcaaaaggttgacagtcagttggccctagtgggtgagagacatgctgctggaaagcttatcacgaagtttcttgaaagaggtattttagaacaagaaaaacaagatagctgatctgtaccacagtcctgtggtgttacctgtctttatttatagattgcaggtgttgcgatggattgcggtccccccatcccccactagcataatagctagccaagtactgtactacggattgctgatttccctgccccgtcatgataccttgcagcatggagtactggcctgacccacagcgggggatcaaggaagcatacagggtcttgaggctcgttgggctagctagcttacgtgattggcccgatgtacccacccttctggctaccccgcttcttcgccgacatgtgggtgctcttccccaaggaggaagagtacatcgagtcgttcaagaaggctgggtttaaggatgtcaagctgaaaaaggatcggaccgaagtggtaccgtggtgtctgaaggcatggcctcatcatgggttgctctgtcacaggcgtcaagagagagcgtggagactctcccttggagctcggccccaagttggaggatctcagcaagccagtgaatccgatcaccttcctcgcttccttgtaggaacaatatgtgcatcacactatgttctgtgcctatttacatgtggataaaggaccaggtcgtgccaaaaggcatgccaatctgagtgggaaggggaatgagctgcatggaagagaggatagccaacatctgaattagtcttctctatattaggcacttcttgtgtgttttgtattagtacctcttgttttcctactgctatgtactccttgtactgttgttcctgtttatgggaattgataataccaagacacggatattatccagtttcttgagcatgactgcttgcagtggaacctccgtagcagattatcggatttgaattacatggtgtacaactgtacaatttggttagttaaattatatgaatgtataatttagtcggttcctggctctgcaaaattccttctttccctttatcattagtac

SEQ ID NO: 30110 - DNA, 3402 bp, Zea Mays
ctccttgtactcgtacgcggcggcggcggcgaggtctctgggaccgggcggcggcgtgcgcccatgcggcgctcctcctcgtactcgtacgcctcctccaggagcacttccgttcccgcgccgcctcttccaggtgcacgcgctgctccttgacccacagtgctctctcccactccggccagcccatctctccctccgcggccagcagctttctcttccagtccggccagcgagcccctgcgcatccacttccaggcgtagcagcggcgtgtagggactccgctcgtggcggccggcggcggcggcattctgccattgccaactactcacataatcccaggcgctggcctctcgcatgcacgagcacaagctatgctcaggcacctaaccaacaacccattgctctcgcgccgatgccaccgcatgttccatcacaaccggctctgtaccaccgccacatcctcggcggccgccggtgagatcgcgccggatcccgccgcatacgagactaccgttggcgttgaatatgacctcgcgcaggagttgcgcagccacctcgtgcgcgacacctgcaggctgctcgagctccgggactcgtggagcgccaagctggaggcgcagctccggcacttcctccgcgcgctgacgccatcgcaggtccgcgccgtgctgcgcgcgcaggcgcagcgggacgcccgcgctgcgttcgagttctttcgctgggccgaccgccagtggaaataccgtcacgccccggaggtgttcgacgaaatgctggcgctcctcagccgcaccaggctccacgacccggcgcgccgcgtcgtgcgcctcatgatccggcgtggtatacgccggggcacgcggcagtttgcacacctcatgctctcgtacagccgcgccgggaagctccgctccgccatgcgcgtgctccagctcatgcagaaagatgggtgcgcgcccgacatatgtatatgcaacgtggctgtgaacgtgcttgttgtggccggacgtgttgacaaggcgctcgagtttgcggaaaggatgaggcgtgttggggtcgatccggacgtggtcacatacaattgcctaatcaagggattatgcggtgctcggcggattgttgaggcattggagatgattggctcaatgctgcaaaatgggtgcccgccagataagattagctactttacagtgatgagcttcttgtgtaaggagaaaagggtggcagaggtgtggaatttgctcgagaggatgaggaatgatgcaggtatatttcctgatcagatcacgtataacatgcttattcatggccttgcaaagcatggtcatgcagatgaggcgttgactttcttgagggagtcagaggggaaaagattccgtgttgatcaggttggctatagtgcgattgtgcattcgttttgcttgaatggtaggatgtcagaggcaaaggaaattataggcgagatgatttcaaaggggtgccgccctgatgttgtaacttatagtgcggttgtagatggattctgccggattggggaactcgatcaagcaagaaagatgatgaagcatatgtataagaatggttgcaagccaaatacagtcacacatactgcactgttaaatgggctttgcaaagttgggaaatcttcagaagcatgggaactgctaaacaagagcgaagaagagtggtggactccaagtggtatcacatacagtgttattatgcatggatttcggagggaagggaagctagtggaatcatgtgatgtggtaatgcagatgttgcagaagggtttcttccccacggctgtggagattaacttgttgattcacgcgctatgcaaggaacaaaaaccagcacgtgccaaagacttcatggagcagtgccaaagcaagggctgctttattaatgttgttaatttcacaactgtaatccatggattttctcggcagggtgatctggaatcagcactatctttactggatgacatgtatctcaccaacaggcatcctgatgttgttacatacactgttgttgttgatgctttaggaaggaaaggtaaaatgaaagaagcaacagcgcttgtagagaaaatgcttaacagaggtttgctccctacacctgtcacatacaggactgtgatacataggtattgtgaaaagggtgcggtggaagatttactcaatctgctggataagatgttaacaaaacaagggtttagtagtgcatataatcaggtcatcgaaaagctatgtgcatttggtaaacttagtgaggcttacaatctgctcagcaaggtactaagaagtgcctcaaaaagagatgctcaaacatgccacattttgatggatagttttctgaacagaggactcccacttcaatcatataatgtggcctgccgcatgttccagagaaatttaattcctgatcttaaattatgtcaaaaggttgacagtcagttggccctagtgggtgagagacatgctgctggaaagcttatcacgaagtttcttgaaagaggtattttagaacaagaaaaacaagatagctgatctgtaccacagtcctgtggtgttacctgtctttatttatagcatggagtactggcctgacccacagcgggggatcaaggaagcatacagggtcttgaggctcgttgggctagctagcttacgtgattggcccgatgtacccacccttctggctaccccgcttcttcgccgacatgtgggtgctcttccccaaggaggaagagtacatcgagtcgttcaagaaggctgggtttaaggatgtcaagctgaaaaaggatcggaccgaagtggtaccgtggtgtctgaaggcatggcctcatcatgggttgctctgtcacaggcgtcaagagagagcgtggagactctcccttggagctcggccccaagttggaggatctcagcaagccagtgaatccgatcaccttcctcgcttccttgtaggaacaatatgtgcatcacactatgttctgtgcctatttacatgtggataaaggaccaggtcgtgccaaaaggcatgccaatctgagtgggaaggggaatgagctgcatggaagagaggatagccaacatctgaattagtcttctctatattaggcacttcttgtgtgttttgtattagtacctcttgttttcctactgctatgtactccttgtactgttgttcctgtttatgggaattgataataccaagacacggatattatccagtttcttgagcatgactgcttgcagtggaacctccgtagcagattatcggatttgaattacatggtgtacaactgtacaatttggttagttaaattatatgaatgtataatttagtcggttcctggctctgcaaaattccttctttccctttatcattagtac

SEQ ID NO: 30111 - DNA, 3413 bp, Zea Mays
ggcgaggtctctgggaccgggcggcggcgtgcgcccatgcggcgctcctcctcgtactcgtacgcctcctccaggagcacttccgttcccgcgccgcctcttccaggtgcacgcgctgctccttgacccacagtgctctctcccactccggccagcccatctctccctccgcggccagcagctttctcttccagtccggccagcgagcccctgcgcatccacttccaggcgtagcagcggcgtgtagggactccgctcgtggcggccggcggcggcggcattctgccattgccaactactcacataatcccaggcgctggcctctcgcatgcacgagcacaagctatgctcaggcacctaaccaacaacccattgctctcgcgccgatgccaccgcatgttccatcacaaccggctctgtaccaccgccacatcctcggcggccgccggtgagatcgcgccggatcccgccgcatacgagactaccgttggcgttgaatatgacctcgcgcaggagttgcgcagccacctcgtgcgcgacacctgcaggctgctcgagctccgggactcgtggagcgccaagctggaggcgcagctccggcacttcctccgcgcgctgacgccatcgcaggtccgcgccgtgctgcgcgcgcaggcgcagcgggacgcccgcgctgcgttcgagttctttcgctgggccgaccgccagtggaaataccgtcacgccccggaggtgttcgacgaaatgctggcgctcctcagccgcaccaggctccacgacccggcgcgccgcgtcgtgcgcctcatgatccggcgtggtatacgccggggcacgcggcagtttgcacacctcatgctctcgtacagccgcgccgggaagctccgctccgccatgcgcgtgctccagctcatgcagaaagatgggtgcgcgcccgacatatgtatatgcaacgtggctgtgaacgtgcttgttgtggccggacgtgttgacaaggcgctcgagtttgcggaaaggatgaggcgtgttggggtcgatccggacgtggtcacatacaattgcctaatcaagggattatgcggtgctcggcggattgttgaggcattggagatgattggctcaatgctgcaaaatgggtgcccgccagataagattagctactttacagtgatgagcttcttgtgtaaggagaaaagggtggcagaggtgtggaatttgctcgagaggatgaggaatgatgcaggtatatttcctgatcagatcacgtataacatgcttattcatggccttgcaaagcatggtcatgcagatgaggcgttgactttcttgagggagtcagaggggaaaagattccgtgttgatcaggttggctatagtgcgattgtgcattcgttttgcttgaatggtaggatgtcagaggcaaaggaaattataggcgagatgatttcaaaggggtgccgccctgatgttgtaacttatagtgcggttgtagatggattctgccggattggggaactcgatcaagcaagaaagatgatgaagcatatgtataagaatggttgcaagccaaatacagtcacacatactgcactgttaaatgggctttgcaaagttgggaaatcttcagaagcatgggaactgctaaacaagagcgaagaagagtggtggactccaagtggtatcacatacagtgttattatgcatggatttcggagggaagggaagctagtggaatcatgtgatgtggtaatgcagatgttgcagaagggtttcttccccacggctgtggagattaacttgttgattcacgcgctatgcaaggaacaaaaaccagcacgtgccaaagacttcatggagcagtgccaaagcaagggctgctttattaatgttgttaatttcacaactgtaatccatggattttctcggcagggtgatctggaatcagcactatctttactggatgacatgtatctcaccaacaggcatcctgatgttgttacatacactgttgttgttgatgctttaggaaggaaaggtaaaatgaaagaagcaacagcgcttgtagagaaaatgcttaacagaggtttgctccctacacctgtcacatacaggactgtgatacataggtattgtgaaaagggtgcggtggaagatttactcaatctgctggataagatgttaacaaaacaagggtttagtagtgcatataatcaggtcatcgaaaagctatgtgcatttggtaaacttagtgaggcttacaatctgctcagcaaggtactaagaagtgcctcaaaaagagatgctcaaacatgccacattttgatggatagttttctgaacagaggactcccacttcaatcatataatgtggcctgccgcatgttccagagaaatttaattcctgatcttaaattatgtcaaaaggttgacagtcagttggccctagtgggtgagagacatgctgctggaaagcttatcacgaagtttcttgaaagagattgcaggtgttgcgatggattgcggtccccccatcccccactagcataatagctagccaagtactgtactacggattgctgatttccctgccccgtcatgataccttgcagcatggagtactggcctgacccacagcgggggatcaaggaagcatacagggtcttgaggctcgttgggctagctagcttacgtgattggcccgatgtacccacccttctggctaccccgcttcttcgccgacatgtgggtgctcttccccaaggaggaagagtacatcgagtcgttcaagaaggctgggtttaaggatgtcaagctgaaaaaggatcggaccgaagtggtaccgtggtgtctgaaggcatggcctcatcatgggttgctctgtcacaggcgtcaagagagagcgtggagactctcccttggagctcggccccaagttggaggatctcagcaagccagtgaatccgatcaccttcctcgcttccttgtaggaacaatatgtgcatcacactatgttctgtgcctatttacatgtggataaaggaccaggtcgtgccaaaaggcatgccaatctgagtgggaaggggaatgagctgcatggaagagaggatagccaacatctgaattagtcttctctatattaggcacttcttgtgtgttttgtattagtacctcttgttttcctactgctatgtactccttgtactgttgttcctgtttatgggaattgataataccaagacacggatattatccagtttcttgagcatgactgcttgcagtggaacctccgtagcagattatcggatttgaattacatggtgtacaactgtacaatttggttagttaaattatatgaatgtataatttagtcggttcctggctctgcaaaattccttctttccctttatcattagtac

SEQ ID NO: 30112 - DNA, 2798 bp, Zea Mays
ggcgaggtctctgggaccgggcggcggcgtgcgcccatgcggcgctcctcctcgtactcgtacgcctcctccaggagcacttccgttcccgcgccgcctcttccaggtgcacgcgctgctccttgacccacagtgctctctcccactccggccagcccatctctccctccgcggccagcagctttctcttccagtccggccagcgagcccctgcgcatccacttccaggcgtagcagcggcgtgtagggactccgctcgtggcggccggcggcggcggcattctgccattgccaactactcacataatcccaggcgctggcctctcgcatgcacgagcacaagctatgctcaggcacctaaccaacaacccattgctctcgcgccgatgccaccgcatgttccatcacaaccggctctgtaccaccgccacatcctcggcggccgccggtgagatcgcgccggatcccgccgcatacgagactaccgttggcgttgaatatgacctcgcgcaggagttgcgcagccacctcgtgcgcgacacctgcaggctgctcgagctccgggactcgtggagcgccaagctggaggcgcagctccggcacttcctccgcgcgctgacgccatcgcaggtccgcgccgtgctgcgcgcgcaggcgcagcgggacgcccgcgctgcgttcgagttctttcgctgggccgaccgccagtggaaataccgtcacgccccggaggtgttcgacgaaatgctggcgctcctcagccgcaccaggctccacgacccggcgcgccgcgtcgtgcgcctcatgatccggcgtggtatacgccggggcacgcggcagtttgcacacctcatgctctcgtacagccgcgccgggaagctccgctccgccatgcgcgtgctccagctcatgcagaaagatgggtgcgcgcccgacatatgtatatgcaacgtggctgtgaacgtgcttgttgtggccggacgtgttgacaaggcgctcgagtttgcggaaaggatgaggcgtgttggggtcgatccggacgtggtcacatacaattgcctaatcaagggattatgcggtgctcggcggattgttgaggcattggagatgattggctcaatgctgcaaaatgggtgcccgccagataagattagctactttacagtgatgagcttcttgtgtaaggagaaaagggtggcagaggtgtggaatttgctcgagaggatgaggaatgatgcaggttggctatagtgcgattgtgcattcgttttgcttgaatggtaggatgtcagaggcaaaggaaattataggcgagatgatttcaaaggggtgccgccctgatgttgtaacttatagtgcggttgtagatggattctgccggattggggaactcgatcaagcaagaaagatgatgaagcatatgtataagaatggttgcaagccaaatacagtcacacatactgcactgttaaatgggctttgcaaagttgggaaatcttcagaagcatgggaactgctaaacaagagcgaagaagagtggtggactccaagtggtatcacatacagtgttattatgcatggatttcggagggaagggaagctagtggaatcatgtgatgtggtaatgcagatgttgcagaagggtttcttccccacggctgtggagattaacttgttgattcacgcgctatgcaaggaacaaaaaccagcacgtgccaaagacttcatggagcagtgccaaagcaagggctgctttattaatgttgttaatttcacaactgtaatccatggattttctcggcagggtgatctggaatcagcactatctttactggatgacatgtatctcaccaacaggcatcctgatgttgttacatacactgttgttgttgatgctttaggaaggaaaggtaaaatgaaagaagcaacagcgcttgtagagaaaatgcttaacagaggtttgctccctacacctgtcacatacaggactgtgatacataggtattgtgaaaagggtgcggtggaagatttactcaatctgctggataagatgttaacaaaacaagggtttagtagtgcatataatcaggtcatcgaaaagctatgtgcatttggtaaacttagtgaggcttacaatctgctcagcaaggtactaagaagtgcctcaaaaagagatgctcaaacatgccacattttgatggatagttttctgaacagaggactcccacttcaatcatataatgtggcctgccgcatgttccagagaaatttaattcctgatcttaaattatgtcaaaaggttgacagtcagttggccctagtgggtgagagacatgctgctggaaagcttatcacgaagtttcttgaaagaggtattttagaacaagaaaaacaagatagctgatctgtaccacagtcctgtggtgttacctgtctttatttataggaaatttatagcctaatgttaggtcctgattgcatatctattggatttggttctgtgacagagtaatttttttatatagtgatggcaagcacaagtgtgcgtgttcggctgctgctcgagcccctgttgcttccatagctgctcatggaggaaaaggtggctggacgttatggctcactgtttttctttagatgtcctatttggctctggtggacagaccaagaagaaaattattaatccttctagttttctgtttcatccggttcatattttagacagctttatgtttaataaaatcatagcttgaagcgttgatgtatgcaacttcatttgtagaaacactcagatggct

SEQ ID NO: 30113 - DNA, 2474 bp, Zea Mays
cggcgctcctcctcgtactcgtacgcctcctccaggagcacttccgttcccgcgccgcctcttccaggagttgcgcagccacctcgtgcgcgacacctgcaggctgctcgagctccgggactcgtggagcgccaagctggaggcgcagctccggcacttcctccgcgcgctgacgccatcgcaggtccgcgccgtgctgcgcgcgcaggcgcagcgggacgcccgcgctgcgttcgagttctttcgctgggccgaccgccagtggaaataccgtcacgccccggaggtgttcgacgaaatgctggcgctcctcagccgcaccaggctccacgacccggcgcgccgcgtcgtgcgcctcatgatccggcgtggtatacgccggggcacgcggcagtttgcacacctcatgctctcgtacagccgcgccgggaagctccgctccgccatgcgcgtgctccagctcatgcagaaagatgggtgcgcgcccgacatatgtatatgcaacgtggctgtgaacgtgcttgttgtggccggacgtgttgacaaggcgctcgagtttgcggaaaggatgaggcgtgttggggtcgatccggacgtggtcacatacaattgcctaatcaagggattatgcggtgctcggcggattgttgaggcattggagatgattggctcaatgctgcaaaatgggtgcccgccagataagattagctactttacagtgatgagcttcttgtgtaaggagaaaagggtggcagaggtgtggaatttgctcgagaggatgaggaatgatgcaggtatatttcctgatcagatcacgtataacatgcttattcatggccttgcaaagcatggtcatgcagatgaggcgttgactttcttgagggagtcagaggggaaaagattccgtgttgatcaggttggctatagtgcgattgtgcattcgttttgcttgaatggtaggatgtcagaggcaaaggaaattataggcgagatgatttcaaaggggtgccgccctgatgttgtaacttatagtgcggttgtagatggattctgccggattggggaactcgatcaagcaagaaagatgatgaagcatatgtataagaatggttgcaagccaaatacagtcacacatactgcactgttaaatgggctttgcaaagttgggaaatcttcagaagcatgggaactgctaaacaagagcgaagaagagtggtggactccaagtggtatcacatacagtgttattatgcatggatttcggagggaagggaagctagtggaatcatgtgatgtggtaatgcagatgttgcagaagggtttcttccccacggctgtggagattaacttgttgattcacgcgctatgcaaggaacaaaaaccagcacgtgccaaagacttcatggagcagtgccaaagcaagggctgctttattaatgttgttaatttcacaactgtaatccatggattttctcggcagggtgatctggaatcagcactatctttactggatgacatgtatctcaccaacaggcatcctgatgttgttacatacactgttgttgttgatgctttaggaaggaaaggtaaaatgaaagaagcaacagcgcttgtagagaaaatgcttaacagaggtttgctccctacacctgtcacatacaggactgtgatacataggtattgtgaaaagggtgcggtggaagatttactcaatctgctggataagatgttaacaaaacaagggtttagtagtgcatataatcaggtcatcgaaaagctatgtgcatttggtaaacttagtgaggcttacaatctgctcagcaaggtactaagaagtgcctcaaaaagagatgctcaaacatgccacattttgatggatagttttctgaacagaggactcccacttcaatcatataatgtggcctgccgcatgttccagagaaatttaattcctgatcttaaattatgtcaaaaggttgacagtcagttggccctagtgggtgagagacatgctgctggaaagcttatcacgaagtttcttgaaagaggtattttagaacaagaaaaacaagatagctgatctgtaccacagtcctgtggtgttacctgtctttatttataggaaatttatagcctaatgttaggtcctgattgcatatctattggatttggttctgtgacagagtaatttttttatatagtgatggcaagcacaagtgtgcgtgttcggctgctgctcgagcccctgttgcttccatagctgctcatggaggaaaaggtggctggacgttatggctcactgtttttctttagatgtcctatttggctctggtggacagaccaagaagaaaattattaatccttctagttttctgtttcatccggttcatattttagacagctttatgtttaataaaatcatagcttgaagcgttgatgtatgcaacttcatttgtagaaacactcagatggct

SEQ ID NO: 30114 - DNA, 833 bp, Zea Mays
ttccgttcccgcgccgcctcttccagcatggagtactggcctgacccacagcgggggatcaaggaagcatacagggtcttgaggctcgttgggctagctagcttacgtgattggcccgatgtacccacccttctggctaccccgcttcttcgccgacatgtgggtgctcttccccaaggaggaagagtacatcgagtcgttcaagaaggctgggtttaaggatgtcaagctgaaaaaggatcggaccgaagtggtaccgtggtgtctgaaggcatggcctcatcatgggttgctctgtcacaggcgtcaagagagagcgtggagactctcccttggagctcggccccaagttggaggatctcagcaagccagtgaatccgatcaccttcctcgcttccttgtaggaacaatatgtgcatcacactatgttctgtgcctatttacatgtggataaaggaccaggtcgtgccaaaaggcatgccaatctgagtgggaaggggaatgagctgcatggaagagaggatagccaacatctgaattagtcttctctatattaggcacttcttgtgtgttttgtattagtacctcttgttttcctactgctatgtactccttgtactgttgttcctgtttatgggaattgataataccaagacacggatattatccagtttcttgagcatgactgcttgcagtggaacctccgtagcagattatcggatttgaattacatggtgtacaactgtacaatttggttagttaaattatatgaatgtataatttagtcggttcctggctctgcaaaattccttctttccctttatcattagtac

SEQ ID NO: 30115 - DNA, 947 bp, Zea Mays
aatttccgtacaatgaactgactcacagattgcaggtgttgcgatggattgcggtccccccatcccccactagcataatagctagccaagtactgtactacggattgctgatttccctgccccgtcatgataccttgcagcatggagtactggcctgacccacagcgggggatcaaggaagcatacagggtcttgaggctcgttgggctagctagcttacgtgattggcccgatgtacccacccttctggctaccccgcttcttcgccgacatgtgggtgctcttccccaaggaggaagagtacatcgagtcgttcaagaaggctgggtttaaggatgtcaagctgaaaaaggatcggaccgaagtggtaccgtggtgtctgaaggcatggcctcatcatgggttgctctgtcacaggcgtcaagagagagcgtggagactctcccttggagctcggccccaagttggaggatctcagcaagccagtgaatccgatcaccttcctcgcttccttgtaggaacaatatgtgcatcacactatgttctgtgcctatttacatgtggataaaggaccaggtcgtgccaaaaggcatgccaatctgagtgggaaggggaatgagctgcatggaagagaggatagccaacatctgaattagtcttctctatattaggcacttcttgtgtgttttgtattagtacctcttgttttcctactgctatgtactccttgtactgttgttcctgtttatgggaattgataataccaagacacggatattatccagtttcttgagcatgactgcttgcagtggaacctccgtagcagattatcggatttgaattacatggtgtacaactgtacaatttggttagttaaattatatgaatgtataatttagtcggttcctggctctgcaaaattccttctttccctttatcattagtac

SEQ ID NO: 30116 - DNA, 1721 bp, Zea Mays
aaacactacagtctgtgaaacagtggaaccctgaatcaatccagcccaattcggcctgcacggcccgcctcaaactgagccgacactcctcatcttcctcggttcggcacttcggctcgtcctcctcgcggcgaaaccctagcccgccgccatggacgatccctcctccgcctccaacaagcacaagcacaagcgggggcgcaagcccaaggcatcgccgccctcccccgaccactcctccccctctccctcggtcgcccccgctccggctgggcgccgtggccgcaagccgcgacgtcatgaggccctcgccgacgtggacgccacgcgtcctccatctccaccccgccgcggggagccgaagccggtggcaaacggaggcgatgtggtggcagtggcagagtcaggccccgcgagctgggatgaggtggtgagggtagtgccatgcatggacgctgtggtcaaggtgttctgcgtgcacacggagcccaacatctcgctaccgtggcagcggaagcggcagtactgctccagcagcagcggatttatcatcagcggccaccatgtcctcaccaatgctcactccgtggagtaccttgccaccgtcctggccatcggcacagagtgcgacattggtgcgaccgctctccccatccctgccactgtctccattgtttatttcttactcttagttttttttcttcttattgtgatgttgggtttgtccattgtagtcgtgaaaatcggatgcatagtaatttctttattgttttcttagagaaatacaccaagatcattttttatggtatctatgaaacttctgaggctatagcatcatttgagttatggcatggtacttatcatacagttgatttttcatgttgcttatgcaatctaatttgatattattcgtttgttgtatctgtctcaacgctcttaactgtcaatgatgatgaattctgggaaggagtttcacctattgagtttggaacattaccagtccttcaggatgcagttactgttgttggctatccaattggaggagataccatatccgtgacaagtggagtggtctctaggatagaaatgcttttatatgttcatggttctatagaacttctaggattgcagatagatgcagctattaattcaggaaattcaggtggcccagcttttaatgataggggaaaatgtgtcggtatagcttttcagtctcttaaacatgaagatgcggagaacataggttatgtgataccgactccagttattacacatttcattgaggactacaaaaatctagagaatacacaggctgcaattgagtacattcattctttatcaagggcacagcctgctcattctctcaatggtgttggtctttgtcctgctagtagatcacttagcacccatgccgccactatgtcaagcacaccacagttgaaagcacaccacgtcaagcacccaggctgccactacgtcaagcaaaacagaagacgagaagaactgatgtagccatgttcatgcttccactgttgaaatgcatattcagcatagcttgctcagctcctatctgctatttcaacgttgatttaaaagatgagctggtagttgtgggcttttgaacaatagttggagtgatatgaaacattagtgatctagttgtgaatgatattataattgtgatgcttttgtgaatatataattgtggtgcttttgtgttt

SEQ ID NO: 30117 - DNA, 1237 bp, Zea Mays
cagcccaattcggcctgcacggcccgcctcaaactgagccgacactcctcatcttcctcggttcggcacttcggctcgtcctcctcgcggcgaaaccctagcccgccgccatggacgatccctcctccgcctccaacaagcacaagcacaagcgggggcgcaagcccaaggcatcgccgccctcccccgaccactcctccccctctccctcggtcgcccccgctccggctgggcgccgtggccgcaagccgcgacgtcatgaggccctcgccgacgtggacgccacgcgtcctccatctccaccccgccgcggggagccgaagccggtggcaaacggaggcgatgtggtgttctgcgtgcacacggagcccaacatctcgctaccgtggcagcggaagcggcagtactgctccagcagcagcggatttatcatcagcggccaccatgtcctcaccaatgctcactccgtggagtaccttgccaccgtcctggccatcggcacagagtgcgacattgtccttcaggatgcagttactgttgttggctatccaattggaggagataccatatccgtgacaagtggagtggtctctaggatagaaatgcttttatatgttcatggttctatagaacttctaggattgcagatagatgcagctattaattcaggaaattcaggtggcccagcttttaatgataggggaaaatgtgtcggtatagcttttcagtctcttaaacatgaagatgcggagaacataggttatgtgataccgactccagttattacacatttcattgaggactacaaaaatctagagaatacacaggctgcaattgagtacattcattctttatcaagggcacagcctgctcattctctcaatggtgttggtctttgtcctgctagtagatcacttagcacccatgccgccactatgtcaagcacaccacagttgaaagcacaccacgtcaagcacccaggctgccactacgtcaagcaaaacagaagacgagaagaactgatgtagccatgttcatgcttccactgttgaaatgcatattcagcatagcttgctcagctcctatctgctatttcaacgttgatttaaaagatgagctggtagttgtgggcttttgaacaatagttggagtgatatgaaacattagtgatctagttgtgaatgatattataattgtgatgcttttgtgaatatataattgtggtgcttttgtgttt

SEQ ID NO: 30118 - DNA, 1701 bp, Zea Mays
cagaacactgtcaatatcgtgccaccgcaatctgaacagccatgtgcattcagaacactgcacgtcatatttaggattccaggttacagctcgaagccatggaagcctactaccagttcagcaccaccgcatcgttccagcatatcagcagcagtggcagtgcagcacgtaacgaggggtcgttctcgttctcatcatgctgccgtcatgaacggtgcacgaaatctcctcgcaaagtcgcaaggatacaatacagagctgctggctttgcggttgttgattgagcacatcagcatatataaagtagcattcagattaggcccggcatccctttccatgcacccaccacacctccctaccaaagaagcaaccaaaaaccaggacagaaacaccggaaaagaaaacatggagaactgtagtaggaacccgctttatttggcctaaaaatctgtggtaggaacccactggctgcttccaggtacatacagctaacccggaaaagagattaaaacatctgtgcgcttcgaagtagacatagctcacataaggtttggggtgtgcacagaattcagaacaacttgatccgtcgtccaacatagaacatgatataataatccgttgtttaatgcttgctgtagtcagttgatttgttagtactggcattgcacttttgctctttaggattttctgaacaagacaaagctgatcttcaggctttaagcaaagaagaaaagacaggtgtaagcctgcaagacgttagacgtcgaccctacacgtacactaacagatgactagaaaaaggcacccccaccggtgccacgacacacaatgatgtatttcaacaaggcgtgatattgacacatgcaatatatgtaacatatactactacaaaccatcactgcatgtaccgacagattgtctccatgcaaatacacaggatgatcatgcttaactatcgaccctattacgtgccagcttctccctcatctttagccagctctctctctctctcactggaaaaaagaaaagaaacaaggacgcacaaaaagaacatactcacaagaggcagcgcggggcccgtcggcacagacacagacactgccacagccaccgtaccctccgaggcgtggcatcgatcttttgccaaagagcaactgcaggtgcagaagaacaaggctaaacagtctgcaagcatgtgaatgtgaagaagtaaggtaacatcctacaactatctgttttgtttacgaaatatatgcattgaagcaaataaacccagatgcaaccaaatatgaaatgcccaacttaatacaattactaagctattactcttgcaagttaacggttccaaaagttttttgtgtgaatacgtaaggtggtaaggcactaccgcactctacagtcttaatatgagaggttaataacgtttctgtaagtcagttgaaaggatttatttgaatcaaacacaccccctgattatgatcaatttcctatccgtgctctctgttttccattgcaacctaacgaaacttggcacagtagaaactggaacaaatgcaggacgttatttacctcagctcttccggtcgtgcaatgcaaacggagggatgctaagaagcagcctagtcacggagaatgacagagtcggcaatctccatgagcggcgcaaggcatccaggcgcgaatttgcgcgcaaacatgtgg

SEQ ID NO: 30119 - DNA, 1224 bp, Zea Mays
gccaccgcaatctgaacagccatgtgcattcagaacactgcacgtcatatttaggattccaggttacagctcgaagccatggaagcctactaccagttcagcaccaccgcatcgttccagcatatcagcagcagtggcagtgcagcacgattttctgaacaagacaaagctgatcttcaggctttaagcaaagaagaaaagacaggtattgtctccatgcaaatacacaggatgatcatgcttaactatcgaccctattacgtgccagcttctccctcatctttagccagctctctctctctctcactggaaaaaagaaaagaaacaaggacgcacaaaaagaacatactcacaagaggcagcgcggggcccgtcggcacagacacagacactgccacagccaccgtaccctccgaggcgtggcatcgatcttttgccaaagagcaactgcaggtgcagaagaacaaggtaggttcggtgctgaagaattccaaaggggggatggatggggtcagcttacgcttgttcatcacatcacaaccctgcaggggaatacgaaatttccgttatattcttttcatgaacctgatccatgaccccccagcttaagaccaagaaatgggccatacagcggcaaatatggtcttgcaatcttctgcatgctatcagagttaatactacgttatgttcttctacaggctaaacagtctgcaagcatgtgaatgtgaagaagtaaggtaacatcctacaactatctgttttgtttacgaaatatatgcattgaagcaaataaacccagatgcaaccaaatatgaaatgcccaacttaatacaattactaagctattactcttgcaagttaacggttccaaaagttttttgtgtgaatacgtaaggtggtaaggcactaccgcactctacagtcttaatatgagaggttaataacgtttctgtaagtcagttgaaaggatttatttgaatcaaacacaccccctgattatgatcaatttcctatccgtgctctctgttttccattgcaacctaacgaaacttggcacagtagaaactggaacaaatgcaggacgttatttacctcagctcttccggtcgtgcaatgcaaacggagggatgctaagaagcagcctagtcacggagaatgacagagtcggcaatctccatgagcggcgcaaggcatccaggcgcgaatttgcgcgcaaacatgtgg

SEQ ID NO: 30120 - DNA, 2703 bp, Zea Mays
atctttctctattacattgccgatcacttgcctgacaggggtagcagcctcttcgcggtggctggggatggcgggcggcaggcggagggcggcggcgagggctagctccggtggtcgccggccacgcgaatcatctctttctctgtgaatgtggcgtccgcttcgaactacatcgtccgttggccatctgcacctccttcccggtgaaccctacaagcccctaacctcccagggattgctccgcctgaaattggtaggctgaaagatcttgaggtgctgaacttgcagtctaaccagcttgaggataagtgggacagggactggcctctgatacaatcactagggaattgcagtagactgtttgcactcagcctttcctataacaggtttcaaggcatgcttcccccttctcttgtcaaccttaccatttggatacaacaaatcttgataaatggaaacaagataagtggttcgatacccacagagataggtaaactcagcaaccttcgtgttcttgcaatcgctgataatgccttgactggcaccattccagacaccattggtggtcttcacaacatgactgggctagatgtctctggcaacaacttatctggtgagatcccatctctgcttgttgcaaaccttacccagctttctttcctggatctctcacagaacgagttggaaggaagcatacctgagagctttgagaatatgagaaatattgcaatcctggacttgtcttacaataagttcagtggcatgataccaaagcagcttgtcagtctctcttctttaaccctgttcctcaacctgtctcacaacaccttctcaggtccaataccttcacaagtaggtcgactgagcagccttggggttttagacttgtcgaacaacaggctctcaggagaggtaccgcgggcactcttccagtgccaagcaatggagtacttatttctgcagggaaaccagcttgttggtaggattccccaatcactcagctcaatgaaagggcttcaatacttggacatgtcagagaataatctgtctggttcaattccagattacttatcgacgttgcagtacttgcattatctgaacctatcctacaaccagtttgatggaccagtgccgacaagcggagtgttcaacgattcaaggaacttctttgttgcagggaacaaagtttgtggtggtgtttcagagctgcagctgccaaaatgttctggtggtaatatgttacacaaatcaagaactgtattgatcgtgtctattgccataggatctatcttggccctaatccttgccacatgcacttttgtgatgtatgctcgaaagcgactgaatcagaagcttgtgcagagtaatgagacacctcctgttccaaagttgatggaccagcaattgaaactgtcgtatgctgaactgagtaggtctactgatggcttctctacagctaacctcattggcgttggaagctttggctcagtatacaggggaacactaagcgatgaagagcaggaagtcgcagtaaaagtactgaacctcctgcagcacggcgctgagcggagtttcctggctgaatgcaaggtgctgaaaagtattcgacaccgcaatcttgtaaaggtcatcacggcctgctcgaccatcgaccacagcgggcgtgattttaaagccttggtgtacgagttcatgcctaacagagatcttgacagatggctccatccgtccaccggggaaggcggtgagaggtcctcccgcacgctgaccatggctgagagagtgagcattgcactcgacgtcgctgaggctcttgactaccttcacaaccatggccaagtgccaattatacactgtgatctgaagccgagcaatgtccttcttgaccacgacatggttgcccgtgtaggggactttgggctgtcacggtttgtccagggagctaacagcaactcgttccaacccatagccaacactactggaatcaaaggcaccattggatacattcctccagagtatggaatgggtggcggagtttcagtggaaggtgatgtctacagctatgggactctcctgctcgagatgttcacggcaaagcggccaacagatcccttgtttcagggaggccaaagcatccgcagctatgtcgcagcggcttatcccgagagagtaacagcagtcgctgacctatctctgttgcagcacgaagagagaaacctggatgaagagagcctagaagagtccctcgtgtcagttttccgggtcgcgctgcgatgcaccgaggagtcaccgagagcaaggatgctcactagagatgccatcagagagcttgctggtgtaagggatgcttatgggtagctacttggtacgtaggggtgacaacgggctctatattttacactataaaattgaaggatttacactataaaattaaaggatcggatcgggttacgatcgggtcatatttatattcatttttgaactaaaataatttaaggcttagcaatttatgaagaaacatttgaatcacgatccattaccaccacccctacttgaacgttagcaagttacagtccatagagtaatatgtaaatagcactggaaacgattttattttttgtaagtgaagtagaatgtaggaattgtgtgtattgatagagaagagtgctgttacatacataggggaagagccataggtaaaag

SEQ ID NO: 30121 - DNA, 1757 bp, Zea Mays
atctttctctattacattgccgatcacttgcctgacaggggtagcagcctcttcgcggtggctggggatggcgggcggcaggcggagggcggcggcgagggctagctccggtggtcgccggccacgcgaatcatctctttctctgtgaatgtggcgtccgcttcgaactacatcgtccgttggccatctgcacctccttcccggtgaaccctacaagcccctaacctcccaggaacaaagtttgtggtggtgtttcagagctgcagctgccaaaatgttctggtggtaatatgttacacaaatcaagaactgtattgatcgtgtctattgccataggatctatcttggccctaatccttgccacatgcacttttgtgatgtatgctcgaaagcgactgaatcagaagcttgtgcagagtaatgagacacctcctgttccaaagttgatggaccagcaattgaaactgtcgtatgctgaactgagtaggtctactgatggcttctctacagctaacctcattggcgttggaagctttggctcagtatacaggggaacactaagcgatgaagagcaggaagtcgcagtaaaagtactgaacctcctgcagcacggcgctgagcggagtttcctggctgaatgcaaggtgctgaaaagtattcgacaccgcaatcttgtaaaggtcatcacggcctgctcgaccatcgaccacagcgggcgtgattttaaagccttggtgtacgagttcatgcctaacagagatcttgacagatggctccatccgtccaccggggaaggcggtgagaggtcctcccgcacgctgaccatggctgagagagtgagcattgcactcgacgtcgctgaggctcttgactaccttcacaaccatggccaagtgccaattatacactgtgatctgaagccgagcaatgtccttcttgaccacgacatggttgcccgtgtaggggactttgggctgtcacggtttgtccagggagctaacagcaactcgttccaacccatagccaacactactggaatcaaaggcaccattggatacattcctccagagtatggaatgggtggcggagtttcagtggaaggtgatgtctacagctatgggactctcctgctcgagatgttcacggcaaagcggccaacagatcccttgtttcagggaggccaaagcatccgcagctatgtcgcagcggcttatcccgagagagtaacagcagtcgctgacctatctctgttgcagcacgaagagagaaacctggatgaagagagcctagaagagtccctcgtgtcagttttccgggtcgcgctgcgatgcaccgaggagtcaccgagagcaaggatgctcactagagatgccatcagagagcttgctggtgtaagggatgcttatgggtagctacttggtacgtaggggtgacaacgggctctatattttacactataaaattgaaggatttacactataaaattaaaggatcggatcgggttacgatcgggtcatatttatattcatttttgaactaaaataatttaaggcttagcaatttatgaagaaacatttgaatcacgatccattaccaccacccctacttgaacgttagcaagttacagtccatagagtaatatgtaaatagcactggaaacgattttattttttgtaagtgaagtagaatgtaggaattgtgtgtattgatagagaagagtgctgttacatacataggggaagagccataggtaaaag

SEQ ID NO: 30122 - DNA, 920 bp, Zea Mays
atctttctctattacattgccgatcacttgcctgacaggggtagcagcctcttcgcggtggctggggatggcgggcggcaggcggagggcggcggcgagggctagctccggtggtcgccggccacgcgaatcatctctttctctgtgaatgtggcgtccgcttcgaactacatcgtccgttggccatctgcacctccttcccggtgaaccctacaagcccctaacctcccaagtatggaatgggtggcggagtttcagtggaaggtgatgtctacagctatgggactctcctgctcgagatgttcacggcaaagcggccaacagatcccttgtttcagggaggccaaagcatccgcagctatgtcgcagcggcttatcccgagagagtaacagcagtcgctgacctatctctgttgcagcacgaagagagaaacctggatgaagagagcctagaagagtccctcgtgtcagttttccgggtcgcgctgcgatgcaccgaggagtcaccgagagcaaggatgctcactagagatgccatcagagagcttgctggtgtaagggatgcttatgggtagctacttggtacgtaggggtgacaacgggctctatattttacactataaaattgaaggatttacactataaaattaaaggatcggatcgggttacgatcgggtcatatttatattcatttttgaactaaaataatttaaggcttagcaatttatgaagaaacatttgaatcacgatccattaccaccacccctacttgaacgttagcaagttacagtccatagagtaatatgtaaatagcactggaaacgattttattttttgtaagtgaagtagaatgtaggaattgtgtgtattgatagagaagagtgctgttacatacataggggaagagccataggtaaaag

SEQ ID NO: 30123 - DNA, 270 bp, Zea Mays
gttttaacagctgacacgaatccacgagattggtagcgatttcccgacccatgcaatttgtcgagcgcttggggaatatcgcgctgctaacttcgtcttcacccgaattaagtcgtgacgaggtcgacgacgagatagggattttaaagccgagcgagccgagagggcacgctgaaacaggacgcgagtacaagacagggaaaacgacgggctcgacaacacgcgaagcgacgatagtcgaatcggcaacaaagcgttgacgaattcgat

SEQ ID NO: 30124 - DNA, 986 bp, Zea Mays
tgggcgtcgaacagaaaggaatacctagggaaatcgccatgggaaacaggggcatcgacgacaggacgccaggaatcgcgagctacaggaggagaaactcggcacagcggctatggccgagcagagggccattccgtcgagctggaagccgcggcgccgagcagagcgagaggagcagatggccgtgctaaagcaccacggcaagacagggagagaagcaagggggcagctgggctcggcaagcaggctgagacgctgcgcaggggaggaagacgccagaagtttgggcgtggtggccatggcgagcagggatggcgcgcacagctgaggaggaaaattggagcacgcgacactggaggatagcgccacgggagcagccaaagggcgagcaggggcgcgcgcgtgccgtggttctagtcgcggcggaaaaaaatggagcgcgcaggcagccggacttgcgcaggggcgcgagatccatgagctgggaagaaaaaggaccagctggggagagctcagcgcagtggagcagggaggaaggagaggggtgcacgcccgggctgagagctgggcgacctgcgcagggaagaacgccatggaggggcgcggctgggggcgggtccaagcttgacgacggcagccatggggagcagggccgagatccgagcaggacgcggcagagagctggggctggaaatccgagccacggcagaggactagcgcattggagagctgagggagagggagaaggggagctcgcggcagccatcatcggcagagcaagctccgacgagggagaaagacaggcgcggcagggaataagccggacgcgacgagcttggggaatctcgagcgcgccatggagggaccgagctgggaatcgcgcgcaaacttggaggagaccgcggtccgagcgccgcgacgaacgtatttaaagagaacaaagggcggctgggcggtccggcggtgagcggcggccgtagatgagg

SEQ ID NO: 30125 - DNA, 1112 bp, Zea Mays
taaaaacaaaaggaaaggggttgcatgcaccggggcttgcctgagtaacactaggttagtgttgttagacgacgttcgcttgacgatcagcctttattccgatactcgctccattgtccatcagcttcatcctgcggattagcccgcgcttggggtcgacttggcttgtcttccgcatcgcgcgattaataagcgtacctaaatgatttgcataatgcacatgaatgcataagaacgggaatattataaacctaaatagtgctacacgatagcgaatttaaacacttagcggcgaggcgttgtacaagtttatacgataataccggttatcgacctacgactaagcgcaataattacgcttctcgaacctatcacaaacatcacaaacaacaaactatacacattaaatataattagcctacacaactcaccagctaattaattaaatactaatcttatcacttgctttataaattatactgcatcgctcataaagaactattttaattttatttcactcctcacatattttacatgtcaacagttaatcaaacatttctttatgttatttatttagtgcaattgacaatgacaaaattcatcagatagctatatgaaatactaaatctatcctttacgtcgccacctcgcctaggtatccctaaattaatctacctttcgcatcactaaacccatcgtacttcacttatttttaacactaccacaacgtgcctgcgctaaacacgaggattattacgactaataatcctagttaatccaatcatcagataaacttacaaaaaatacaaatcggctcaccagcatcaaacgcgacccaatactcgtacgaatgcggataaatcctggctcgagctttttgtcgcgcacttggtgaatattacgctgctggcttcgtcttcacccgattctggggtttcttggtgacttgcggaacgacgacgagatagaaattttaaagccgagcgagccgagagggcacgctggcgagttagaaaaagatttggcgcgtgagcccgacgcgcacggatttttgttttattactccacgcacgacgcgtggacagacagcaagcaaggccggccacagcgag

SEQ ID NO: 30126 - DNA, 336 bp, Zea Mays
cgcatgttaccaaaaaagacgaggtcatgattcacataaagataatgtagcaaaggattacaattccagcgaactcgcttcacaggtaaagatgtgcaggagcaatcatcctttctttctttacaagatgatgaaagctgagaccaaaagacagtcaagctatactagtcagttcatcttaattagacagcaaaaggagcagaccagggccgaagccagccaaatcttcgatctggtctcgacctcacaattcgctcgctaaaagaagcgccgccctctatatgttaaactaagcaaccgttgccctaggctaggccgcagcagcagccaggaccg

SEQ ID NO: 30127 - DNA, 391 bp, Zea Mays
cggcggcggccgaggccaccgcatcatccgcgccaccatcaccgcaccggaggtcaaacaggccccctgctcctccgtactccggcaaaaaaaaaagtcaaaggctcccggcgaccacaccaccaccaacctccgagcggaaatccaaactccaacccaattgcccccgagaatcccagctcggctgcaagagcaccacgggagactcgatccccgcgcccgaaccggcccagcgacacacgaattgagaggagaggacggcgcaggattggattttggcggcgggatcgggattaggggcccggatttatgtcggggcggggcggggcgggatttgaggaagcagttggagattgggacgggaatatacgaggagaaaaatgcacgcgcg

SEQ ID NO: 30128 - DNA, 1834 bp, Zea Mays
atgtgcagacagaccattatatacatgacagaattacatcctcaatctaccaatgttgtcataagagtgcgtgtgatcagaaaatgggaattccgaggtgctacaaatgacggccctctgcaacacattaatttggttctagctgatgaacagggtacgtccatccacgctgagattgcagcggctctggcagttgacaaaggctcactgatagaaattgaaaaagtatatgagctcaaacgctttcgggtcacgccttccagaaactatttcaaacctgttgacaataacttcatgatacaattcactctgtacactcaagccaaagtagtcaaagatccaccacaaatgtttccaagatatatctacaagctcacatcctttgaaaacatcgaagataacattgacaatagaacttacttgattgatgtccttggaatgttgacacaaattgatcctccacatctaattggctacaacaactcaaccatcatcagagacatctacatcaagaatgcaagtgacatgtctctaaaaattactctttggggaaatcaagcatcaaacttttctatcagtgatgtttacaatcaaagcagcaaccaacctattgtcatactgcttgttggatttcttgctaaacgattcaaaggtcaaccatacctaagtggtactacagcaagttcatggtacttcaatcctggaattcctgaggcgcagacctactacaacaggttgcaaaacaatgacctccaactaatacaacccacagcagccaaagaagaaatccaggtttctcaaccaccaaatttggaacacaagactgttgaagagctgctcgacatagatccagacatgtttcccccagaaggctacagatgcactgttactatctcacgcattgtgcaaaacagcaaatggtggtacccatcttgctccaggtgccacaaatcttcatctcaaacttcaactggatatcactgcacatcatgtggctgcacagatattaactttagatacaagctcagcttcattgctactgatgggacatgtgaagcagagttcttttgttttgatagcatagccagaaaaatagtaggaaaaccttgtgacaaccttgttacagcagttacaacttctcagggtcccccagcagccctagccgctattgtgtgtctgaaatttacccttgcagttgccatcaatatgtcagcctactcagtcacaaatagagtcttctctattctgtctattttaacaaatcatggaagacaatccttcataccatctaacatgcctagccatcctcaacaagagttgcatacacaagatgaaatacctagccttccgaccacacaagactctccagcaacatcaatggcaaaactatctacctgtagcaacgaaaaaaacgaggcacgacgcgttctaatatattcagatatgccgcatgacacagagcacataagtgaagtcaacaaccaagagttatcgtcaccaccgaaaaggataaaacatagccacactaacaaaggcgcaccagatcttacagacccaaaaaagaaaagctcctagatcatcatcaagttcatggaggtatttgcttttgcgcacctatcaagagcaaccatcacttttggaccatgaatgcttccctgtacatatgaacctactggtagactatttatggatctgtacatattgacttaacacctgcaagcacactattgctaagtgttgatgtatggtggttgaatactacttagtatgtattgtactctaaatgcactctacaactggtatcaactattaaggatgaacaacgttatctatt

SEQ ID NO: 30129 - DNA, 2321 bp, Zea Mays
gacgagtcctgcagccccacaacacaagctgagagaggccaccgctctggtagacgagatcaggacgccggagaagcctgcaaaggagccagcaccggccgcgaagcagatcacggcgccggataagccagaggagatgctgagagctcagcatatgctgaccactctggtggacgaggtccggccactggagaagccagaggagacgccgaagaacacctccgcaggatgttcaactccatcctaccccgccaagaatgttgatgccgagcgctccgcctgttccgctcccgcgccgccaacgagcaccgccgagctcctccctggcgccacgtcccgacagacatcggcgccgagcggctggctccaccgtgccgaggtgctcccccatgcccctaccccctaggccaagcggttgagctccgcctcgctcctagcgttcgtatctagaccgtgtggactcttctgtcctaatctactaacgatatttttacaaaacattctttgcttctctacgcattcgggcctgtcatctacagatagtagcatcttcctatagtaatatttaatcataaaaaataattaatgaactcttcagcattgtggtttaggtcaatatatcaaacaagataaatcctatataatagcatcacgttccatcaccatattaaactaacaattttatttttttatcatcatgtgacattacccagttgaccaaataggtctgtcggaaagaggagcatttgctgcttcttggcttgcaaaaggcatcctgacctacatccacccagcataaaaacgtgtattggtcatatcatcgagcaaataggtgatacgatgctttatgtcttattcttacatgcatctgagtcttatggtttcttcagttttcttctttctttatttcttaatgtttttttgtgaagttacgtccaaaaattgacagaaggaatagctcatacacacttgataatacactttcttctttttatcagcatacttttcagtccattctaagttctaacgttgtcactttccaaattctgttgtcacttataaaacttgcacgttgatatttgatttagtatcagtacaatttatatggaggcatatatttagatgaaacttgatatttgattttgtatcggtacaatttatatggaggcatatgtttagatgaaacttgctgaagcattgttcaatattcatcacaacttcaggaataataacaacgacaccatgtggaccattacttcgattttggcaaatctggtttcaaaacattcgagctaaacaacactaaggacaatagttcatacaacctcatgaaagaataatgccaacatagaggtgcacaacatatgtcatactttcaatttttcattgtcctaaaaacacagcaatatgtgccatctaatactcatgatacgaaggtcagtggaagacaatgaatttgtagcaagcttctaagaaatagtacacagaggcgatgaatacatttagttctatgtctcaagcactacatgtcaacctttttactaatacattttttatagcaggcaaatctagcttgcttttgtatgatagatcactaggtcagtaaagacaaattaagcattatatgccagaacatctacctgtatagaaataccttcctttatgcaaaggaacactaaaatcataccacatataattacttataaaaatcacttataaatgtttttaaccacgacgccgcacgcgcgcagggcgcgcgtcagctactagtacgaatacgatggggaatggaaatcggcaaatgcatgcatggtagatagcgatggggagggaaatcccacagggaatcggcagcggtgcccgtgcggctgggctggtttcttggatgcccgctgtgctttcgaagaaccacaatgggcctggataagtccaagcgaagcccacgaaagaagaacctctcagctcatgagacagctacagcctggttgtatacatccttatccttgctaatactagcatatataggtccggtttggcacaatgctgcttgttggaaaaatagcttgtatgagaagttggtaaaaatcagcttatgcttattagctgtttttagtttattctgagaagcagctaaactgataaactgctgcataagctacctgtttaacacagtttatatctaaatctgtgaagaagctgaaaataagtttgacaaataggaccatagtccatactaacgctacgattccaaggaaacaaggaaagaggtcgacattggaggcggcgtgaggaaaagggttcacggcagcggcgcaggtgag

SEQ ID NO: 30130 - DNA, 3039 bp, Zea Mays
cccccaagcccgctcgctcccctcccacacgcatcccttcccctcccctcctttcccctttccgtttccagttccgtcccgacgacgatcccagcccctcgccccgccgccgcgcccgctgcggagctcgggccgcaatgcccgcgcccccggacccgccgccgctcccgccgctggacccgtcggatcccgccgcggccacaccgcccgccgccgcggccgccgatgaggaggaggacgaccgcgtcttccttgtgccactcaggtggtggaaggaggcgcagcaagggctggcgatcaacgtgcctggtctgccctacgcggccgcgcctgctggacctacctcctacggcatgagggtgctcagcatgttcctctccgaccaaacatacaccctccgccgcgccgacgagctcttgcagcagaccgcctccttcgccgccaggagctacgcgctcctcccggccgacctgttctcaaaggcacgggaatggtatattgtgcctgccaagtctgcagtcaaaaacgtgtcaccagctggagagggctcagtaaatatttaccccataatgctaagagtttcagccagcagagatacatatacactaaccgtgaagatcggcaaaaaggacaactcaactgagaactttaagagagcatgcaagatcctgactgcagactctgagccggttcacatatgggatttctctgggcgaacaacatacatagttatgactgaactgaaccggtcgccccatgactcaaaatctgcagatcaggagatgcctctacaaatacacatttatgatctgtcggaacctatggttaatggttctgatgggaaaagggatgagttagcattaacattgggtggctcaagttctagcaatggtggtagtatgaacatggatctggattcatcaagtggaagctctaagcaagttggatccggtttaacaggattagacaatttgggaaacacatgtttcatgaacagtgcagtccagtgcttggctcatacttcaaagctggttgactatttccttggtgatttccacaaagaagtaaacccacataacccactggggatgaaggacccctgttgcacctcgccaattcaaggccagacttggacggtttgctccccaattcagtggctttaaccaacatgattcacaggagcttcttgctttcctattggatggactccatgaagacttgaaccgtgttaaatgtaaaccatattctgaagctaaggattcagatggccgtccggatgaagaggttgcagatgagtattggggcaaccatttagctcgaaatgactctatcatagttgatatctgccagggtcagtacaagtcaacattagtttgccccatctgcaagaaagtttctgtaacatttgacccgtttatgtatttgtctttgcccctgccttcaacaacaatgagaacaatgaccataacagtcttcagtactgatgggaccagtgggccatctccttacactattagtgtaccaaaatcgggagatacgaggacccttattaatgcgttaagcagtgcttgttcgttgagagatgatgagcgccttctagttgctgaggtctacaacaattcccttattcggtacttggatgaaccttctgaagttatctccttaatcagagatggagatcgtttggttgcatatcggcttcctaaagacaatgaagatgccccaattgtggtgttcagaaaccagcgtatggagttatgactccattcagagtatcaagaggtgatgctgctgttgctgatcaaacacttggtgaaagcagtctggttgatgaaactgaagatatcaatatgagctctgatgcctcagagcacaccagcataaacaacaattctgtcgaggatgaaacagggactgaagatgtgatgcaatttttcctgactaatgagagaatcccagaccaacgcatgaagatagaaatggatctatccattacggtgaatgatccgcataagcgtctgcatgtggctgtgtgttgggaggacagtggactggaccaatacaactttagttctttgaattctcttccagaagtttacaaagcggtgctgttttctaggaggccacaggacacatgttctctatatgcatgtctggaagcttttattaaggaagaaccattaggcccagaagacatgtggtactgcccaggttgtaaagagcatcggcaagctagtaagaagttagacctctggagattacctgaaatccttattatacacctgaaaagattttcatacagtcggtataccaaaaacaagctggagacatttgtggacttcccgattcatgatcttgacctgtcgaagtatattggtcacagatgccaagacgttcctcacaattatcgactgtatgctactagcaaccactatggaagcttgggaggtggtcactatacggcttatgtttatcatgaagggaaaaagggttggtatgatttcgatgaccgtcatgtgggccccataaccgaggacagtataaagacatcggcagcttatgttcttttttaccggcggatacaggaggatagcttagatacagttacagacatagattctgatattccaacctgaggaggcggtggaggcaatttttgagcccaagtcccggacagtgtatagtttcattggtttagggggacagttgtgcggcaatgccgcaacggaagtgagaaatagaacaggtggggaagagtttgtgcggcaatgtggttcagaggggggagataatttgtcgcggttccttccgttgcaaattcctttgttttttttccgttcccttttagcacctgtaactgatagcggtaaaattttggctaatggcatgtggggaagatatttcgtcccagattctcaacacagttagggttagttttggaaccctatttttaaggaatttctatttttctaagagaaactagtttattttttcttggaaaaataggaaacctttcagaaaatggagttctcaaacaag

SEQ ID NO: 30131 - DNA, 2847 bp, Zea Mays
ccgcaatgcccgcgcccccggacccgccgccgctcccgccgctggacccgtcggatcccgccgcggccacaccgcccgccgccgcggccgccgatgaggaggaggacgaccgcgtcttccttgtgccactcaggtatattgtgcctgccaagtctgcagtcaaaaacgtgtcaccagctggagagggctcagtaaatatttaccccataatgctaagagtttcagccagcagagatacatatacactaaccgtgaagatcggcaaaaaggacaactcaactgagaactttaagagagcatgcaagatcctgactgcagactctgagccggttcacatatgggatttctctgggcgaacaacatacatagttatgactgaactgaaccggtcgccccatgactcaaaatctgcagatcaggagatgcctctacaaatacacatttatgatctgtcggaacctatggttaatggttctgatgggaaaagggatgagttagcattaacattgggtggctcaagttctagcaatggtggtagtatgaacatggatctggattcatcaagtggaagctctaagcaagttggatccggtttaacaggattagacaatttgggaaacacatgtttcatgaacagtgcagtccagtgcttggctcatacttcaaagctggttgactatttccttggtgatttccacaaagaagtaaacccacataacccactggggatgaagggggaacttgcatatgcatttggcgacttgttgagaaagctatgggctattgataggacccctgttgcacctcgccaattcaaggccagacttggacggtttgctccccaattcagtggctttaaccaacatgattcacaggagcttcttgctttcctattggatggactccatgaagacttgaaccgtgttaaatgtaaaccatattctgaagctaaggattcagatggccgtccggatgaagaggttgcagatgagtattggggcaaccatttagctcgaaatgactctatcatagttgatatctgccagggtcagtacaagtcaacattagtttgccccatctgcaagaaagtttctgtaacatttgacccgtttatgtatttgtctttgcccctgccttcaacaacaatgagaacaatgaccataacagtcttcagtactgatgggaccagtgggccatctccttacactattagtgtaccaaaatcgggagatacgaggacccttattaatgcgttaagcagtgcttgttcgttgagagatgatgagcgccttctagttgctgaggtctacaacaattcccttattcggtacttggatgaaccttctgaagttatctccttaatcagagatggagatcgtttggttgcatatcggcttcctaaagacaatgaagatgccccaattgtggtgttcagaaaccagcgtatggagtcatccctttccagttttgggcgtaagtcatggaagacttttggcactccactggtgtcaagccttcctgatacagtaactggaagtaatatttacaatcttttcctaaaggttatgactccattcagagtatcaagaggtgatgctgctgttgctgatcaaacacttggtgaaagcagtctggttgatgaaactgaagatatcaatatgagctctgatgcctcagagcacaccagcataaacaacaattctgtcgaggatgaaacagggactgaagatgtgatgcaatttttcctgactaatgagagaatcccagaccaacgcatgaagatagaaatggatctatccattacggtgaatgatccgcataagcgtctgcatgtggctgtgtgttgggaggacagtggactggaccaatacaactttagttctttgaattctcttccagaagtttacaaagcggtgctgttttctaggaggccacaggacacatgttctctatatgcatgtctggaagcttttattaaggaagaaccattaggcccagaagacatgtggtactgcccaggttgtaaagagcatcggcaagctagtaagaagttagacctctggagattacctgaaatccttattatacacctgaaaagattttcatacagtcggtataccaaaaacaagctggagacatttgtggacttcccgattcatgatcttgacctgtcgaagtatattggtcacagatgccaagacgttcctcacaattatcgactgtatgctactagcaaccactatggaagcttgggaggtggtcactatacggcttatgtttatcatgaagggaaaaagggttggtatgatttcgatgaccgtcatgtgggccccataaccgaggacagtataaagacatcggcagcttatgttcttttttaccggcggatacaggaggatagcttagatacagttacagacatagattctgatattccaacctgaggaggcggtggaggcaatttttgagcccaagtcccggacagtgtatagtttcattggtttagggggacagttgtgcggcaatgccgcaacggaagtgagaaatagaacaggtggggaagagtttgtgcggcaatgtggttcagaggggggagataatttgtcgcggttccttccgttgcaaattcctttgttttttttccgttcccttttagcacctgtaactgatagcggtaaaattttggctaatggcatgtggggaagatatttcgtcccagattctcaacacagttagggttagttttggaaccctatttttaaggaatttctatttttctaagagaaactagtttattttttcttggaaaaataggaaacctttcagaaaatggagttctcaaacaag

SEQ ID NO: 30132 - DNA, 3033 bp, Zea Mays
atgcccgcgcccccggacccgccgccgctcccgccgctggacccgtcggatcccgccgcggccacaccgcccgccgccgcggccgccgatgaggaggaggacgaccgcgtcttccttgtgccactcaggtggtggaaggaggcgcagcaagggctggcgatcaacgtgcctggtctgccctacgcggccgcgcctgctggacctacctcctacggcatgagggtgctcagcatgttcctctccgaccaaacatacaccctccgccgcgccgacgagctcttgcagcagaccgcctccttcgccgccaggagctacgcgctcctcccggccgacctgttctcaaaggcacgggaatggtatattgtgcctgccaagtctgcagtcaaaaacgtgtcaccagctggagagggctcagtaaatatttaccccataatgctaagagtttcagccagcagagatacatatacactaaccgtgaagatcggcaaaaaggacaactcaactgagaactttaagagagcatgcaagatcctgactgcagactctgagccggttcacatatgggatttctctgggcgaacaacatacatagttatgactgaactgaaccggtcgccccatgactcaaaatctgcagatcaggagatgcctctacaaatacacatttatgatctgtcggaacctatggttaatggttctgatgggaaaagggatgagttagcattaacattgggtggctcaagttctagcaatggtggtagtatgaacatggatctggattcatcaagtggaagctctaagcaagttggatccggtttaacaggattagacaatttgggaaacacatgtttcatgaacagtgcagtccagtgcttggctcatacttcaaagctggttgactatttccttggtgatttccacaaagaagtaaacccacataacccactggggatgaagggggaacttgcatatgcatttggcgacttgttgagaaagctatgggctattgataggacccctgttgcacctcgccaattcaaggccagacttggacggtttgctccccaattcagtggctttaaccaacatgattcacagacttgaaccgtgttaaatgtaaaccatattctgaagctaaggattcagatggccgtccggatgaagaggttgcagatgagtattggggcaaccatttagctcgaaatgactctatcatagttgatatctgccagggtcagtacaagtcaacattagtttgccccatctgcaagaaagtttctgtaacatttgacccgtttatgtatttgtctttgcccctgccttcaacaacaatgagaacaatgaccataacagtcttcagtactgatgggaccagtgggccatctccttacactattagtgtaccaaaatcgggagatacgaggacccttattaatgcgttaagcagtgcttgttcgttgagagatgatgagcgccttctagttgctgaggtctacaacaattcccttattcggtacttggatgaaccttctgaagttatctccttaatcagagatggagatcgtttggttgcatatcggcttcctaaagacaatgaagatgccccaattgtggtgttcagaaaccagcgtatggagtcatccctttccagttttgggcgtaagtcatggaagacttttggcactccactggtgtcaagccttcctgatacagtaactggaagtaatatttacaatcttttcctaaaggttatgactccattcagagtatcaagaggtgatgctgctgttgctgatcaaacacttggtgaaagcagtctggttgatgaaactgaagatatcaatatgagctctgatgcctcagagcacaccagcataaacaacaattctgtcgaggatgaaacagggactgaagatgtgatgcaatttttcctgactaatgagagaatcccagaccaacgcatgaagatagaaatggatctatccattacggtgaatgatccgcataagcgtctgcatgtggctgtgtgttgggaggacagtggactggaccaatacaactttagttctttgaattctcttccagaagtttacaaagcggtgctgttttctaggaggccacaggacacatgttctctatatgcatgtctggaagcttttattaaggaagaaccattaggcccagaagacatgtggtactgcccaggttgtaaagagcatcggcaagctagtaagaagttagacctctggagattacctgaaatccttattatacacctgaaaagattttcatacagtcggtataccaaaaacaagctggagacatttgtggacttcccgattcatgatcttgacctgtcgaagtatattggtcacagatgccaagacgttcctcacaattatcgactgtatgctactagcaaccactatggaagcttgggaggtggtcactatacggcttatgtttatcatgaagggaaaaagggttggtatgatttcgatgaccgtcatgtgggccccataaccgaggacagtataaagacatcggcagcttatgttcttttttaccggcggatacaggaggatagcttagatacagttacagacatagattctgatattccaacctgaggaggcggtggaggcaatttttgagcccaagtcccggacagtgtatagtttcattggtttagggggacagttgtgcggcaatgccgcaacggaagtgagaaatagaacaggtggggaagagtttgtgcggcaatgtggttcagaggggggagataatttgtcgcggttccttccgttgcaaattcctttgttttttttccgttcccttttagcacctgtaactgatagcggtaaaattttggctaatggcatgtggggaagatatttcgtcccagattctcaacacagttagggttagttttggaaccctatttttaaggaatttctatttttctaagagaaactagtttattttttcttggaaaaataggaaacctttcagaaaatggagttctcaaacaag

SEQ ID NO: 30133 - DNA, 3141 bp, Zea Mays
atgcccgcgcccccggacccgccgccgctcccgccgctggacccgtcggatcccgccgcggccacaccgcccgccgccgcggccgccgatgaggaggaggacgaccgcgtcttccttgtgccactcaggtggtggaaggaggcgcagcaagggctggcgatcaacgtgcctggtctgccctacgcggccgcgcctgctggacctacctcctacggcatgagggtgctcagcatgttcctctccgaccaaacatacaccctccgccgcgccgacgagctcttgcagcagaccgcctccttcgccgccaggagctacgcgctcctcccggccgacctgttctcaaaggtatattgtgcctgccaagtctgcagtcaaaaacgtgtcaccagctggagagggctcagtaaatatttaccccataatgctaagagtttcagccagcagagatacatatacactaaccgtgaagatcggcaaaaaggacaactcaactgagaactttaagagagcatgcaagatcctgactgcagactctgagccggtattcctatgagaattcttttgcccacttactagtaatggtaaatagccgaagttatttttcttgtattgcatgtttgcaggttcacatatgggatttctctgggcgaacaacatacatagttatgactgaactgaaccggtcgccccatgactcaaaatctgcagatcaggagatgcctctacaaatacacatttatgatctgtcggaacctatggttaatggttctgatgggaaaagggatgagttagcattaacattgggtggctcaagttctagcaatggtggtagtatgaacatggatctggattcatcaagtggaagctctaagcaagttggatccggtttaacaggattagacaatttgggaaacacatgtttcatgaacagtgcagtccagtgcttggctcatacttcaaagctggttgactatttccttggtgatttccacaaagaagtaaacccacataacccactggggatgaagggggaacttgcatatgcatttggcgacttgttgagaaagctatgggctattgataggacccctgttgcacctcgccaattcaaggccagacttggacggtttgctccccaattcagtggctttaaccaacatgattcacaggagcttcttgctttcctattggatggactccatgaagacttgaaccgtgttaaatgtaaaccatattctgaagctaaggattcagatggccgtccggatgaagaggttgcagatgagtattggggcaaccatttagctcgaaatgactctatcatagttgatatctgccagggtcagtacaagtcaacattagtttgccccatctgcaagaaagtttctgtaacatttgacccgtttatgtatttgtctttgcccctgccttcaacaacaatgagaacaatgaccataacagtcttcagtactgatgggaccagtgggccatctccttacactattagtgtaccaaaatcgggagatacgaggacccttattaatgcgttaagcagtgcttgttcgttgagagatgatgagcgccttctagttgctgaggtctacaacaattcccttattcggtacttggatgaaccttctgaagttatctccttaatcagagatggagatcgtttggttgcatatcggcttcctaaagacaatgaagatgccccaattgtggtgttcagaaaccagcgtatggagtcatccctttccagttttgggcgtaagtcatggaagacttttggcactccactggtgtcaagccttcctgatacagtaactggaagtaatatttacaatcttttcctaaaggttatgactccattcagagtatcaagaggtgatgctgctgttgctgatcaaacacttggtgaaagcagtctggttgatgaaactgaagatatcaatatgagctctgatgcctcagagcacaccagcataaacaacaattctgtcgaggatgaaacagggactgaagatgtgatgcaatttttcctgactaatgagagaatcccagaccaacgcatgaagatagaaatggatctatccattacggtgaatgatccgcataagcgtctgcatgtggctgtgtgttgggaggacagtggactggaccaatacaactttagttctttgaattctcttccagaagtttacaaagcggtgctgttttctaggaggccacaggacacatgttctctatatgcatgtctggaagcttttattaaggaagaaccattaggcccagaagacatgtggtactgcccaggttgtaaagagcatcggcaagctagtaagaagttagacctctggagattacctgaaatccttattatacacctgaaaagattttcatacagtcggtataccaaaaacaagctggagacatttgtggacttcccgattcatgatcttgacctgtcgaagtatattggtcacagatgccaagacgttcctcacaattatcgactgtatgctactagcaaccactatggaagcttgggaggtggtcactatacggcttatgtttatcatgaagggaaaaagggttggtatgatttcgatgaccgtcatgtgggccccataaccgaggacagtataaagacatcggcagcttatgttcttttttaccggcggatacaggaggatagcttagatacagttacagacatagattctgatattccaacctgaggaggcggtggaggcaatttttgagcccaagtcccggacagtgtatagtttcattggtttagggggacagttgtgcggcaatgccgcaacggaagtgagaaatagaacaggtggggaagagtttgtgcggcaatgtggttcagaggggggagataatttgtcgcggttccttccgttgcaaattcctttgttttttttccgttcccttttagcacctgtaactgatagcggtaaaattttggctaatggcatgtggggaagatatttcgtcccagattctcaacacagttagggttagttttggaaccctatttttaaggaatttctatttttctaagagaaactagtttattttttcttggaaaaataggaaacctttcagaaaatggagttctcaaacaag

SEQ ID NO: 30134 - DNA, 2760 bp, Zea Mays
tctggcgttgccctgtggccttcaccaggatggatggctgctgacagtatattgtgcctgccaagtctgcagtcaaaaacgtgtcaccagctggagagggctcagtaaatatttaccccataatgctaagagtttcagccagcagagatacatatacactaaccgtgaagatcggcaaaaaggacaactcaactgagaactttaagagagcatgcaagatcctgactgcagactctgagccggttcacatatgggatttctctgggcgaacaacatacatagttatgactgaactgaaccggtcgccccatgactcaaaatctgcagatcaggagatgcctctacaaatacacatttatgatctgtcggaacctatggttaatggttctgatgggaaaagggatgagttagcattaacattgggtggctcaagttctagcaatggtggtagtatgaacatggatctggattcatcaagtggaagctctaagcaagttggatccggtttaacaggattagacaatttgggaaacacatgtttcatgaacagtgcagtccagtgcttggctcatacttcaaagctggttgactatttccttggtgatttccacaaagaagtaaacccacataacccactggggatgaagggggaacttgcatatgcatttggcgacttgttgagaaagctatgggctattgataggacccctgttgcacctcgccaattcaaggccagacttggacggtttgctccccaattcagtggctttaaccaacatgattcacaggagcttcttgctttcctattggatggactccatgaagacttgaaccgtgttaaatgtaaaccatattctgaagctaaggattcagatggccgtccggatgaagaggttgcagatgagtattggggcaaccatttagctcgaaatgactctatcatagttgatatctgccagggtcagtacaagtcaacattagtttgccccatctgcaagaaagtttctgtaacatttgacccgtttatgtatttgtctttgcccctgccttcaacaacaatgagaacaatgaccataacagtcttcagtactgatgggaccagtgggccatctccttacactattagtgtaccaaaatcgggagatacgaggacccttattaatgcgttaagcagtgcttgttcgttgagagatgatgagcgccttctagttgctgaggtctacaacaattcccttattcggtacttggatgaaccttctgaagttatctccttaatcagagatggagatcgtttggttgcatatcggcttcctaaagacaatgaagatgccccaattgtggtgttcagaaaccagcgtatggagtcatccctttccagttttgggcgtaagtcatggaagacttttggcactccactggtgtcaagccttcctgatacagtaactggaagtaatatttacaatcttttcctaaaggttatgactccattcagagtatcaagaggtgatgctgctgttgctgatcaaacacttggtgaaagcagtctggttgatgaaactgaagatatcaatatgagctctgatgcctcagagcacaccagcataaacaacaattctgtcgaggatgaaacagggactgaagatgtgatgcaatttttcctgactaatgagagaatcccagaccaacgcatgaagatagaaatggatctatccattacggtgaatgatccgcataagcgtctgcatgtggctgtgtgttgggaggacagtggactggaccaatacaactttagttctttgaattctcttccagaagtttacaaagcggtgctgttttctaggaggccacaggacacatgttctctatatgcatgtctggaagcttttattaaggaagaaccattaggcccagaagacatgtggtactgcccaggttgtaaagagcatcggcaagctagtaagaagttagacctctggagattacctgaaatccttattatacacctgaaaagattttcatacagtcggtataccaaaaacaagctggagacatttgtggacttcccgattcatgatcttgacctgtcgaagtatattggtcacagatgccaagacgttcctcacaattatcgactgtatgctactagcaaccactatggaagcttgggaggtggtcactatacggcttatgtttatcatgaagggaaaaagggttggtatgatttcgatgaccgtcatgtgggccccataaccgaggacagtataaagacatcggcagcttatgttcttttttaccggcggatacaggaggatagcttagatacagttacagacatagattctgatattccaacctgaggaggcggtggaggcaatttttgagcccaagtcccggacagtgtatagtttcattggtttagggggacagttgtgcggcaatgccgcaacggaagtgagaaatagaacaggtggggaagagtttgtgcggcaatgtggttcagaggggggagataatttgtcgcggttccttccgttgcaaattcctttgttttttttccgttcccttttagcacctgtaactgatagcggtaaaattttggctaatggcatgtggggaagatatttcgtcccagattctcaacacagttagggttagttttggaaccctatttttaaggaatttctatttttctaagagaaactagtttattttttcttggaaaaataggaaacctttcagaaaatggagttctcaaacaag

SEQ ID NO: 30135 - DNA, 2754 bp, Zea Mays
attttttatgcttcactttagttctgcttaccaccgactgcagaatgtctagtttgtcaaggttcttatcttcttttctgatgtaggtgcatttaatctgtactaagttagcacatctatgattcatattgtcaaaaaaaatctcattttttcgaattgaactcttttcctttgaattatttggctcgtatactgagcatggatgaacaccaagtcgcttcaacttctctcataatcctagagctttctccatgtccttataaaattccatgaacaaaggatgcatgttctaaagtccaaggaaaggtccaccataccttaaagaaaagatgcctctacaaatacacatttatgatctgtcggaacctatggttaatggttctgatgggaaaagggatgagttagcattaacattgggtggctcaagttctagcaatggtggtagtatgaacatggatctggattcatcaagtggaagctctaagcaagttggatccggtttaacaggattagacaatttgggaaacacatgtttcatgaacagtgcagtccagtgcttggctcatacttcaaagctggttgactatttccttggtgatttccacaaagaagtaaacccacataacccactggggatgaagggggaacttgcatatgcatttggcgacttgttgagaaagctatgggctattgataggacccctgttgcacctcgccaattcaaggccagacttggacggtttgctccccaattcagtggctttaaccaacatgattcacaggagcttcttgctttcctattggatggactccatgaagacttgaaccgtgttaaatgtaaaccatattctgaagctaaggattcagatggccgtccggatgaagaggttgcagatgagtattggggcaaccatttagctcgaaatgactctatcatagttgatatctgccagggtcagtacaagtcaacattagtttgccccatctgcaagaaagtttctgtaacatttgacccgtttatgtatttgtctttgcccctgccttcaacaacaatgagaacaatgaccataacagtcttcagtactgatgggaccagtgggccatctccttacactattagtgtaccaaaatcgggagatacgaggacccttattaatgcgttaagcagtgcttgttcgttgagagatgatgagcgccttctagttgctgaggtctacaacaattcccttattcggtacttggatgaaccttctgaagttatctccttaatcagagatggagatcgtttggttgcatatcggcttcctaaagacaatgaagatgccccaattgtggtgttcagaaaccagcgtatggagtcatccctttccagttttgggcgtaagtcatggaagacttttggcactccactggtgtcaagccttcctgatacagtaactggaagtaatatttacaatcttttcctaaaggttatgactccattcagagtatcaagaggtgatgctgctgttgctgatcaaacacttggtgaaagcagtctggttgatgaaactgaagatatcaatatgagctctgatgcctcagagcacaccagcataaacaacaattctgtcgaggatgaaacagggactgaagatgtgatgcaatttttcctgactaatgagagaatcccagaccaacgcatgaagatagaaatggatctatccattacggtgaatgatccgcataagcgtctgcatgtggctgtgtgttgggaggacagtggactggaccaatacaactttagttctttgaattctcttccagaagtttacaaagcggtgctgttttctaggaggccacaggacacatgttctctatatgcatgtctggaagcttttattaaggaagaaccattaggcccagaagacatgtggtactgcccaggttgtaaagagcatcggcaagctagtaagaagttagacctctggagattacctgaaatccttattatacacctgaaaagattttcatacagtcggtataccaaaaacaagctggagacatttgtggacttcccgattcatgatcttgacctgtcgaagtatattggtcacagatgccaagacgttcctcacaattatcgactgtatgctactagcaaccactatggaagcttgggaggtggtcactatacggcttatgtttatcatgaagggaaaaagggttggtatgatttcgatgaccgtcatgtgggccccataaccgaggacagtataaagacatcggcagcttatgttcttttttaccggcggatacaggaggatagcttagatacagttacagacatagattctgatattccaacctgaggaggcggtggaggcaatttttgagcccaagtcccggacagtgtatagtttcattggtttagggggacagttgtgcggcaatgccgcaacggaagtgagaaatagaacaggtggggaagagtttgtgcggcaatgtggttcagaggggggagataatttgtcgcggttccttccgttgcaaattcctttgttttttttccgttcccttttagcacctgtaactgatagcggtaaaattttggctaatggcatgtggggaagatatttcgtcccagattctcaacacagttagggttagttttggaaccctatttttaaggaatttctatttttctaagagaaactagtttattttttcttggaaaaataggaaacctttcagaaaatggagttctcaaacaag

SEQ ID NO: 30136 - DNA, 2027 bp, Zea Mays
ctttgaattatttggctcgtatactgagcatggatgaacaccaagtcgcttcaacttctctcataatcctagagctttctccatgtccttataaaattccatgaacaaaggatgcatgttctaaagtccaaggaaaggtccaccataccttaaagaaaagatgcctctacaaatacacatttatgatctgtcggaacctatggttaatggttctgatgggaaaagggatgagttagcattaacattgggtggctcaagttctagcaatggtggtagtatgaacatggatctggattcatcaagtggaagctctaagcaagttggatccggtttaacaggattagacaatttgggaaacacatgtttcatgaacagtgcagtccagtgcttggctcatacttcaaagctggttgactatttccttggtgatttccacaaagaagtaaacccacataacccactggggatgaagggggaacttgcatatgcatttggcgacttgttgagaaagctatgggctattgataggacccctgttgcacctcgccaattcaaggccagacttggacggtttgctccccaattcagtggctttaaccaacatgattcacaggagcttcttgctttcctattggatggactccatgaagacttgaaccgtgttaaatgtaaaccatattctgaagctaaggattcagatggccgtccggatgaagaggttgcagatgagtattggggcaaccatttagctcgaaatgactctatcatagttgatatctgccagggtcagtacaagtcaacattagtttgccccatctgcaagaaagtttctgtaacatttgacccgtttatgtatttgtctttgcccctgccttcaacaacaatgagaacaatgaccataacagtcttcagtactgatgggaccagtgggccatctccttacactattagtgtaccaaaatcgggagatacgaggacccttattaatgcgttaagcagtgcttgttcgttgagagatgatgagcgccttctagttgctgaggtctacaacaattcccttattcggtacttggatgaaccttctgaagttatctccttaatcagagatggagatcgtttggttgcatatcggcttcctaaagacaatgaagatgccccaattgtggtgttcagaaaccagcgtatggagtactgcccaggttgtaaagagcatcggcaagctagtaagaagttagacctctggagattacctgaaatccttattatacacctgaaaagattttcatacagtcggtataccaaaaacaagctggagacatttgtggacttcccgattcatgatcttgacctgtcgaagtatattggtcacagatgccaagacgttcctcacaattatcgactgtatgctactagcaaccactatggaagcttgggaggtggtcactatacggcttatgtttatcatgaagggaaaaagggttggtatgatttcgatgaccgtcatgtgggccccataaccgaggacagtataaagacatcggcagcttatgttcttttttaccggcggatacaggaggatagcttagatacagttacagacatagattctgatattccaacctgaggaggcggtggaggcaatttttgagcccaagtcccggacagtgtatagtttcattggtttagggggacagttgtgcggcaatgccgcaacggaagtgagaaatagaacaggtggggaagagtttgtgcggcaatgtggttcagaggggggagataatttgtcgcggttccttccgttgcaaattcctttgttttttttccgttcccttttagcacctgtaactgatagcggtaaaattttggctaatggcatgtggggaagatatttcgtcccagattctcaacacagttagggttagttttggaaccctatttttaaggaatttctatttttctaagagaaactagtttattttttcttggaaaaataggaaacctttcagaaaatggagttctcaaacaag

SEQ ID NO: 30137 - DNA, 2429 bp, Zea Mays
catgaacaaaggatgcatgttctaaagtccaaggaaaggtccaccataccttaaagaaaagatgcctctacaaatacacatttatgatctgtcggaacctatggttaatggttctgatgggaaaagggatgagttagcattaacattgggtggctcaagttctagcaatggtggtagtatgaacatggatctggattcatcaagtggaagctctaagcaagttggatccggtttaacaggattagacaatttgggaaacacatgtttcatgaacagtgcagtccagtgcttggctcatacttcaaagctggttgactatttccttggtgatttccacaaagaagtaaacccacataacccactggggatgaagggggaacttgcatatgcatttggcgacttgttgagaaagctatgggctattgataggacccctgttgcacctcgccaattcaaggccagacttggacggtttgctccccaattcagtggctttaaccaacatgattcacaggagcttcttgctttcctattggatggactccatgaagacttgaaccgtgttaaatgtaaaccatattctgaagctaaggattcagatggccgtccggatgaagaggttgcagagggtcagtacaagtcaacattagtttgccccatctgcaagaaagtttctgtaacatttgacccgtttatgtatttgtctttgcccctgccttcaacaacaatgagaacaatgaccataacagtcttcagtactgatgggaccagtgggccatctccttacactattagtgtaccaaaatcgggagatacgaggacccttattaatgcgttaagcagtgcttgttcgttgagagatgatgagcgccttctagttgctgaggtctacaacaattcccttattcggtacttggatgaaccttctgaagttatctccttaatcagagatggagatcgtttggttgcatatcggcttcctaaagacaatgaagatgccccaattgtggtgttcagaaaccagcgtatggagtcatccctttccagttttgggcgtaagtcatggaagacttttggcactccactggtgtcaagccttcctgatacagtaactggaagtaatatttacaatcttttcctaaaggttatgactccattcagagtatcaagaggtgatgctgctgttgctgatcaaacacttggtgaaagcagtctggttgatgaaactgaagatatcaatatgagctctgatgcctcagagcacaccagcataaacaacaattctgtcgaggatgaaacagggactgaagatgtgatgcaatttttcctgactaatgagagaatcccagaccaacgcatgaagatagaaatggatctatccattacggtgaatgatccgcataagcgtctgcatgtggctgtgtgttgggaggacagtggactggaccaatacaactttagttctttgaattctcttccagaagtttacaaagcggtgctgttttctaggaggccacaggacacatgttctctatatgcatgtctggaagcttttattaaggaagaaccattaggcccagaagacatgtggtactgcccaggttgtaaagagcatcggcaagctagtaagaagttagacctctggagattacctgaaatccttattatacacctgaaaagattttcatacagtcggtataccaaaaacaagctggagacatttgtggacttcccgattcatgatcttgacctgtcgaagtatattggtcacagatgccaagacgttcctcacaattatcgactgtatgctactagcaaccactatggaagcttgggaggtggtcactatacggcttatgtttatcatgaagggaaaaagggttggtatgatttcgatgaccgtcatgtgggccccataaccgaggacagtataaagacatcggcagcttatgttcttttttaccggcggatacaggaggatagcttagatacagttacagacatagattctgatattccaacctgaggaggcggtggaggcaatttttgagcccaagtcccggacagtgtatagtttcattggtttagggggacagttgtgcggcaatgccgcaacggaagtgagaaatagaacaggtggggaagagtttgtgcggcaatgtggttcagaggggggagataatttgtcgcggttccttccgttgcaaattcctttgttttttttccgttcccttttagcacctgtaactgatagcggtaaaattttggctaatggcatgtggggaagatatttcgtcccagattctcaacacagttagggttagttttggaaccctatttttaaggaatttctatttttctaagagaaactagtttattttttcttggaaaaataggaaacctttcagaaaatggagttctcaaacaag

SEQ ID NO: 30138 - DNA, 1005 bp, Zea Mays
caatcatggcatttcccctctctctctctctacccagcatattgctgctcccacacacacacacaaggccaccacaacaaataaaagcactgctgcttgccagtattgctttgctttgccttgcttgcccccacacgccctctctctcctctctctctctcaaaccgaaaagaaaagaggaaagtgggatagctcaatctcttcttccttcgtcattcctctcccgtaggttctctctccctccctccctccctccctccctcagcacacataaactcgagatacacatatatatcagtaggagaggatggatgtgcaaacctagcctgctgcctttgtagctgcaaattaaattgagctgtacctgttggtcttcctcctcgctcttcttggttctcgctggttgccgggagctgggatcgaaagtactgctgttgttcgcacggcgaggcggcggcggagaccggtcagaaggaatgtcttcggcccaaatcgcgccggcagatcatgtgtgctatgtgcactgcagcttctgcaacacagttctcgcggtgagtgtcccggggaatagcatgctcaacatcgtgacagttcggtgtggacactgcgcaaatctactgtcagtgaacctgagagcactgatgcactcactcccagaacaagatcatcagctccaggagaacatcaaggtccatggcatcaacggcactttgcacgatgatcatcagtactgcggccatttggatcagctcggttcttcttcgtcgtcaaggttccggcggcttccagtgatgtgttcgccacagaacgagcagcacctgctgcaggagcaaacacttaacaacaatgctcgtcagaagaggcagcgggttccgtcggcgtataacagattcatcaaggaagagatacgcaggatcaaagcgaacaaccccgacattaaccacagggaagccttcagcacggcagccaagaattgcgaagcaccatatatatatatgcagtggc

SEQ ID NO: 30139 - DNA, 1252 bp, Zea Mays
caatcatggcatttcccctctctctctctctacccagcatattgctgctcccacacacacacacaaggccaccacaacaaataaaagcactgctgcttgccagtattgctttgctttgccttgcttgcccccacacgccctctctctcctctctctctctcaaaccgaaaagaaaagaggaaagtgggatagctcaatctcttcttccttcgtcattcctctccctactgctgttgttcgcacggcgaggcggcggcggagaccggtcagaaggaatgtcttcggcccaaatcgcgccggcagatcatgtgtgctatgtgcactgcagcttctgcaacacagttctcgcggtgagtgtcccggggaatagcatgctcaacatcgtgacagttcggtgtggacactgcgcaaatctactgtcagtgaacctgagagcactgatgcactcactcccagaacaagatcatcagctccaggagaacatcaaggtccatggcatcaacggcactttgcacgatgatcatcagtactgcggccatttggatcagctcggttcttcttcgtcgtcaaggttccggcggcttccagtgatgtgttcgccacagaacgagcagcacctgctgcaggagcaaacacttaacaacaatgctcgtcctccagagaagaggcagcgggttccgtcggcgtataacagattcatcaaggaagagatacgcaggatcaaagcgaacaaccccgacattaaccacagggaagccttcagcacggcagccaagaattgggcacattatccaaacatccatttcggtttagacgactccgggcgagagggcaagaagaagctcgtggatcatgaggcggcggcgtctgtcgtcgcagtcgcagcagcaccgactgctgctaaaaagatccagggtttctactgatggtagcagatagatgtgtagattgattgatacatcatcgaccgggtggaagaattgataccacaaaaactgctttatatatatgtactgtgagtaaacagttaaaattaaacttgtgagatgtaccgtacatatgaagagctagctagtagtgagtcataaagtgggaaagtgaagcatatatagtcgtaaaaacaatcacatgaattgctattaggcaccatatatatgcacttaattatattggttgaggagacctaataaatcatttgacctaccatgcatattattgcagtgcgaagcaccatatatatatatgcagtggc

SEQ ID NO: 30140 - DNA, 952 bp, Zea Mays
tagtgacaaactgacaacaacaaaagtagggctagaaaagctactacctggtgagtgtcccggggaatagcatgctcaacatcgtgacagttcggtgtggacactgcgcaaatctactgtcagtgaacctgagagcactgatgcactcactcccagaacaagatcatcagctccaggagaacatcaaggtccatggcatcaacggcactttgcacgatgatcatcagtactgcggccatttggatcagctcggttcttcttcgtcgtcaaggttccggcggcttccagtgatgtgttcgccacagaacgagcagcacctgctgcaggagcaaacacttaacaacaatgctcgtcctccagagaagaggcagcgggttccgtcggcgtataacagattcatcaaggaagagatacgcaggatcaaagcgaacaaccccgacattaaccacagggaagccttcagcacggcagccaagaattgggcacattatccaaacatccatttcggtttagacgactccgggcgagagggcaagaagaagctcgtggatcatgaggcggcggcgtctgtcgtcgcagtcgcagcagcaccgactgctgctaaaaagatccagggtttctactgatggtagcagatagatgtgtagattgattgatacatcatcgaccgggtggaagaattgataccacaaaaactgctttatatatatgtactgtgagtaaacagttaaaattaaacttgtgagatgtaccgtacatatgaagagctagctagtagtgagtcataaagtgggaaagtgaagcatatatagtcgtaaaaacaatcacatgaattgctattaggcaccatatatatgcacttaattatattggttgaggagacctaataaatcatttgacctaccatgcatattattgcagtgcgaagcaccatatatatatatgcagtggc

SEQ ID NO: 30141 - DNA, 1530 bp, Zea Mays
cttcgacccgcgccgcgcctcccgaaagtttcgaacaaaagtccacaaatccccttcgccgtctccggcgagccccgcccctcatcgccgccgcgccaaagagacagtgagaggggggatggatcagtccatcagaaccgcatgcgagttcctctcgtcggtgctaaaccacgctgagtcctcgtcccgcgagctcgccgacgccgtctcccaacgccccgtccacctcgagatggcgaggacctcgttcctgcagaagctggagcacagggtggaggcgtcggccgccgacttgcagcacatcgagtccatcgccctcgacaccgtctccttcgaggagctcctcggccactgcggcgaggcgctcaaagtctacgcgcgccacgccgacgccctccagtcgcacctcgcttcctttggctacgagcccccggacgcacaacaccccgagatcgatgtggatgtggaagatggagatgtcgggaaggttggggaccctggagatagatgcctcagcgtgtcgcgttcagtgctcaggtcgggtaagcggcggtttgatagccacagcgatgcgatgtatcctctttggtttgattttgttcggaaagcaagattggcattgcctcggtagaacatctcaactgattgtatcagcagatgttgcatcttcagatgccatggatccaattggaggcactagtattaggaaatgatgcacttgtaagaatgcctacaggtttgaggacctatttattctggtacgtttatgctaagcaggagctgtatataggagatgcatcgaagctgaaaccctgagacacatagttttggtcggaactgcactgtgcttttcttgactgccgattagatttgaagagtcactgaaggatcttgggttttcagatgcttgtctagccactctttcttctgaaggcgcacattatggtgagagcccaaagaagctttacaagaatgctgaaagtactgatgatggcgaaaagatcatgaatgaagctgaaattatgactcccctaaatgaaagaaatggtcaaggtaattcttttgaaggagtgataagggcatcaaaggaggattatgagcaactccctccttatatgaagagtctagcatcatgggaggggagtgttgctttgaaccaggaccgtgttgcagagataggattggggcgcaaaggaagagcctgtttgctgatgctgttgcgactcaatcagctaactatggagacagttgatggctctaccttttacaccctgtgcaagaacaacgtgtagcctgatactgctactgctacagcgtgtcatgcttaagttttcctttttcttttcgtatgtcgagtctggctagaatattgtatcatgttgatgtagcactcgatctcagctcaaaatattgtttttttctgagcagttctggtcatgtgatcttcattccaaccatgaaataaagtgtgtttgaggcaccgctcatctccctgcaattcacctgggagatgcatatagaattttcaaa

SEQ ID NO: 30142 - DNA, 1804 bp, Zea Mays
cttcgacccgcgccgcgcctcccgaaagtttcgaacaaaagtccacaaatccccttcgccgtctccggcgagccccgcccctcatcgccgccgcgccaaagagacagtgagaggggggatggatcagtccatcagaaccgcatgcgagttcctctcgtcggtgctaaaccacgctgagtcctcgtcccgcgagctcgccgacgccgtctcccaacgccccgtccacctcgagatggcgaggacctcgttcctgcagaagctggagcacagggtggaggcgtcggccgccgacttgcagcacatcgagtccatcgccctcgacaccgtctccttcgaggagctcctcggccactgcggcgaggcgctcaaagtctacgcgcgccacgccgacgccctccagtcgcacctcgcttcctttggctacgagcccccggacgcacaacaccccgagatcgatgtggatgtggaagatggagatgtcgggaaggttggggaccctggagatagatgcctcagcgtgtcgcgttcagtgctcaggtcgggtaagcggcggtttgatagccacagcgatgcgatgtatcctctttggtttgattttgttcggaaagcaagattggcattgcctcggtagaacatctcaactgattgtatcagcagatgttgcatcttcagatgccatggatccaattggaggcactagtattaggaaatgatgcacttgtaagaatgcctacaggtttgaggacctatttattctggtacgtttatgctaagcaggagctgtatataggagatgcatcgaagctgaaaccctgagacacatagttttggtcggaactgcactgtgcttttcttgactgccgattagatttgaagagtcactgaaggatcttgggttttcagatgcttgtctagccactctttcttctgaaggcgcacattatggtgagagcccaaagaagctttacaagaatgctgaaagtactgatgatggcgaaaagatcatgaatgaagctgaaattatgactcccctaaatgaaagaaatggtcaaggtaattcttttgaaggagtgataagggcatcaaaggaggattatgagcaactccctccttatatgaagagtctagcatcatgggaggtctgaatttctttaactagtctgcccatagtacttatgcatgctcgatacaggtggttgcaaaattacacatagtcctttttgtcgtcgcattcttgatcataagtggacctgcggtgcatgattcatgagatacctatgttatctcagacagtcatctgcctcagagcaattgattgtattacttttctttttgtacctttttctgttgcatcaggagttgcaggagggaatatccaaactaaattcatacttgggtggtgacaagttgcaggggagtgttgctttgaaccaggaccgtgttgcagagataggattggggcgcaaaggaagagcctgtttgctgatgctgttgcgactcaatcagctaactatggagacagttgatggctctaccttttacaccctgtgcaagaacaacgtgtagcctgatactgctactgctacagcgtgtcatgcttaagttttcctttttcttttcgtatgtcgagtctggctagaatattgtatcatgttgatgtagcactcgatctcagctcaaaatattgtttttttctgagcagttctggtcatgtgatcttcattccaaccatgaaataaagtgtgtttgaggcaccgctcatctccctgcaattcacctgggagatgcatatagaattttcaaa

SEQ ID NO: 30143 - DNA, 1192 bp, Zea Mays
cttcgacccgcgccgcgcctcccgaaagtttcgaacaaaagtccacaaatccccttcgccgtctccggcgagccccgcccctcatcgccgccgcgccaaagagacagtgagaggggggatggatcagtccatcagaaccgcatgcgagttcctctcgtcggtgctaaaccacgctgagtcctcgtcccgcgagctcgccgacgccgtctcccaacgccccgtccacctcgagatggcgaggacctcgttcctgcagaagctggagcacagggtggaggcgtcggccgccgacttgcagcacatcgagtccatcgccctcgacaccgtctccttcgaggagctcctcggccactgcggcgaggcgctcaaagtctacgcgcgccacgccgacgccctccagtcgcacctcgcttcctttggctacgagcccccggacgcacaacaccccgagatcgatgtggatgtggaagatggagatgtcgggaaggttggggaccctggagatagatgcctcagcgtgtcgcgttcagtgctcaggtcgggtaagcggcggtttgatagccacagcgatgcgatatttgaagagtcactgaaggatcttgggttttcagatgcttgtctagccactctttcttctgaaggcgcacattatggtgagagcccaaagaagctttacaagaatgctgaaagtactgatgatggcgaaaagatcatgaatgaagctgaaattatgactcccctaaatgaaagaaatggtcaaggtaattcttttgaaggagtgataagggcatcaaaggaggattatgagcaactccctccttatatgaagagtctagcatcatgggagggcgcaaaggaagagcctgtttgctgatgctgttgcgactcaatcagctaactatggagacagttgatggctctaccttttacaccctgtgcaagaacaacgtgtagcctgatactgctactgctacagcgtgtcatgcttaagttttcctttttcttttcgtatgtcgagtctggctagaatattgtatcatgttgatgtagcactcgatctcagctcaaaatattgtttttttctgagcagttctggtcatgtgatcttcattccaaccatgaaataaagtgtgtttgaggcaccgctcatctccctgcaattcacctgggagatgcatatagaattttcaaa

SEQ ID NO: 30144 - DNA, 1539 bp, Zea Mays
actgtcctagtgttattactttatgtaattatctttggtgtgttgaatggatggttaaatgatgctaaaaattttgtaatggtatttagatggatatacttgacatttgtatatataatattttaatagatgtttaatttttttggtacatgtgacccaatgtgtgacccatacctacataggtatgggtacggggataaatcaataccaacgagtgtatatgggtaatttaatggagttatttttttgttatggctatgaatatgaggtagtaataccggagagccggagggaggacatggctggcggcccgcaccgaagcaaataaaaaaaaaagaaaaaaagaaagaaaaagtacccggggcccataaaataactttcccgtcaatcgcgtggacctaccgacaccaggaggcggaaggaaagaggaacccgcacagtggacggacctgtaggctcccgaaaatctccccgagtccgacgagtctccggcggccgcccccctctccctctcggatctctccctctctccgctcgccgcgcctccatcggtccactcagccatgtatagtaattacgggaatccttcggggatgcagatgcccccgcaaaactctcaacctgtccagtttgataatccattatacggtgcaagctcgggcctaatcagatctgggataggagtatatggggagaagtttttgggttctagttcagaattcatgcaaagcaacatcaatagatacttctccaacccgcagtattacttccatgtgaatgatcaatatgtccgtaacaagttgaaagttatactgttcccgttctttcacagggggcactggactcgaataagtgagccggtcggtggccgcttgtcctacaaacctccaatctatgacataaacgcaccagatctgtacatccctttcatggcatttggaagcttcatcatcctttcagggtttacattgggtttcatgggaaactataaatctgcagtttacaagggcgctcatcggctggggcttccagctcatggtcctgaaaggtctgctctactcgatgggtggtggcgaggtgccactgctcgacttggtagcgtacggcggttatttattcgccgggctatcgctcgccgtcgtcgcgaggctcgtgtgggcgtactcgtactatgtgatgatgccgtggatgagcctgtgcatgggggtgttcctggtgaggacgatgaagagggtgctcttcacggagatgagaagcagcgagaggcactcgtcgcggcagcactacttccttctcttcatggcaatcgcacagttccccctgttcttctggctcggcagcataggtgcatgatacacattaacgttgcaaaaatgatattgaagtgtttagatgtgttgtaaagaaaaaaacaattggacaatggtctcaacagcttagaggttggcagctctgcttgtgaagttgtatgtgatccacaatcatgttatgctattgacttttttggttggtacatcttttctgccatgtgtctaggct

SEQ ID NO: 30145 - DNA, 2124 bp, Zea Mays
gttttctcagtctcctccttctccacgcacgtcatctcctaactccccagccgctccttctagccctcatctcgtcggccctggctgctggtcgccgtcggccgcgagctctccaacataggccagcttcctcttcctcccctgtccaagctctccactcgacgcctaggtatccatggcgtctcctccccttcgtttcctctgccatggacgcgagttccaagctcctgctcgtctaggcccccttcccaggcgcccctacagagcccctggccgagcttccccatggtgtctcccccaactatggcgccctctgctcctccaagccggtgacccctcctctctggttctgcgcagggaactccctccatggctggcgtccctgtgctcgcgcccttgatccccatgcccgagctcctctccatcgtctttagctcgccatggtacaacgccactgtcaaatccggtctccagctcaccagcaacttccccttccttgcccttgcacacctctggtgtagcccctccctggtactcgacgaaattgtcatgtggagctctttattgtgtgcagccccatctgcaacaccgtcgaccccggtgagggagttaactggtaaagaagcgaggtccgtgagacgtttgccaagtgttcgatggaaggttcgaactgggaacctcgccgttctcgcggatcttcgggtcggattacctagtcaaccttcacatactactggatttgggactgctttaaatatagagacacttgttgctgccgcagaacaaagagaaacaccaattgaggacaagattctttttatgatcaacaatatatccatctcaaatatggaagctaaggcaaaggaatttaacgaggtcatacaggaacagcattatccttggtttgcacaatacatggtcatgaaaagggcaagcattgaaccaaatttccatgatctgtatctgaagttctttgataaagtaaactcaaaatccttgaacaaggaaatactgaaagccacatatgagaactgcaagttccgaggagcgctccttgctaaaaacctaggcagttggttgggaaagttcaccattggtaggaatcaggcactaagggctaaggagattgatccaaaatctcttatcgtggaggcatatgagaaaggattgatgattgcggtcataccattcacttcaaagatccttgaaccttgccagtcaagtatcgcatatcgacctccaaatccctggaccatgggaattctaagtctacttgctgaaatttataatcttccaaacctcaagatgaatctgaaatttgatattgaggtgctatttaagaaccttactgttgacataaaggatgtgaaaccaacttccctgctcaaagatcgtctgcgcgaagtcgagggaaatccagatttttcaaataaagatgttactgcatctcaaacccctgtggttgcagaagtcccttcagggaccatcccttcactaactcatatggaacaacaacctgagatcaatatcacatcccgagctatgagccttccaaatatacttaatcagtatgctgctcctgttcgtctacctacaaacagcacggtagaagatgacaaagttgctctgatgatgcctgagcaagtgccctcgttgacccaggtttcgccagcacaaacacaatcaacatcaccatctccattttctgttaaccagcttatggcggctattccacgtgaagagatacgtttcaaaataaatccaaagctcggctcccttggtccacaagctaacagggagataatactccctgttattcaaagaagtgtgaccatagcaagccgaactacaaaagaacttattctgaaggattatgcactggagtctgataacaatacgataactcgatccgcacatttgatggttggaacattagccggaagtctggcacatgttacttgcaaggaacctcttcgcgttgcactatattctaatctacggaatctcattcagaaccttatgagcggcagtgaaactatcgagcaacttattcacacgctaatcaatgataacttggatcttggctgtgccatcattgagatttaaaagcttaaggtttacaat

SEQ ID NO: 30146 - DNA, 1786 bp, Zea Mays
gttttctcagtctcctccttctccacgcacgtcatctcctaactccccagccgctccttctagccctcatctcgtcggccctggctgctggtcgccgtcggccgcgagctctccaacataggccagcttcctcttcctcccctgtccaagctctccactcgacgcctaggtatccatggcgtctcctccccttcgtttcctctgccatggacgcgagttccaagctcctgctcgtctaggcccccttcccaggcgcccctacagagcccctggccgagcttccccatggtgtctcccccaactatggcgccctctgctcctccaagccggtgacccctcctctctggttctgcgcagggaactccctccatggctggcgtccctgtgctcgcgcccttgatccccatgcccgagctcctctccatcgtctttagctcgccatggtacaacgccactgtcaaatccggtctccagctcaccagcaacttccccttccttgcccttgcacacctctggtgtagcccctccctggtactcgacgaaattgtcatgtggagctctttattgtgtgcagccccatctgcaacaccgtcgaccccggtgagggagttaactggtaaagaagcgaggtccgtgagacgtttgccaagtgttcgatggaaggttcgaactgggaacctcgccgttctcgcggatcttcgggtcggtttgtgaattgcgcaagcatatggtgtgtcggctttcagattcattgctgtccatatgtgtgatatagttggtgaatgaacatgtcaaaggagagtaaattctttaggcatatgagaaaggattgatgattgcggtcataccattcacttcaaagatccttgaaccttgccagtcaagtatcgcatatcgacctccaaatccctggaccatgggaattctaagtctacttgctgaaatttataatcttccaaacctcaagatgaatctgaaatttgatattgaggtgctatttaagaaccttactgttgacataaaggatgtgaaaccaacttccctgctcaaagatcgtctgcgcgaagtcgagggaaatccagatttttcaaataaagatgttactgcatctcaaacccctgtggttgcagaagtcccttcagggaccatcccttcactaactcatatggaacaacaacctgagatcaatatcacatcccgagctatgagccttccaaatatacttaatcagtatgctgctcctgttcgtctacctacaaacagcacggtagaagatgacaaagttgctctgatgatgcctgagcaagtgccctcgttgacccaggtttcgccagcacaaacacaatcaacatcaccatctccattttctgttaaccagcttatggcggctattccacgtgaagagatacgtttcaaaataaatccaaagctcggctcccttggtccacaagctaacagggagataatactccctgttattcaaagaagtgtgaccatagcaagccgaactacaaaagaacttattctgaaggattatgcactggagtctgataacaatacgataactcgatccgcacatttgatggttggaacattagccggaagtctggcacatgttacttgcaaggaacctcttcgcgttgcactatattctaatctacggaatctcattcagaaccttatgagcggcagtgaaactatcgagcaacttattcacacgctaatcaatgataacttggatcttggctgtgccatcattgagatttaaaagcttaaggtttacaat

SEQ ID NO: 30147 - DNA, 2014 bp, Zea Mays
agccgctagggctgcattcatccacctcgtgcttatcgcctaccccaactccgactcctgctcgtctcgtcgctcgccgctcgccgcctcgtccagctctctccgcccctccggactagcctagcccctcccgctcaccgcgtcgtctccagaatctggcctacgaccgttgacggctggtgccccctccggcgatcggtggtcatggtccgtccttgctcaccccgttcggatccgctatgcgcgagcctccccttccctaatcacgcgcccccctgccccagcgatccgcagctgccgccccctgtcccaccgatccgcggctgccgcctcctccttcccctaatcacgccccccggtcccgttgatccatagttgtcgcctcccccaacccctaatcacgcgcgtctcgctcccgccgatccgcggatcggctctgctccaaccctcctccgtccctgagatgcaagcgagcaccacgggggatttctcccttgaggtgttgcctgagaggtgctgctgaccgagtagcatcattgaagagttactgtcgagcacttggattatgtgatcgatgtgcagagaagtggttccaagggcacaagtgtgccaacacggtgcaacttcacaccattgaggaagtctaggatttgctcaccttggatgaagctacagtggaagtcattgaaccaacagaggaactgatgatggttgtcgtatccctgtctaatgcggcatggtccggatctgacacaatatcaaccatgagattacaggtcgtcgaccactattgtttggagtccaagaattgacaacactaattacagtttaggttgctaatggccaagttattacctgctcacaccaccttccagcagctcaatggaccatcggtatagcccgatgagagtggattggacaaacatgtggatggttatttcttaccaggaaaatactatctaccttcagggtatcaggtcttccttactagtgggaatggtggtggaattattgttactatctgaaacatcattatccacatctaactctagcatagcagctgttgcagtggattccagagtgcaagctgtactcgacagttatcctagcattttcatcgatccagtgggactcctaccaacccgcccgtgtgatcattcaatttcattgatccccggtgcccagctgttccacataaggccataccgttaccctccaaccctcaaagatgaaattgaaactcaagttaaggaaatgctatcccagggggtgatacgaaagagcagcagcccctttgcatctccaattctcttgtcaaaaagaaagaccactcatggcgattctgtgtagattaccgttatttgaatgccacgacggtgaagagtaaataccctatgctgatattcgatcagttctttgtgctcaggcactaggcatgtagagtcgatgcagcttacaaggctgttgacaaaataatccaggtttgttggcacacttttaatctttcttgtacgggtacactacttctaacaatggaatatgaatgttgttttttgcgcaaaagttgcctggcttttagcatcgtttgatgggtgaggacacacatcgcctccaaatactagaacgctagggatatttgttctctcaaataaagctttacctgttatattatataatacttccgtaagaagagctgttagtggctggagtgaatagaatttggttggtcagtgcctccaagttgttttataggactttcatatttggtcggtgccagattgggtgaataagctctctatgaggtttctgaaagttgacaggaaaacagttgatcttgtcggtaatgagaaactgaaggccagtgcatctgttaagcaccttgctcttccttgtaacaaggcagcaacggcacaagttattccagacattatccgatgttatagccagtcgaaccatcatcttcactgagacgaaggattctgcatcagagctttctggtaatactggtgttgct

SEQ ID NO: 30148 - DNA, 2538 bp, Zea Mays
agccgctagggctgcattcatccacctcgtgcttatcgcctaccccaactccgactcctgctcgtctcgtcgctcgccgctcgccgcctcgtccagctctctccgcccctccggactagcctagcccctcccgctcaccgcgtcgtctccagaatctggcctacgaccgttgacggctggtgccccctccggcgatcggtggtcatggtccgtccttgctcaccccgttcggatccgctatgcgcgagcctccccttccctaatcacgcgcccccctgccccagcgatccgcagctgccgccccctgtcccaccgatccgcggctgccgcctcctccttcccctaatcacgccccccggtcccgttgatccatagttgtcgcctcccccaacccctaatcacgcgcgtctcgctcccgccgatccgcggatcggctctgctccaaccctcctccgtccctgagatgcaagcgagcaccacgggggatttctcccttgaggtgttgcctgagaggtgctgctgaccgagtagcatcattgaagagttactgtcgagcacttggattatgtgatcgatgtgcagagaagtggttccaagggcacaagtgtgccaacacggtgcaacttcacaccattgaggaagtctaggatttgctcaccttggatgaagctacagtggaagtcattgaaccaacagaggaactgatgatggttgtcgtatccctgtctaatgcggcatgggtcttcacatactttcctcaatgacagtcgtcgaccactattgtttggagtccaagaattgacaacactaattacagtttaggttgctaatggccaagttattacctgctcacaccaccttccagcagctcaatggaccatcggtatagcccgatgagagtggattggacaaacatgtggatggttatttcttaccaggaaaatactatctaccttcaggctgttgcagtggattccagagtgcaagctgtactcgacagttatcctagcattttcatcgatccagtgggactcctaccaacccgcccgtgtgatcattcaatttcattgatccccggtgcccagctgttccacataaggccataccgttaccctccaaccctcaaagatgaaattgaaactcaagttaaggaaatgctatcccagggggtgatacgaaagagcagcagcccctttgcatctccaattctcttgtcaaaaagaaagaccactcatggcgattctgtgtagattaccgttatttgaatgccacgacggtgaagagtaaataccctatgctgatattcgatcagttctttgtgctcaggcactaggcatgtagaggtattttttgttgttattttctctttatgtggatgtggttacaaggctgttgacaaaatattactactccatcgtcctccctctcacccataagatatttgatatattactttgtccagtcgatgcagcttacaaggctgttgacaaaataatccaggtttgttggcacacttttaatctttcttgtacgggtacactacttctaacaatggaatatgaatgttgttttttgcgcaaaagttgcctggcttttagcatcgtttgatgggtgaggacacacatcgcctccaaatactagaacgctagggatatttgttctctcaaataaagctttacctgttatattatataatacttccgtaagaagagctgttagtggctggagtgaatagaatttggttggtcagtgcctccaagttgttttataggactttcatatttggtcggtgccagattgggtgaataagctctctatgaggtttctgaaagttgacaggaaaacagttgatcttgtcggtaatgagaaactgaaggccagtgcatctgttaagcaccttgctcttccttgtaacaaggcagcaacggcacaagttattccagacattatccgatgttatagccatggaggtcgaaccatcatcttcactgagacgaaggattctgcatcagagctttctggtaatactggtgttgctgtcatgctttatgagcccagatataagcacagtgtcagcagactagaaagggagtctggggttaaatttgagcatatctctgcgccacaacccactgatgtagcacaatctgctggcagtgaagctgcagatgccattgcgagtgtgtcagacagtgttattcctatcttcaggcagcaagcagagcagttgctaagctcttccagtctgtctgcagctgacttgcttgccaaagcacttgcgaaggcagttggttacacggacataaagaaaagatcattgttatcttccttggaggattacagtacactacatcttcaaactggcagaccgatgtggtcacctgggtttgctataacattccggtgatcgtgtttcttcttcgtcggggtcatatttgttcccattggtgttatcttcagtttgacgtcggcaacgtggtcatggtgaccggcgggaggaacaccgggcgtgtaggagtgatcaagaactgggagaag

SEQ ID NO: 30149 - DNA, 1088 bp, Zea Mays
ctaggatttgctcaccttggatgaagctacagtggaagtcattgaaccaacagaggaactgatgatggttgtcgtatccctgtctaatgcggcatggtccggatctgacacaatatcaaccatgagattacaggtcgtcgaccactattgtttggagtccaagaattgacaacactaattacagtttaggttgctaatggccaagttattacctgctcacaccaccttccagcagctcaatggaccatcccgatgagagtggattggacaaacatgtggatggttatttcttaccaggaaaatactatctaccttcagggtatcaggtcttccttactagtgggaatggtggtggaattattgttactatctgaaacatcattatccacatctaactctagcatagcagctgttgcagtggattccagagtgcaagctgtactcgacagttatcctagcattttcatcgatccagtgggactcctaccaacccgcccgtgtgatcattcaatttcattgatccccggtgcccagctgttccacataaggccataccgttaccctccaaccctcaaagatgaaattgaaactcaagttaaggaaatgctatcccagggggtgatacgaaagagcagcagcccctttgcatctccaattctcttgtcaaaaagaaagaccactcatggcgattctgtgtagattaccgttatttgaatgccacgacggtgaagagtaaataccctatgctgatattcgatcagttctttgtgctcaggcactaggcatgtagaggtattttttgttgttattttctctttatgtggatgtggttacaaggctgttgacaaaatattactactccatcgtcctccctctcacccataagatatttgatatattactttgtccagtcgatgcagcttacaaggctgttgacaaaataatccaggtttgttggcacacttttaatctttcttgtacgggtacactacttctaacaatggaatatgaatgttgttttttgcgcaaaagttgcctggcttttagcatcgtttgatgggtgaggacacacatcgcctccaaatact

SEQ ID NO: 30150 - DNA, 1883 bp, Zea Mays
atggaatggaagacagtgtacctcaaccaagtccatgtccatcctgatcgcaagctgcaaggcttcatgccgggggagaatgttgtggccttcatccatgacgagcctgacgaagggagcggcgatggcgttgttcatgcgcgggcccgcgctggcatcgtcctcctccttgcctcgcttcctattggtcttcaaaaccgaaacgggacggaacgggtcaccacaaagcccacggtcacgaggcagcgcggcagggaaggcggggtgaacggaggcagcagcgaagaggggtgcctacctgagtaccaggcggagcagcgaagtgccggaaaggcggggccagcggggagcgtatgggagtgggagcgggggcggcgagggccagtgggggaggaggatggggacggtggcggcggagatattgacaagttctataagtctgctattgtcttacgtggtggggagaacaaagaagtgcgatttaaggggaagactgaactaaaagatttgatggtgaaggcagatgggattaccagattaatggagcggggttacagggtgaagtgcatggccatgccctcaggtaatgaaggagaagatttaggaacaccactctctcggttgttaggacttatgtgtgcattgtcgaaagtggaccacacctggactcgaagcatgcgtatgttattgtcaggcatgtgaagtttgcaacaaagaaaggtgggaagaaagctagccaggccatggaagatgcaggaaaaggtaccagcagtgctgtcccagagtcacccattgatggcagcaataccgaagacatggcagttggacatggtctcgggaaacctgatgatcgtaccatctcagatcgtgttaaggaaacagccacccgtctctccagagactcccctgcccaaaaggaggggcacgatagagaatttaaaagggagttcaattggccaaaatccaacccaggggctgggggaaacagaaataatcctggccagaggggaccacgagatgtgcaacctggcatggaaaagcgagtgcaagatcagggtcctgttgaaaccaacagatacgccgctcggaggcagccaataagaggagacagcagccaaggaataccccctcaaggtgatagaaggaatgaaaatggaggtcgttatgagaaccagagacctcttgaacagcagcataaccggccgttaccgaggttcaaccaaggtggattatcacaacaagatccaaggaacgaaaggagaagttcttttccactaaataacaaccaaaggcaaccagcaggtggcggtgatcctaatcgagcaagcaagagttttgggatcttcagtagtactcagaaatctggatcatctgagcagaggaagttggatggtaatcctggtaataccgactcgcctaaaaggtttgggatttttagttctgggaaatgaggatggacaaagggctctacagaagaggactctgatatttttactttggcacgatggaccaaatcctacttgaaaggttcaacaaacctgcatacatggatgagtttttttggcggtgttttttgtaaggattcatggacgatttggcgtttgtttagcctcaacagatgtcttgttctgatgatggaaaagggatcccgtgatagcaacattctgagaaatattttctattgaggggctcttgttggcagggtaaattgctgccgttgtcaagttggaagtattatctggatttgaaatacagtacccctattattttgcgtagacaactgtcatgataatcatctgtacaaacaagcagaacccagtgatatattttttaaaataattatcctttgcttaggcttcaagaaaagcgcttaagcaaccaat

SEQ ID NO: 30151 - DNA, 422 bp, Zea Mays
ctttccactgagcattgcgaataaaaggcagcgtattatcatcgggcaattgaattcatcatcaaatacatactggttctagcaaaaaaaaacagataatttcacgaacgaacgcacctttcctcaacacggcccgaatcgcacagccaaggccaaacaaattattggataaaacccgcatgcagtatcgtctgacagcagggagcagcttcagcgccacccgttgcttcaccttgccgcctgaaaccacaacagcgccgtccctgaccagagcgttatccaccggccgatctgaatgtagcctgcctagcagttccgagtttctgcggcagggttgatcattgtttgatcaagtcgtcctttggccattatcagattcgggcagcattgcgagttccatgttggctaccttcatgtttgtg

SEQ ID NO: 30152 - DNA, 1656 bp, Zea Mays
agccgcagccgccgccgccgcctctctctcccttccctcttctctctgccctcacctctctcccccttccatcacctcgctagtaacaggtcaccgtgtgtgtgcgcgccatggggattcatctgccgccgcctgccctcgccttctgcctctcggcgcccactcggttctagtggccgcttcgaggaggcgctcgcgcgcatcgaggagctccaggagcgcgacactggcgccgacgatagcagcacagcctcgtcgttcttgagcgacggagaggcggcgtcgcggccagcaggcgagcagcagtcgcactccgcagatttcttgagcgacggagaggcggcgtccggtggcattcagagacgtgcgtgacggtcggaggtcgtcgagcgcgtctagatagcatccaagacaaatagcgttgttcgcgatctgaggcagctggtaggcagtctgggcttgggcgcacgcgagccagagagggagggctgggagcacgtcatctccaagagcagcgacgacgtctcctacaaggcctggtgcgacaagcccacggtagttgccaattgcgtacatgcattgcaacagatctgggctctagaagctgctaacttggtagcagaaagattgaggcattgcatagcaaaccactggatcaaagagtttagtgaatggccacagtgcatgttcttgagttgcaatcaaagttccttccatataataataacaaaatatttgacataatgaatctgttggaggatagacttcaacatgcaaatggagtcgttgttttggcaacaattaaagtttttctccattcccatgactgttgttcatcaacaggtacgcatgttactcctagagaggtggtctctggatcatgctgcattattgctattacttctcaaaagcatttctttcttgttttagaatatgagatttagtatatgagcaccttctgttgatgcataaaaacaaaatcttatttagattaagatcccataacggactagcacatgacatcacaacaacaacacacttggtccatagataatgttttatttggaggttaatttacttgaattttttttaattccatggactctttactctggtgggtactggcagtcctaaatagtcattggcccttttatgtgtaaaataacagcttcctggtgttgatcccaatgatccatctgttaaaggtctctgtattgtgatgcaatgaaattcatgttgcctctagactatagcattgttctgcttcaccgtaccttgactaaataagaataaatatattatatgtcaccaaatcttcacatgaactgctatcctgtattatctggtggaaatatgaaggtttctttatttctcttcttaaacagcaagagaagaaggaagacaagtcagacaaaacagaagacgagaagaactgatgtagccatgttcatgcttccactgttgaaatgcatattcaacatagcttgctcagctcctatctgttgtttcaacgttgatttaaaagaagagctggtagttgtgggctttcgaacaatagctggaatgatctagctagctatatgtaaatgatctagttgtgaatgatattataactgtgatgcttttgtgaatatataattgtggtgcttttgtgtt

SEQ ID NO: 30153 - DNA, 2953 bp, Zea Mays
gcgctttgtattaccctgcatatggcagcaaattaaaagctcgattacacgttttcttttctataggataagtatgacgttttccgccactaattattaaagttaaaccccatataatccgagtccttgccgctactcccaatccggcccagatcgacatctatcattaacacttggactagtagtagataggagtagctgcatctgcatctgcagactgaggagaagggggccctgccgccttaaaaccagtcaaacttgcacacactgacaccgaggaaccaacgaaccccgcgtcgcccttcgctcccaacccccggcgccatgccgcccgcctcccccctcctcttcgtcttcctcgccgccgccatcgtcgcctgcgccaccgcagcgacgtcgacgtcgacgtcgtcccaggcggacgcgctccaggccttcagggccgccctcaccgtcccgcccgaggccgctcccttcttcgccacgtggagcgccaccgcggcatccccctgcggcttcacgggcgtcaactgcaccggcggcaacgtcacggcgctctccctgccggcactcaagctgtccgccgcgacggtcccgttcgccgccctctgcgccgccctgccttccctcgccgcgctgtccctgccggagaactccctcgcggcgctgaagctgagcagcctgaacatgtccgacaaccacctcaccgggcccgttccggaggcgcttgcgatctcggcctacggcgagagcttcgacgggaaccccgggctgtgtgccaccaacggcgctgtcttcctccgccgctgcggtcggagctccgggagccggtcggcgaacgcggagcgcctggccgtgacgtgcatcctcgccgtcacggcggtgctgctggcgggggcgggcgtggccatgtgcctgcagaagcggcggcggcggcgcgcggaggcctccgcggggaagctgttcgccaagaagggctcgtgggacctcaagtcgttccggatcctggcgttcgacgagcgggagatcatcgagggcgtccgcgacgagaacctggtcggcagcggcgggtctgggaacgtgtaccgcgtgaagctcggcaacggcgcggtggtggccgtgaagcacgtcacgcggggggtggcgacgagcacggcgccgtccgccgccatgctgcggccggcggcgtcggtgcggtgccgcgagttcgactcggaggtggggacgctgagcgccatccggcacgtgaacgtggtgaagctgctgtgcagcatcaccagcgcggacggcgcggcgagcctgctggtgtacgagcacctccccaacggcagcctgtacgagcggctgcacggggcggcggggcggaagctgggcgcgctcgggtgggtggagcggcacgacgtggcggtgggcgcggcgaggggcctcgagtacctccaccacggctgcgaccgccccatcctccaccgcgacgtcaagtccagcaacatcctcctggacgagtcgttcaagccccggctcgccgacttcgggctcgccaagatcctcagctcggcaggcggcggcggcggccactcgtccgccggcgtcgtggccggcacgctggggtacatggcgccggagtacgcgtacacgtgcaaggtgacggagaagagcgacgtgtacagcttcggcgtggtgctgctggagctggtgacggggcggccggcggtggtggagagccgggacctggtggactgggtgtcgcggcggctggagagccgggagaaggtgatgtccctggtggacccgggcatcgtggaagggtgggccagggaggaggcagtccgcgtgctgcgcgtcgccgtgctgtgcaccagccgcacgccgtcgatgcggccgtccatgcgctccgtcgtgcagatgctggaggacgcggccgccgcgcgccaggacgacgacgggaaggtcctggaggtgaaggtggtctgagaccgaatggcggcgccttaggctttggccgtgcccggcgggcgccggcggtgacaggaggacggaaaggtcaccacggccagtggcagtgtcgcacgtgtaacagtaagattagtagattgttattttgcctgaataaccggccaagaaatcttcttcaccttctacagaaaggcatttttgtaagcacatgtcagtcaatggaggagtaggttgtttggcgtctatttccacggcagacagacccaacattctcttggactcctcctgaatcacgttcctgacaggaatgagcagcaaggaagtttcggaattggcttcaggcatcccggccggcgtgtggttgcgtaaagaataataacgcagtcgtcgtcgctgtcgcggccggggactgcgttcaccggcccgggaattcctgccggaacgaggccgtggtttaatacaaggcagagacaggcaggcatatgctcaataaaccaccaccgcccaagaggccaagacccaacgggtgtacagttgcaggaggtgtgcccgccggaagacccggggggattggccttatctgtctgcctgcctgcctttcggactccagcagagcaccaatgataaagccatcatcgtcagttcatcacacacactgacacacccacaaagacttcaggtgaactaggaacttttactttattcttagattcgatgtagaggttggcgttcaattcactttcaatactctgcatttttttctcaagcagactaaaacggaatgtatatttccaggcaaaaaaaaaacactgaatgtatccatgaaaataatgagtaagcgtggttgggacattgatatactttctatggaactacatatgcatctgtacctttttataataattaaaaagactataaatccacctacactttcatttcctctatggtatcttagacgtgttatgttggtcactcgttttttatacatgatggatataag

SEQ ID NO: 30154 - DNA, 1011 bp, Zea Mays
ttcccccatgaaatctggtcgccagctcatgaaccctgcctcacgggtatatagtcctcagccacacctcctcacccattcatttagaccaccgaatagagagggccaccattgacagaaagcaagagagagaaaggagagggagccgccacgctcggtgatcgcatccaccgacgtatggtgcttggggagaggtcgcgaaggttcgccagcgtgcgaaggtcacgtgtgatcattcgcttgggcacataagtcatcggagtccagggaatcgttcaccggagcgaaggagtccgccacggaccacgattctccgtggttagagcactgaacagcacaatcgtagcctcgtaggtaagaaaatctgaagttatgtgtttctattgaagccggagttaccttatatgttgcagttgctgctgatgtgggacctgctgatgaaaacaatagttttttgtgtgcacgatctaagaagagcatgtttttaaaaactttatataggtaagtttagggataaaaaataagtatactgttatttcctctggttgtgttggatatgcaagtttttttggcaatctataatgtgtgagaaacataaatatatttgcaaaacatggtcaattactgtatttggaggcttgctagctgtttggagttgaaactatattctgttgtgtggtctactttttacgataattgaccatacatattgtcttaaacaaatttggggggggaatctataaattgacaacatgcacaagataaacaatgagaagtggtaaaaaagtgaactaagtggtgcaccttgatccaacttcattattagctttctgtacaggagatgaataatctgtaaacataaagaaatgagttcatgctgattcactctgctgattcacagatgaagatcaataggacaaaaatataataatgatagatagaaccacctgaggcaccagtacaaaaatattatatgacggcaccagcgacccggccaccggccacattggc

SEQ ID NO: 30155 - DNA, 952 bp, Zea Mays
ttcccccatgaaatctggtcgccagctcatgaaccctgcctcacgggtatatagtcctcagccacacctcctcacccattcatttagaccaccgaatagagagggccaccattgacagaaagcaagagagagaaaggagagggagccgccacgctcggtgatcgcatccaccgacgtatggtgcttggggagaggtcgcgaaggttcgccagcgtgcgaaggtcacgtgtgatcattcgcttgggcacataagtcatcggagtccagggaatcgttcaccggagcgaaggagtccgccacggaccacgattctccgtggttagagcactgaacagcacaatcgtagcctcgtagttgctgctgatgtgggacctgctgatgaaaacaatagttttttgtgtgcacgatctaagaagagcatgtttttaaaaactttatataggtaagtttagggataaaaaataagtatactgttatttcctctggttgtgttggatatgcaagtttttttggcaatctataatgtgtgagaaacataaatatatttgcaaaacatggtcaattactgtatttggaggcttgctagctgtttggagttgaaactatattctgttgtgtggtctactttttacgataattgaccatacatattgtcttaaacaaatttggggggggaatctataaattgacaacatgcacaagataaacaatgagaagtggtaaaaaagtgaactaagtggtgcaccttgatccaacttcattattagctttctgtacaggagatgaataatctgtaaacataaagaaatgagttcatgctgattcactctgctgattcacagatgaagatcaataggacaaaaatataataatgatagatagaaccacctgaggcaccagtacaaaaatattatatgacggcaccagcgacccggccaccggccacattggc

SEQ ID NO: 30156 - DNA, 2908 bp, Zea Mays
ttcccccatgaaatctggtcgccagctcatgaaccctgcctcacgggtatatagtcctcagccacacctcctcacccattcatttagaccaccgaatagagagggccaccattgacagaaagcaagagagagaaaggagagggagccgccacgctcggtgatcgcatccaccgacgtatggtgcttggggagaggtcgcgaaggttcgccagcgtgcgaaggtcacgtgtgatcattcgcttgggcacataagtcatcggagtccagggaatcgttcaccggagcgaaggagtccgccacggaccacgattctccgtggttagagcactgaacagcacaatcgtagcctcgtagggtggcattgatggtatgtatatatactttcggtaagtaattatatgagctgacaggtagggagttaactgtacaaaagcttacctctttggaggggattcaagaggctcaaactttttacatatcagtgagagttttatgctgcttctataaaatgaaatgagtgagctattaaaaaatacaaatttcaaatcacaatactccacttttgaagaagatatgatcggatccatcacatttgccactttatttaccactttatcaggttgtttattcgtagttattattctattaatatggcaacatgaaaaatgcatgttatcaacagtgaatatagaactcctttatgatttcagcacgcaactttgatatttttatacaaaatagaaagcacatgtttcttctttttaattacaacaaggtaattattatagatagcgtcaatcggttgtgtgatgtggattcttcgtagcttcgaatgggctgacaatctaacaaaaacatcagctggacaagaaaagaaactctgagtttcaatagcttacgtggacgtcttgaaaccaaggttgatgttcttccagaacttgtttcttcccttgtcaggtgagtttcctttggtggccttcttagaactgaattccaaaacagcacacaagcctcacattaaaaaatgaatgagacaaaggcatgtgcgaaataagcgtcagaatacaaccatgaaaaaaatgtaggctgcttcaacaatgtttcgtggggctagagcggcggcgcacctatgcggtcgcttttcgatcaaacgacgaggagaaaatagcgcgaggtggatagcctcgtcgttgccgttttggacctgctttaatatataggaaataataataaagcagcaaggtgtattgatattgaactattagaatatatattacatttaagcataacgattgtacttgtgttggtcaggtaagaaaatctgaagttatgtgtttctattgaagccggagttaccttatatgttgcagttgctgctgatgtgggacctgctgatgaaaacaatagttttttgtgtgcacgatctaagaagagcatgtttttaaaaactttatatagacgagcaagtgattgaggaactcgaagcacagcaagcagaggaatctgagcaggagctcgcagaaggcaagttgtgtccttaatcacattcttcgacctaataattttcatgattttgataatcactgtggcactatcaggcttaatttgatgggacctaataggttatctagttttagttatccaacaccttgcatacaaatgaattattaggtagtcttgctatgctttatctgatttcgggtgttatattatatatgaatcatggtcatgccttattattattattattgttaattggattatttaggatacatgataatatcgttttgttaattggaacatggagcttaacatgagaaaacggtgctaccataagggtggaacaggacgtccttggccagttaattaggaaagctagtatgagttatcctttcccgaaaggggcaagcaggatgtggggagctgctagtatagggaggttctcgggtcgatctatctaagatagccttttcggcgtgggattcttatattgccccctcctgcgtgaatccgtagcgggttctctcttggtagtggaactttagaaaggccttgtagtgctaccctgccttgtctcctcggtagagatgaatgggattcgagaccccttggcgaaaatgggtaacacggcttgtgggtaaagatgtgctacccctgcagattgtaaaattggtatgtgagtcgtgctcacggtcatgagcggctcagaactctcgcattgtgggattaaaacttaacttgtcatgcattgcattgtgggattctattattcatctatgatctattatttagttggattggtatctacttatacttagtactctcttctatgtcctgttagttgtcgttttggacaaggtttcagtcaaacgtataaagttttgactacaaataactattttattatgtagttttgaaacataatgtttatatgcactgatttgtcttaacaagtccttttataaaagtataaatgtattaagagtttatttatatttaaaaaattggtctcagttatattttgaagactgtgtcgctgtcttaaacgacaactaatagtacactgagggagtaactgataataaaattttgtcaaccttttaaaaagtaatgctcagctttaacctttatccttggtaagctttatactacacatgagccccaccataagtgagctcatacacattattactcacacttgctgagtgatgaccgtatgagagcttacccttgctataatcacactagctaaagagcaggtaccaccaaaggatgactactaggatgagttcgacgagatctagatattgtctccaagtcaactatggcatcgtggagataattatcttagttcgagttattttattatcaattattttgtaagacattctcgtaatataataaagtt

SEQ ID NO: 30157 - DNA, 1804 bp, Zea Mays
ttcccccatgaaatctggtcgccagctcatgaaccctgcctcacgggtatatagtcctcagccacacctcctcacccattcatttagaccaccgaatagagagggccaccattgacagaaagcaagagagagaaaggagagggagccgccacgctcggtgatcgcatccaccgacgtatggtgcttggggagaggtcgcgaaggttcgccagcgtgcgaaggtcacgtgtgatcattcgcttgggcacataagtcatcggagtccagggaatcgttcaccggagcgaaggagtccgccacggaccacgattctccgtggttagagcactgaacagcacaatcgtagcctcgtagacgagcaagtgattgaggaactcgaagcacagcaagcagaggaatctgagcaggagctcgcagaaggcaagttgtgtccttaatcacattcttcgacctaataattttcatgattttgataatcactgtggcactatcaggcttaatttgatgggacctaataggttatctagttttagttatccaacaccttgcatacaaatgaattattaggtagtcttgctatgctttatctgatttcgggtgttatattatatatgaatcatggtcatgccttattattattattattgttaattggattatttaggatacatgataatatcgttttgttaattggaacatggagcttaacatgagaaaacggtgctaccataagggtggaacaggacgtccttggccagttaattaggaaagctagtatgagttatcctttcccgaaaggggcaagcaggatgtggggagctgctagtatagggaggttctcgggtcgatctatctaagatagccttttcggcgtgggattcttatattgccccctcctgcgtgaatccgtagcgggttctctcttggtagtggaactttagaaaggccttgtagtgctaccctgccttgtctcctcggtagagatgaatgggattcgagaccccttggcgaaaatgggtaacacggcttgtgggtaaagatgtgctacccctgcagattgtaaaattggtatgtgagtcgtgctcacggtcatgagcggctcagaactctcgcattgtgggattaaaacttaacttgtcatgcattgcattgtgggattctattattcatctatgatctattatttagttggattggtatctacttatacttagtactctcttctatgtcctgttagttgtcgttttggacaaggtttcagtcaaacgtataaagttttgactacaaataactattttattatgtagttttgaaacataatgtttatatgcactgatttgtcttaacaagtccttttataaaagtataaatgtattaagagtttatttatatttaaaaaattggtctcagttatattttgaagactgtgtcgctgtcttaaacgacaactaatagtacactgagggagtaactgataataaaattttgtcaaccttttaaaaagtaatgctcagctttaacctttatccttggtaagctttatactacacatgagccccaccataagtgagctcatacacattattactcacacttgctgagtgatgaccgtatgagagcttacccttgctataatcacactagctaaagagcaggtaccaccaaaggatgactactaggatgagttcgacgagatctagatattgtctccaagtcaactatggcatcgtggagataattatcttagttcgagttattttattatcaattattttgtaagacattctcgtaatataataaagtt

SEQ ID NO: 30158 - DNA, 4244 bp, Zea Mays
ttcccccatgaaatctggtcgccagctcatgaaccctgcctcacgggtatatagtcctcagccacacctcctcacccattcatttagaccaccgaatagagagggccaccattgacagaaagcaagagagagaaaggagagggagccgccacgctcggtgatcgcatccaccgacgtatggtgcttggggagaggtcgcgaaggttcgccagcgtgcgaaggtcacgtgtgatcattcgcttgggcacataagtcatcggagtccagggaatcgttcaccggagcgaaggagtccgccacggaccacgattctccgtggttagagcactgaacagcacaatcgtagcctcgtaggtgagaaccccctgccttcgccatgtccttccttacatatatcacacctcagattagaatttggggatctgttgcgtggagtagccggatttcggccatccctccaccgcggaggcaggcgacgccgtcgcgctcatgctcaggcctcagggtgacgatgacgaacccgtcgccgtttgacgtgacttgtgtggccgaggttagaagccacgtacccctttgcttcgatcgactcctggccatggatcctcgatcgagcgggtgtggtggaatctggccataattaaatcgagaccatagcttttggatcttgcggccactggtgcataccggttcggtgtgaaggtgaatctaatcctagccgtgcacgagagattggatggcttagaattcctcaaaccccttcggccgcgtgcatattgcataatagaccctcaagtatttcgaaataaacccaccatcccctcaggtgtaaagataattgcatgtaggtcctaacttttatgaaacagacccaaactttcaagaaaatagtacccgcagtatatatactagtgtttgacgcgcacccaccgcgcgttatttttattttttatatatttttttgtggtcatacaaatttttatgtgtatataaagaaaatatgttatacatgaaggtacatgtataatgtaacattaatattccctttttatgccaacaaagggaaggtttaaatattaatactggttcgatattgttcattatcgaaaaatatatagactgtataaatattaatactagttcgatactattcgttatcaaaaaatatatatattatattaatcagttatcttcaattagtaggtagcattatctaagggctagcagctaattgtatatgcatgtatcgaatctagaaataaaaacgatgacatacataatcttcatgccatatttaagtaggtcattgtctaaaataaataaataaatataagttgcagcacatcagctgcatttagtagaacgtctgaagggttatctatgcatccattgtatttggtattttggttacaaaatggtaagattgatagcaaaagctgacactgccggtaagggctatttttatgggtttcatgtggttgcatctatcattcatggggtactttggtccgtagaatccttttgatcctgtgaaacaatagatacaatttatataattttaaaagcacatgtacaaacaaatagtgtttgtaatgttatacatatgcatcgaaagtagtttttttgtaaacggtggtattaacagtatgtgtatatacttttggtaagtaattaaggaagtatttttatgcagggtggcattgatggtatgtatatatactttcggtaagtaattatatgagctgacaggtagggagttaactgtacaaaagcttacctctttggaggggattcaagaggctcaaactttttacatatcagtgagagttttatgctgcttctataaaatgaaatgagtgagctattaaaaaatacaaatttcaaatcacaatactccacttttgaagaagatatgatcggatccatcacatttgccactttatttaccactttatcaggttgtttattcgtagttattattctattaatatggcaacatgaaaaatgcatgttatcaacagtgaatatagaactcctttatgatttcagcacgcaactttgatatttttatacaaaatagaaagcacatgtttcttctttttaattacaacaaggtaattattatagatagcgtcaatcggttgtgtgatgtggattcttcgtagcttcgaatgggctgacaatctaacaaaaacatcagctggacaagaaaagaaactctgagtttcaatagcttacgtggacgtcttgaaaccaaggttgatgttcttccagaacttgtttcttcccttgtcaggtgagtttcctttggtggccttcttagaactgaattccaaaacagcacacaagcctcacattaaaaaatgaatgagacaaaggcatgtgcgaaataagcgtcagaatacaaccatgaaaaaaatgtaggctgcttcaacaatgtttcgtggggctagagcggcggcgcacctatgcggtcgcttttcgatcaaacgacgaggagaaaatagcgcgaggtggatagcctcgtcgttgccgttttggacctgctttaatatataggaaataataataaagcagcaaggtgtattgatattgaactattagaatatatattacatttaagcataacgattgtacttgtgttggtcaggtaagaaaatctgaagttatgtgtttctattgaagccggagttaccttatatgttgcagttgctgctgatgtgggacctgctgatgaaaacaatagttttttgtgtgcacgatctaagaagagcatgtttttaaaaactttatatagacgagcaagtgattgaggaactcgaagcacagcaagcagaggaatctgagcaggagctcgcagaaggcaagttgtgtccttaatcacattcttcgacctaataattttcatgattttgataatcactgtggcactatcaggcttaatttgatgggacctaataggttatctagttttagttatccaacaccttgcatacaaatgaattattaggtagtcttgctatgctttatctgatttcgggtgttatattatatatgaatcatggtcatgccttattattattattattgttaattggattatttaggatacatgataatatcgttttgttaattggaacatggagcttaacatgagaaaacggtgctaccataagggtggaacaggacgtccttggccagttaattaggaaagctagtatgagttatcctttcccgaaaggggcaagcaggatgtggggagctgctagtatagggaggttctcgggtcgatctatctaagatagccttttcggcgtgggattcttatattgccccctcctgcgtgaatccgtagcgggttctctcttggtagtggaactttagaaaggccttgtagtgctaccctgccttgtctcctcggtagagatgaatgggattcgagaccccttggcgaaaatgggtaacacggcttgtgggtaaagatgtgctacccctgcagattgtaaaattggtatgtgagtcgtgctcacggtcatgagcggctcagaactctcgcattgtgggattaaaacttaacttgtcatgcattgcattgtgggattctattattcatctatgatctattatttagttggattggtatctacttatacttagtactctcttctatgtcctgttagttgtcgttttggacaaggtttcagtcaaacgtataaagttttgactacaaataactattttattatgtagttttgaaacataatgtttatatgcactgatttgtcttaacaagtccttttataaaagtataaatgtattaagagtttatttatatttaaaaaattggtctcagttatattttgaagactgtgtcgctgtcttaaacgacaactaatagtacactgagggagtaactgataataaaattttgtcaaccttttaaaaagtaatgctcagctttaacctttatccttggtaagctttatactacacatgagccccaccataagtgagctcatacacattattactcacacttgctgagtgatgaccgtatgagagcttacccttgctataatcacactagctaaagagcaggtaccaccaaaggatgactactaggatgagttcgacgagatctagatattgtctccaagtcaactatggcatcgtggagataattatcttagttcgagttattttattatcaattattttgtaagacattctcgtaatataataaagtt

SEQ ID NO: 30159 - DNA, 2048 bp, Zea Mays
ctcctgcctgcctgcctagtgcttccctgagagccgggacctttccagcgccccctgcctgcgatctgcgttgtcgtctctcttgtcggcgcccgccccgcggagaagacgaagacgaccctcttctttcttgaattgaagcagaacctgcagctcctcccatggtacggttccacgatcccttcccactctgctcttttctcccgctgctgtggctgtggagctgcgtcgtctttatacgtttcttgccgcgtcgtcaacgaatccaggattcctcctccctttccctgcgcgacgaaaactgtttctatctatctatttatttatttatttattccttcacaaagaaaaccgctgctctgctctgctgccaccatccttttgattccacggcctcggtcgactcaccaattcccatacgtattctcgtctgaaacaaaaggaaagagcgaaagaaaaaaaaatcttcccttaatttcagctgatcggcatggcgcagggagcagcaacagccgtagacggcagcggcagcggcagcaccgcccgtccgccggcggcgctgcccggcctgaagctcctccgtcgtctcctcctcgtggcggtggtgggcacgggtttcctggcagtcgtggtactgctctcctcctcatggcgatactcgtcatccatgctccctcgggtccccgcgccggacgtccggctgcccgcgccggcgggcggcgggaaggtgccgctggagcggtgggcgcgggggtccgcgtccgcgtggcacaacctgaccgacgaggagctgctgtgggcggcgtcgtggcggcccggcgtccggcgctacccgtaccgccggacgcccaaggtggccttcatgttcctcacccgcggcccgctgccgctggcgccgctctgggacaggttcttcaccggcgccggggacgcgcgcctcttctccgtgtacgtgcacgccaccccggggtaccgccccggcttcccgccggcgtccgccttctaccgccgcctcgtgcccagccaggtggctcggtggggcgaggcgagcatgtgcgacgcggagcggcggctgctggcgaacgcgctgctggacccggcgaacgagcgcttcgtgctgctctccgagtcgtgcgtgccgctctacggcttcccggcggtgtacagctacctgacgcggtcgcgggagagcttcgtgggcgcgttcgacgacccaggcccgcacggccggggccggtaccgcgccgggctgggccccgaggtgaccgccgggcaattccgcaagggcgcgcagtggttcgagctggaccgcgacctcgccgtcggcgtcgtcgccgacggccgctactaccccaagttccgggaccactgccggccgccgtgctacgtggacgagcactacctgcccacggtgctgtccatcgaggcccccgcgcggatcgccaaccggagcgtcacgtgggtggactggtccccgcgggcggcgcgcaccccggccacgttcggggggaggaggacgtgcacgaggcgttcctcagacgggctcacggcgcccgggaaggaccagggcaactgcacctacaacggccagccggcggaggtgtgcttcctgttcgccaggaagttcgcgcccagcacgctgcgcccgctgctcagcctcgcacccaagttgctcggatacggctgacactgctctgctctgctctcaacctgaaatctgaatcttctccagtgattgataattgattggtataaatatgtactctagactggacgatcgtcatccatcatcgatgtatagatgtagcgaaacatcatttttgggctcaactggtgttaacaccgatagcagcaaagaggagaagagacacgggaaactggacagccggaagaacgaacgaatgttattcagtaaactgttgtcccacaaacgaacggaacacaactatttagactacctctagcaagcttactcattttattttatcttctattttaatctgcgaccagtataatttacagtgtaaaacagtgttttgtgtaatcat

SEQ ID NO: 30160 - DNA, 1717 bp, Zea Mays
gttgtcgtctctcttgtcggcgcccgccccgcggagaagacgaagacgaccctcttctttcttgaattgaagcagaacctgcagctcctcccatgggagcagcaacagccgtagacggcagcggcagcggcagcaccgcccgtccgccggcggcgctgcccggcctgaagctcctccgtcgtctcctcctcgtggcggtggtgggcacgggtttcctggcagtcgtggtactgctctcctcctcatggcgatactcgtcatccatgctccctcgggtccccgcgccggacgtccggctgcccgcgccggcgggcggcgggaaggtgccgctggagcggtgggcgcgggggtccgcgtccgcgtggcacaacctgaccgacgaggagctgctgtgggcggcgtcgtggcggcccggcgtccggcgctacccgtaccgccggacgcccaaggtggccttcatgttcctcacccgcggcccgctgccgctggcgccgctctgggacaggttcttcaccggcgccggggacgcgcgcctcttctccgtgtacgtgcacgccaccccggggtaccgccccggcttcccgccggcgtccgccttctaccgccgcctcgtgcccagccaggtggctcggtggggcgaggcgagcatgtgcgacgcggagcggcggctgctggcgaacgcgctgctggacccggcgaacgagcgcttcgtgctgctctccgagtcgtgcgtgccgctctacggcttcccggcggtgtacagctacctgacgcggtcgcgggagagcttcgtgggcgcgttcgacgacccaggcccgcacggccggggccggtaccgcgccgggctgggccccgaggtgaccgccgggcaattccgcaagggcgcgcagtggttcgagctggaccgcgacctcgccgtcggcgtcgtcgccgacggccgctactaccccaagttccgggaccactgccggccgccgtgctacgtggacgagcactacctgcccacggtgctgtccatcgaggcccccgcgcggatcgccaaccggagcgtcacgtgggtggactggtccccgcgggcggcgcgcaccccggccacgttcggggggaggaggacgtgcacgaggcgttcctcagacgggctcacggcgcccgggaaggaccagggcaactgcacctacaacggccagccggcggaggtgtgcttcctgttcgccaggaagttcgcgcccagcacgctgcgcccgctgctcagcctcgcacccaagttgctcggatacggctgacactgctctgctctgctctcaacctgaaatctgaatcttctccagtgattgataattgattggtataaatatgtactctagactggacgatcgtcatccatcatcgatgtatagatgtagcgaaacatcatttttgggctcaactggtgttaacaccgatagcagcaaagaggagaagagacacgggaaactggacagccggaagaacgaacgaatgttattcagtaaactgttgtcccacaaacgaacggaacacaactatttagactacctctagcaagcttactcattttattttatcttctattttaaattttactatgttaacagcgtagtttactgtataaaattgtgttttgtgtttatcttctattttcaattttactctgcgaccagtataatttacagtgtaaaacagtgttttgtgtaatcat

SEQ ID NO: 30161 - DNA, 305 bp, Zea Mays
ggaatagcgatgtgtagcgtagcacctctctctgactgtcatcctgctgctggccagaagcacacagcagcaggttttcatggcaggctccttggatggctgatctgatgatcatcagagcatcgtgtcactactcaacatcaggcaggcaggcaatgtgacagcgccatttttggcgttttagaacctggctctgagtaagtgccatttcagcttcagctcataacgtcagacggtcctttgtgctggcggcgccgctgccttcgtcgacgccgcgcttgccgtagcaatgaaagaagacccag

SEQ ID NO: 30162 - DNA, 2662 bp, Zea Mays
atggcgatagtcggtgggaggcttgtgggacctcgtcctcggttttggtggacggaagctcatcgccttgcgcggattaagcgttcggcaatccgtctggaggaggaccaggcggcaaggaagctgttttcaaggaggtgcgaggatttttttcgccggactgttgggcgccatgcgttgcctaaggtacgtactcaaaaacttgctgctgtgatcaatccctgggaaggttccttgctgaagcaaagttcgtcaccggtcgttactctcggccatgtgatggcttcagcaaagaaggctgctgctcgacgcatttgctcgccgacgttgaggaaggaagtcagccatttcgatctgattcctctatgccgttcaaattcaaatatctctccagttcatttggaaaggaaacagtatgtgccgctaattccgccatgtgtgctggacgactttactgagggatcacgttcgcgtgttgtgtaccagccttcttactctgtgggccagacaccagcgcaagaattgagcccgcagaaggaaacgggttcgcagtgttttctggcgtcagccactctctgctgggccagccgtaatcctggccttcatttactccgtcagaaagtttttagtacgccaaaacctgggaaccctgttctctcgccattctatcaccagccgccatttcctgttctcaaaacgtacgccgacgtcctcaagtcggccatcaactctagtgacatggctaaggaggaaactgatcctgagggctggagagtgatggatcgccgacgccagcagaccgagccggcttgtaaacaggttgcagacgttacatccggcgttgctgacaaggggaagaaacgacgggatgaactttgttgtgaaatttgcgaagacaatcatgtccccgaggagtgcccggtgtttaacggaccgaagccgcaggcagctctatgtggttttgcaggtggtgagtctggtttcttccagattcatacttgggggtgcaaagggtgttattccaaggtcggatggtgtaactgcattcataaccgtgaaggaagggttgagcttcaacgcatgatagctatgaagtatgttcatacactgggtggagaaggtattttagttattcaggaggttaaccaaaaaatagaaccaatttcttatctgcagaaagcttgggtgaatgtttatggggttccttttgagatccgctcctttcttcctttgtgggcagtaggatctattttgggtgcaacacagaaagtggatatgcgatacactcggaaaatgggggtggtccgtattttggtggcagtgacggatgtgaatcatattccggagtctgcagaaataatagttggtgaagggctttacgagatcttcttcaaagttgataaggttctcaaagatgggagatggattgacaaggataacatggattatcgggacggagatgataaggaacaaggagagaatgaagattattctgaaaagcatggaaatgattcttttccaatggaggaggtagcagaagacacggtcatgcgggataattccttacagagtgatcataataagccaaacgatggagctttagtcatggggatggtggttctgcaagggaatcagaacaattatggctcaacgataggaacaggtgttgagtctgaagattcgactttcaatgagccgacaactttgatgccaacttcctcctcttgttctgctcagtatgctctgctagtacctaagtctgccgaagcactcgttctggaaccaaaaattggccttaccgatctctcacctggtgatcttgatcagacaccagaaaatgttggcgaggatgcgaatcttagcagcctttacgatctggttccaagctgttcgatacttgctggtatgacggatggtgctggcgggctgaatttggctgatgacagtttgcagacccaggctgcatcaaagccacttagtggtggtggtgctggtttggctttaattgatgccagtaataattcccaggtggacaacgagttgatcgacgaactaattatgtctactgatacacaggagagagccattcacctgggagatgttaattcctttgctgaggtacctcgctctgtcctccaggaagcaattatgtctaattctcttgctaagagggtaaagaccgaaaagcttagtcaaggggattccagaataagcgtcaagaggactaatacggatgaagatatattgacaaaagcacagcgcttgggagcaaaacgtaatctggaaaccagtcattttcagaggtactcattggttaaggttctggagacttctacagaagaaggaaacacatcaacaaattcttgatgtgtgtcaagccttggaagtggtggcgatggaagtctttgcgaatcatggatggcgatcaaatgcaagacttgagtgtggctagtgttatacatagtcacgatatttagttctatcaagttagctttattattcaagcacatgttcattgagttaataattgacgtgtaatggctgtacacatttgatgcaaaagccggaactctttgtttccaaaaaaaaagctaagtggccagtagctccaataaaatgttgtagaggaggctgaatccgcacaggtgttttgtgggttgaa

SEQ ID NO: 30163 - DNA, 1199 bp, Zea Mays
ctccccatgtgctcgcccaggccacgacgtcgtccatgccgttcggtgcgctctaggtgttcgacgaaatagaaccaaggaactgtcgccgttcttgcatatatcgagtcgattcgattatggtacgctaatgatcgtgcgagatgaagggcatggaccgacgatatcttagtgactatgtcgacagaagatgaatgtattgaccgtaccaggattttggatgttcgccaaccagatgtctctaacaacactaacgtagtgtttatcctaggcaagcccccgtgcattcacctctttccttgatgtttacaaaaatttataaccttgaatgatgcattatgtgataggagttgtgtgatcaaacagttgatgcatttccatccttgattaaacaaccctaatacctgttttatgaaaatttagtgatgcttagccctgcttattaatttaggatggttttttaaagatgatgtgtaacacgggatatgggagtttgtgaaataaaaggacttgtgatgatgaacccattgtagccgcaatgatttcatcattcaagtagggtgtctctctcaggtatcaagttttgggaaataatatgtaatgtagactagacgttgagcaggaaagttcgcccatctgcgttgattaaggactgatcgatgtaggcctgttgttgtggagactttgcaactagccacatgctccggtaagcctgaactcggctattccatatgtgaaaagacaaccacgcactgagcatgggagatggtgggagtagcgtgtaccctcctggctagaggctggacagaggagtactatgctcccaggtagcgtggaccggttcatgttgtggaggatctgtgggaacggttgacatatgcatgggttaagtgctacaaatgtcgtgtggttaggaatccccagctaggaataatcgatttgaatcgtcgttgctcctcagtcatggagactctaccctctgaccactcatcgtagttaataagtaaaataagaatttggtaaaagaaagctagactaggacaagtgaatgctctagattaggcaaatatagattctggaaaagtacttaacttgtgaagtaaaattttggcatagggatccactaatagtaagcctttttacaaatcgagttttggaatcttgataagctttaccttgattcccaaaatccagcatat

SEQ ID NO: 30164 - DNA, 1248 bp, Zea Mays
gtcaactccggctgtgcgccgtcggccatgcctccccatgccgacgttgctccccatgtgctcgcccaggccacaacgtcgtccatgccattcggtgcgctctaggtgttcgacgaaatagaaccaaggaactgtcgccgttcttacatatatcaagtcgattcgattatggtacgctaatgatcgtgcgagatgaagggcatggaccgacgatatcttagtgactatgtcgacagaagatgaatgtattgaccgtaccaggattttggatgttcgccaaccagatgtctctaacaacactaacgtagtgtttatcctaggcaagcccccgtgcattcacctctttccttgatgtttacaaaaatttataaccttgaatgatgcattatgtgataggagttgtgtgatcaaacagttgatgcatttccatccttgattaaacaaccctaatacctgttttatgaaaatttagtgatgcttagccctgcttattaatttaggatggttttttaaagatgatgtgtaacacgggatatgggagtttgtgaaataaaaggacttgtgatgatgaacccattgtagccgcaatgatttcatcattcaagtagggtgtctctctcaggtatcaagttttgggaaataatatgtaatgtagactagacgttgagcaggaaagttcgcccatctgcgttgattaaggactgatcgatgtaggcctgttgttgtggagactttgcaactagccacatgctccggtaagcctgaactcggctattccatatgtgaaaagacaaccacgcactgagcatgggagatggtgggagtagcgtgtaccctcctggctagaggctggacagaggagtactatgctcccaggtagcgtggaccggttcatgttgtggaggatctgtgggaacggttgacatatgcatgggttaagtgctacaaatgtcgtgtggttaggaatccccagctaggaataatcgatttgaatcgtcgttgctcctcagtcatggagactctaccctctgaccactcatcgtagttaataagtaaaataagaatttggtaaaagaaagctagactaggacaagtgaatgctctagattaggcaaatatagattctggaaaagtacttaacttgtgaagtaaaattttggcatagggatccactaatagtaagcctttttacaaatcgagttttggaatcttgataagctttaccttgattcccaaaatccagcatat

SEQ ID NO: 30165 - DNA, 1167 bp, Zea Mays
gtcaactccggctgtgcgccgtcggccatgcctccccatgccgacgttgctccccatgtgctcgcccaggccacaacgtcgtccatgccagtacgctaatgatcgtgcgagatgaagggcatggaccgacgatatcttagtgactatgtcgacagaagatgaatgtattgaccgtaccaggattttggatgttcgccaaccagatgtctctaacaacactaacgtagtgtttatcctaggcaagcccccgtgcattcacctctttccttgatgtttacaaaaatttataaccttgaatgatgcattatgtgataggagttgtgtgatcaaacagttgatgcatttccatccttgattaaacaaccctaatacctgttttatgaaaatttagtgatgcttagccctgcttattaatttaggatggttttttaaagatgatgtgtaacacgggatatgggagtttgtgaaataaaaggacttgtgatgatgaacccattgtagccgcaatgatttcatcattcaagtagggtgtctctctcaggtatcaagttttgggaaataatatgtaatgtagactagacgttgagcaggaaagttcgcccatctgcgttgattaaggactgatcgatgtaggcctgttgttgtggagactttgcaactagccacatgctccggtaagcctgaactcggctattccatatgtgaaaagacaaccacgcactgagcatgggagatggtgggagtagcgtgtaccctcctggctagaggctggacagaggagtactatgctcccaggtagcgtggaccggttcatgttgtggaggatctgtgggaacggttgacatatgcatgggttaagtgctacaaatgtcgtgtggttaggaatccccagctaggaataatcgatttgaatcgtcgttgctcctcagtcatggagactctaccctctgaccactcatcgtagttaataagtaaaataagaatttggtaaaagaaagctagactaggacaagtgaatgctctagattaggcaaatatagattctggaaaagtacttaacttgtgaagtaaaattttggcatagggatccactaatagtaagcctttttacaaatcgagttttggaatcttgataagctttaccttgattcccaaaatccagcatat

SEQ ID NO: 30166 - DNA, 2490 bp, Zea Mays
tcgtctcgtgcatatccagttccgatcccactctaccttctacgcagtgtggacgccagaccccgtcactgtcagtcgtcctcttccactctagtattaccggtagatcgacaaagatttcagcctccgttttcgacgccatcagagcaggctccacagatgaagatgctgcggcggctcatgctgagcctgagcttcatcctcctcctcccttcctatctcgcctacccactatgcaccgatgggcgccggtgctgctcaacaccacgctcaagttttgcgcctcccccagcaggaacagcagaggctgctgcgacgccaccgctgatgccgcgctcagcaagcagttcgacgccatggccatctccgacgctgcctgcgctgccgtcgtcaagtcaatcctctgcgctaaatgcagtccatattccgcggacctgttcggcgcggggccaaagatccggacggttccttccctctgcaactccacgtcgtcggcaaactctgctgagtccaaggaaaccaccaccaccaccactcaggactactgcaaactcgtctgggatacttgcaaggacgtgagcatcgccagctctcccttccaacccccgctgcaaggcaccgcgccgcctcctacttcaccgtcgaagctcaccgacgcgtggcagtcccagagcgacttctgcggctccttcggcggccggtcgtctgtatgcctcagcggcgacacggtctcgttcaacgccgccggaccttcaccctccccaagaccagaaccaagaggggtatgcctggagaggatcgacaacgggtcctaccttagcctggctcctcaccccgacggctccagcaggatcttcctcggcagccaagccgggaagatatggctggccaccgtccccgagcaagggtccgggggcgcgctgcagttcgagggcgcaggcccatttgtcgacctgaccgaccaggtgcacttcgactcggcgttggggctcatgggcatggcgttccacccgggtttcgcgaccaacggccgcttcttcgcctcgtacaactgtgaccggaccaagtcgcccagctgcaccgggaggtgctcctgcaactccgacgtgggctgcgacccttccaagcttggcaccgacagcggcgcccagccgtgccagtaccaggtcgtggtgtcagagtactcagccagaggctccgccgcggcgaatgtttctcaggcaacttctgccgccgatccatctgaggtgaggagaatcttcgcgatggggctgccttacacgtccgggcatggaggccaggtactgttcggccctgccgatgggtacctctacctcatgctgggcgacggagggaagggggaccctttcaacttcgcccagaacaagaagtcgctcctgggcaagatcgtgaggcttgatgtcgacagcacgccttcttcatcaggaggagatctcggcaacacgagtctgtggggcaattactccatcccgaaggacaacccttacgccgatgacagcgagctagagccagagatctgggcgctgggccttagaaacccgtggaggtgcagctttgactccgagaggccctcctacttctactgtggagatgttgggcaggacgcgtacgaggaggtggatctcatctccaaaggcgggaactatggatggcgtgcgctggagggtccgctcgtctatcacccgcagtgggcgcctggaggaaacacctcgctcagctccattgacgccattcctcccatcatgggatacagccattcagatgtcaacaagaatatcgggtcggcgtcgatcatgggaggttacgtgtacagagggtccgctgatccctgcctgtatggaaggtatttgtatgctgacctgtacgcctcggccatgtggaccggcgcggaggctccagagagcagtggcaactacacctccgctctgatccccttcagctgctccaaggagtctccgataccatgcgacgccgctgctgggagccctctcccgtcgcttggctacgtatactcgttcggcgaggacaacagcaaggacatgtatgtgttggccagcaaaggcgtctaccgagttgtgaggcccagcctctgcagctatacttgcccggcagagagacaggagacatcgccgcctgctgctccttcatccaacaaggcgtccatggcggagatgggaatgggaatgcttttggtgtctgtcattgtggtttgggttttggtaacataggatcatgctgtgatgagacatgtcatatgcaacgaccagtcctgaggaagaataagagtgccagtcagtcagtgagattagaatagaagtgataggcagtcagttaggctgtctccaataaattgtgtatatgatcatgtaaaatattattttatattatagactgtattgttcacagaacgaagtttgaaatacttctgagatgggtcatatgatgggtaagctgctagacagccttagg

SEQ ID NO: 30167 - DNA, 2486 bp, Zea Mays
tcgtctcgtgcatatccagttccgatcccactctaccttctacgcagtgtggacgccagaccccgtcactgtcagtcgtcctcttccactctagtattaccggtagatcgacaaagatttcagcctccgttttcgacgccatcagagcaggctccacagatgaagatgctgcggcggctcatgctgagcctgagcttcatcctcctcctcccttcctatctcgcctacccactatgcaccgatgcaagggcgccggtgctgctcaacaccacgctcaagttttgcgcctcccccagcaggaacagcagaggctgctgcgacgccaccgctgatgccgcgctcagcaagcagttcgacgccatggccatctccgacgctgcctgcgctgccgtcgtcaagtcaatcctctgcgcttccatattccgcggacctgttcggcgcggggccaaagatccggacggttccttccctctgcaactccacgtcgtcggcaaactctgctgagtccaaggaaaccaccaccaccaccactcaggactactgcaaactcgtctgggatacttgcaaggacgtgagcatcgccagctctcccttccaacccccgctgcaaggcaccgcgccgcctcctacttcaccgtcgaagctcaccgacgcgtggcagtcccagagcgacttctgcggctccttcggcggccggtcgtctgtatgcctcagcggcgacacggtctcgttcaacgccgccggaccttcaccctccccaagaccagaaccaagaggggtatgcctggagaggatcgacaacgggtcctaccttagcctggctcctcaccccgacggctccagcaggatcttcctcggcagccaagccgggaagatatggctggccaccgtccccgagcaagggtccgggggcgcgctgcagttcgagggcgcaggcccatttgtcgacctgaccgaccaggtgcacttcgactcggcgttggggctcatgggcatggcgttccacccgggtttcgcgaccaacggccgcttcttcgcctcgtacaactgtgaccggaccaagtcgcccagctgcaccgggaggtgctcctgcaactccgacgtgggctgcgacccttccaagcttggcaccgacagcggcgcccagccgtgccagtaccaggtcgtggtgtcagagtactcagccagaggctccgccgcggcgaatgtttctcaggcaacttctgccgccgatccatctgaggtgaggagaatcttcgcgatggggctgccttacacgtccgggcatggaggccaggtactgttcggccctgccgatgggtacctctacctcatgctgggcgacggagggaagggggaccctttcaacttcgcccagaacaagaagtcgctcctgggcaagatcgtgaggcttgatgtcgacagcacgccttcttcatcaggaggagatctcggcaacacgagtctgtggggcaattactccatcccgaaggacaacccttacgccgatgacagcgagctagagccagagatctgggcgctgggccttagaaacccgtggaggtgcagctttgactccgagaggccctcctacttctactgtggagatgttgggcaggacgcgtacgaggaggtggatctcatctccaaaggcgggaactatggatggcgtgcgctggagggtccgctcgtctatcacccgcagtgggcgcctggaggaaacacctcgctcagctccattgacgccattcctcccatcatgggatacagccattcagatgtcaacaagaatatcgggtcggcgtcgatcatgggaggttacgtgtacagagggtccgctgatccctgcctgtatggaaggtatttgtatgctgacctgtacgcctcggccatgtggaccggcgcggaggctccagagagcagtggcaactacacctccgctctgatccccttcagctgctccaaggagtctccgataccatgcgacgccgctgctgggagccctctcccgtcgcttggctacgtatactcgttcggcgaggacaacagcaaggacatgtatgtgttggccagcaaaggcgtctaccgagttgtgaggcccagcctctgcagctatacttgcccggcagagagacaggagacatcgccgcctgctgctccttcatccaacaaggcgtccatggcggagatgggaatgggaatgcttttggtgtctgtcattgtggtttgggttttggtaacataggatcatgctgtgatgagacatgtcatatgcaacgaccagtcctgaggaagaataagagtgccagtcagtcagtgagattagaatagaagtgataggcagtcagttaggctgtctccaataaattgtgtatatgatcatgtaaaatattattttatattatagactgtattgttcacagaacgaagtttgaaatacttctgagatgggtcatatgatgggtaagctgctagacagccttagg

SEQ ID NO: 30168 - DNA, 504 bp, Zea Mays
tcgtcgaccacttttgttctacgtcgccaggtgcactagttatgcacgtgatgcggaagacgagccaagttgaccccaagatgacgtaatgggtggactactccgcatggtgatgctgatggacgaatttaaggacggatgacctgatcaagtgccaggacaaggatgatcatcaagagatcgtcgtcttacccacactaacgcagtgttattccaagcaagccccggtgtatttacccttttccttgctatttcaaactctttatcacttggaatgatgcattaggtgataggagttgggtgataaacaattgttgcatttccttccttggaactgtttaccattccttgatacctgttttacttaaaagttttctgatgcttagtcttgccttagaaaacaaaatggtttgttttaaacaaatatgatgcttcatgtgggatgggaacttttcaaaagaaaagacttgatggtgaatccatcatggccatggtgggttcaac

SEQ ID NO: 30169 - DNA, 500 bp, Zea Mays
cgccaggtccgtgtttcagatagcaggtgcactagttatgcacgtgatgcggaagacgagccaagttgaccccaagatgacgtaatgggtggactactccgcatggtgatgctgatggacgaatttaaggacggatgacctgatcaagtgccaggacaaggatgatcatcaagagatcgtcgtcttacccacactaacgcagtgttattccaagcaagccccggtgtatttacccttttccttgctatttcaaactctttatcacttggaatgatgcattaggtgataggagttgggtgataaacaattgttgcatttccttccttggaactgtttaccattccttgatacctgttttacttaaaagttttctgatgcttagtcttgccttagaaaacaaaatggtttgttttaaacaaatatgatgcttcatgtgggatgggaacttttcaaaagaaaagacttgatggtgaatccatcatggccatggtgggttcaac

SEQ ID NO: 30170 - DNA, 1116 bp, Zea Mays
gtgatgtttgatgaagtcgatgatttgctctgatagtcattatattctatatttagtaatagattagatgtcatgaatgaatgttgatcattactcgagtattttaacgtgaatagcatcgacaagtatgtttcggttaaaatatgaggatttcatgatagagggtgtatatcaatgttttaaagcttttgtggataaaaatgctctcacaagattatatgttgtctgataatgcccaaccagctagatcgaatagtgcgatgccctattcggttagtgtggaattcaagttagtttagaaacgcgatctaaaaggttagtcaaattatttctatttttttgttctaagtcatgggtgttcggtaatggtgagccaaggtataattaatattttggtgttctaggctagctaataaaggtataggccttgtttagaattgaatatttcttgatatttgagttagatccaaataagctagagcaatgagattatggtgcttagtcatttaccgatatctagcgtttgctcgtgagtgttgtaaggcctcaccattaagtgttttatttctcttttgtgtagcatcatattatctcgtgccattcctctgaatgttcataaatgcgcatttttcatttcattaggtgcactagttatgcacgtgatgcggaagacgagccaagttgaccccaagatgacgtaatgggtggactactccgcatggtgatgctgatggacgaatttaaggacggatgacctgatcaagtgccaggacaaggatgatcatcaagagatcgtcgtcttacccacactaacgcagtgttattccaagcaagccccggtgtatttacccttttccttgctatttcaaactctttatcacttggaatgatgcattaggtgataggagttgggtgataaacaattgttgcatttccttccttggaactgtttaccattccttgatacctgttttacttaaaagttttctgatgcttagtcttgccttagaaaacaaaatggtttgttttaaacaaatatgatgcttcatgtgggatgggaacttttcaaaagaaaagacttgatggtgaatccatcatggccatggtgggttcaac

SEQ ID NO: 30171 - DNA, 1623 bp, Zea Mays
aatctaaaatatttcgttcatgacactggccattggatcgtcttacaaagtctaaggaagcagcgcgggcgtgaagcggaaaggacggttcagatggcactggcaaaagcttccttggtggatgatctgcaaaacaaaaaccaagagttgatgaaacagattgagatatgccaggaagagaacaaaatcttggatagaatgcaccgccagaaagttgctgaggttgaaaagctcacgcagactgtcagagagctagaagaatctgttcttgctggtggtgcagccgcaaatgctgtcagagactaccagcggaaagttcaggagatgaatgaggaaatgaaaactcttgatcgtgagctagctcgtgcaaaggtttcagcaaatagggttgcagtagtggtggcaaatgagtggaaagatggcgatgataaagtaatgcctgttaaacgatggctcgaggagcgaaggattctgcaaggagaaatgcagcaactccgggacaaacttgctattgcagaaagggctgcaagatcagaagctcaactgaaagagaagttccagctacgacttaaggtactcgaggaaggattgagaatgtctacatcgagaaccaatgtcagtggcacacgccgccagtctattggtggtgctgatggtttgtctaaggccaacggcttcctgtcaaaacgcccatcattccagatgagatcaccagtgtctaccacaacgactctagtgaaccatgcaaaaggagcgtccaagtcgtttgacggaggctgtagatcacttgaacgctataagggccatgtaaacgggaatgtcggaggactcggtgtcaggtgttctatatgatatgttgcaaaaggaggtcatttctctaaggaaggcgtgccacgaaaaggatcagagcctgaaagacaaggacgacgcagttgagatgttggcaaagaaagtagatactttgacaaaagctatggagtcagatgccaagaaatcgaggcgcgagctagctgctatggagaaggagctggcagctgtgcgcttggagaaagagcaggataacagggcaagacgttttggtagttcaagcggttctgccagcagttcgcagctcccacctggcaggactggtgactgggaaggaacctctcattgtcctggagaagatggcatcagcggaagagcctcttctgcctacatctcgtggtcgcagggatgaactactttgtgtctaacatctccggctagtgttttcttttcttttgttttgacgacgtgtcattcggtggtgattgctgttgtttcttttcttttggcagtttgatgatctttgttggtgctgtataggtttggtgaggcgttgctcctttttcttctttggtttgtttgttcgacatatccgtcggtctggttgtttacgatgtaaaatgtacgcactgaagagttgcttatggtttgcctgatattcccccctgtttctgtcagtgttgggcaagttgatgataaccagcatgatgaatgactcagctggctgttgtaaccatgtgccgaatgatgaagaaaccgctttgcatatgtctgatgatcaccagatgaatggagttagggcaagttcgaccgctt

SEQ ID NO: 30172 - DNA, 3297 bp, Zea Mays
ttataaagtgctggatttggcttggcaaggtgagaatgagagtaacctttactagcgctcgctgttgctgtgcgctgtgcagggcgcatctatccgcatctccgcccccccccacggtggcatcgcctcgcctcgcgtcggatcaatccatcccctcgccctcgccttctgctcttcctcatcgggggcaggcggagccgcagagggaggagccgccggcgctaggaatccccaatccgtatcgctcccccaacgattttgagtatattgctgctgcttctcaagcctattcttattgtagatcgaatcgatcaattcgctgcatcgactgatagtagatagggttcatacgcccattccattgattcgacgatgttccgccgcgactgtgtgggatcgccgccgccatgacccccggctacctccctccaccttcgtatcccgacgtcttgaccaaaccccaaacctgactccgaccccggttccccgctggaagagtataatagccaaaacacaagcggcccgtgcgcaccaaccaccaccggagcaacaggatggccgatagcggcggaatcagcgccgacaacgccgcggccgctaacgacgacgacgacaccaacacggcgcctttccccgacacggtccaggtcggaggatctcccgagtacaaggtcgagaggaagcttggcaaaggtggcttcggccatgtctttcttggccgacgtctgactgccgcccacgccgcacgctccgcggcgtccgctgcccaagaggttgccatcaagtttgagcacactagcagcaagggctgtacctacggccctccagctgaatggcaaatctacaccgctcttggaggcacacacggcgtgcccaaggtgcattataaaggtcgtcagggtgactactatgtcatgattatggatatgctggggcctagtttgtgggattcatggaattcattaggccaatccatgccatcggaaatggtggcttgcattgccatggagtccatttccatcttggaaagcatgcattctaaaggatatgtgcatggagacgtcaaacctgagaactttcttctggggcagccttcaacgcctcatgaaaagaaactttatcttgtggatcttggattagcaacaaagtggagagatactgctaatgggcagcatgttagttatgatcaacgtcctgatgcctttagaggaacagtcagatatgctagtgtccatgcacatttaggaagaaccgctagcaggagagatgatttggagtcacttgcctatacactagtattccttcaccggggcaggttgccatggcagggatatcagggtgataataaatcatttttggtgtgcaagagaaagatgagtacctcacctgaggccctctgcggcatatgtcctcaacctttcaaggagtttcttgaggccgttgtcaacatgaagtttgatgaagagccaaactattccaagttgatttcattgtttgacagtttaattggaccaatcccttccattagaccaatcaatactgatggagcccaaaaggtagggcagaagcgtgccaggttgcttaatgatgacgacgaccatgtaaaaaagaagattcggctgggtgctcctgcaacacagtggatttcagtatacaattcaaggcaacctatgaagcagaggttaatgttatttctcaagttaatttcttcctgtagactgtatatcctgtttcgagtatccatccagagttatattatcgtagtgtgttctgtatcgttctttcttttaaaagtaaattcccatttttttgctatttggtataaaaatctgattcattcactgaaaggaaccaagttaacgacatggcaatactgcttgtagatcataatttctactgggttaacccaaatttaaaaggaaaaacttttttaatcccttgagaaccaaagataatccataatgcttatgcagttttttaggttcatcaatgcaccgatattctttttgtgtatttcgtcaccgcaaaaggataattgacttctgcccttgataggtaccactataatgtggctgatgcaaggttagcgcaacatgtggagaaaggaaatgaggatggtttgttgataagttcaatatcatcatgcgcaaatctttgggcaatcattatggatgcaggaactggcttctcagctcaagtttatgagctatcttcacactttcttcataaggagtggatcatggaacaatgggataaaagtttctacatcagttctgttgctggctccaacaatggaagttctattgtagtgatgtcaaaaggcacaccatatacacagcaatcttataaagtcagtgattcctttccatttaagtggataaacaagaaatggaaagaaggttttcatgtgactgcaatggcaacatcaggcaatcgatgggctatagtcatgtcccgcagtgctggattttctgagcaggttgtggagttggacttcttgtacccgagcgagggcatccatagacgctgggacaatggcttccgtattactgcaatggctgccacgatggatcagtctgcgctgatcctaagcaagccaaggcgtcgcccaagagacgagacacaagagactctgcggactacacagtttcccagtcaacatgtcaaggacaagtgggccaagaatctctaccttgctgggatatgctatgggcgaaccgtggcctaacatcgtccgttgctgacctagctgttgtttgatgtatattttgagttttttatcagctgctaccagcatgagccacaaggcatttgccttgtcgtaacccatggaaattggaaaggggatgaattccgatgtatgtgcccgaacttgattctagggttggtctcgtaagttaatcgggaaaggcgggtgcagacactactgatgagccgtaacgtacccgtcagatcccccagatacaataaaacgagtctgtaatgtggcttttgcatcgtattttctgcatcgtgttaaggagaattctgtttttttattcagtgaattgtgaagagtggaaaatatagagcaacaaatagtaagttaaatagtatttcagctacctgcagagcatcatctagctggaccatttccttctcttccagcagcccagtcttgtggaggtttggaatgcaatcgctcaagtatgtcagcacagaatatgtgacttgtgtctttagcgctcgtagcacctgaaattttggtttgagtaattactctatccaatttgatgtgatgtgatgtattatgagtct

SEQ ID NO: 30173 - DNA, 3209 bp, Zea Mays
gtaacctttactagcgctcgctgttgctgtgcgctgtgcagggcgcatctatccgcatctccgcccccccccacggtggcatcgcctcgcctcgcgtcggatcaatccatcccctcgccctcgccttctgctcttcctcatcgggggcaggcggagccgcagagggaggagccgccggcgctaggaatccccaatccgtatcgctcccccaacgattttgagtatattgctgctgcttctcaagcctattcttattgtagatcgaatcgatcaattcgctgcatcgactgatagtagatagggttcatacgcccattccattgattcgacgatgttccgccgcgactgtgtgggatcgccgccgccatgacccccggctacctccctccaccttcgtatcccgacgtcttgaccaaaccccaaacctgactccgaccccggttccccgctggaagagtataatagccaaaacacaagcggcccgtgcgcaccaaccaccaccggagcaacaggatggccgatagcggcggaatcagcgccgacaacgccgcggccgctaacgacgacgacgacaccaacacggcgcctttccccgacacggtccaggtcggaggatctcccgagtacaaggtcgagaggaagcttggcaaaggtggcttcggccatgtctttcttggccgacgtctgactgccgcccacgccgcacgctccgcggcgtccgctgcccaagaggttgccatcaagtttgagcacactagcagcaagggctgtacctacggccctccagctgaatggcaaatctacaccgctcttggaggcacacacggcgtgcccaaggtgcattataaaggtcgtcagggtgactactatgtcatgattatggatatgctggggcctagtttgtgggattcatggaattcattaggccaatccatgccatcggaaatggtggcttgcattgccatggagtccatttccatcttggaaagcatgcattctaaaggatatgtgcatggagacgtcaaacctgagaactttcttctggggcagccttcaacgcctcatgaaaagaaactttatcttgtggatcttggattagcaacaaagtggagagatactgctaatgggcagcatgttagttatgatcaacgtcctgatgcctttagaggaacagtcagatatgctagtgtccatgcacatttaggaagaaccgctagcaggagagatgatttggagtcacttgcctataggtgataataaatcatttttggtgtgcaagagaaagatgagtacctcacctgaggccctctgcggcatatgtcctcaacctttcaaggagtttcttgaggccgttgtcaacatgaagtttgatgaagagccaaactattccaagttgatttcattgtttgacagtttaattggaccaatcccttccattagaccaatcaatactgatggagcccaaaaggtagggcagaagcgtgccaggttgcttaatgatgacgacgaccatgtaaaaaagaagattcggctgggtgctcctgcaacacagtggatttcagtatacaattcaaggcaacctatgaagcagaggttaatgttatttctcaagttaatttcttcctgtagactgtatatcctgtttcgagtatccatccagagttatattatcgtagtgtgttctgtatcgttctttcttttaaaagtaaattcccatttttttgctatttggtataaaaatctgattcattcactgaaaggaaccaagttaacgacatggcaatactgcttgtagatcataatttctactgggttaacccaaatttaaaaggaaaaacttttttaatcccttgagaaccaaagataatccataatgcttatgcagttttttaggttcatcaatgcaccgatattctttttgtgtatttcgtcaccgcaaaaggataattgacttctgcccttgataggtaccactataatgtggctgatgcaaggttagcgcaacatgtggagaaaggaaatgaggatggtttgttgataagttcaatatcatcatgcgcaaatctttgggcaatcattatggatgcaggaactggcttctcagctcaagtttatgagctatcttcacactttcttcataaggagtggatcatggaacaatgggataaaagtttctacatcagttctgttgctggctccaacaatggaagttctattgtagtgatgtcaaaaggcacaccatatacacagcaatcttataaagtcagtgattcctttccatttaagtggataaacaagaaatggaaagaaggttttcatgtgactgcaatggcaacatcaggcaatcgatgggctatagtcatgtcccgcagtgctggattttctgagcaggttgtggagttggacttcttgtacccgagcgagggcatccatagacgctgggacaatggcttccgtattactgcaatggctgccacgatggatcagtctgcgctgatcctaagcaagccaaggcgtcgcccaagagacgagacacaagagactctgcggactacacagtttcccagtcaacatgtcaaggacaagtgggccaagaatctctaccttgctgggatatgctatgggcgaaccgtggcctaacatcgtccgttgctgacctagctgttgtttgatgtatattttgagttttttatcagctgctaccagcatgagccacaaggcatttgccttgtcgtaacccatggaaattggaaaggggatgaattccgatgtatgtgcccgaacttgattctagggttggtctcgtaagttaatcgggaaaggcgggtgcagacactactgatgagccgtaacgtacccgtcagatcccccagatacaataaaacgagtctgtaatgtggcttttgcatcgtattttctgcatcgtgttaaggagaattctgtttttttattcagtgaattgtgaagagtggaaaatatagagcaacaaatagtaagttaaatagtatttcagctacctgcagagcatcatctagctggaccatttccttctcttccagcagcccagtcttgtggaggtttggaatgcaatcgctcaagtatgtcagcacagaatatgtgacttgtgtctttagcgctcgtagcacctgaaattttggtttgagtaattactctatccaatttgatgtgatgtgatgtattatgagtct

SEQ ID NO: 30174 - DNA, 2501 bp, Zea Mays
gcagggcgcatctatccgcatctccgcccccccccacggtggcatcgcctcgcctcgcgtcggatcaatccatcccctcgccctcgccttctgctcttcctcatcgggggcaggcggagccgcagagggaggagccgccggcgctaggaatccccaatccccaccaccggagcaacaggatggccgatagcggcggaatcagcgccgacaacgccgcggccgctaacgacgacgacgacaccaacacggcgcctttccccgacacggtccaggtcggaggatctcccgagtacaaggtcgagaggaagcttggcaaaggtggcttcggccatgtctttcttggccgacgtctgactgccgcccacgccgcacgctccgcggcgtccgctgcccaagaggttgccatcaagtttgagcacactagcagcaagggctgtacctacggccctccagctgaatggcaaatctacaccgctcttggaggcacacacggcgtgcccaaggtgcattataaaggtcgtcagggtgactactatgtcatgattatggatatgctggggcctagtttgtgggattcatggaattcattaggccaatccatgccatcggaaatggtggcttgcattgccatggagtccatttccatcttggaaagcatgcattctaaaggatatgtgcatggagacgtcaaacctgagaactttcttctggggcagccttcaacgcctcatgaaaagaaactttatcttgtggatcttggattagcaacaaagtggagagatactgctaatgggcagcatgttagttatgatcaacgtcctgatgcctttagaggaacagtcagatatgctagtgtccatgcacatttaggaagaaccgctagcaggagagatgatttggagtcacttgcctataggtgataataaatcatttttggtgtgcaagagaaagatgagtacctcacctgaggccctctgcggcatatgtcctcaacctttcaaggagtttcttgaggccgttgtcaacatgaagtttgatgaagagccaaactattccaagttgatttcattgtttgacagtttaattggaccaatcccttccattagaccaatcaatactgatggagcccaaaaggtagggcagaagcgtgccaggttgcttaatgatgacgacgaccatgtaaaaaagaagattcggctgggtgctcctgcaacacagtggatttcagtatacaattcaaggcaacctatgaagcagaggtaccactataatgtggctgatgcaaggttagcgcaacatgtggagaaaggaaatgaggatggtttgttgataagttcaatatcatcatgcgcaaatctttgggcaatcattatggatgcaggaactggcttctcagctcaagtttatgagctatcttcacactttcttcataaggagtggatcatggaacaatgggataaaagtttctacatcagttctgttgctggctccaacaatggaagttctattgtagtgatgtcaaaaggcacaccatatacacagcaatcttataaagtcagtgattcctttccatttaagtggataaacaagaaatggaaagaaggttttcatgtgactgcaatggcaacatcaggcaatcgatgggctatagtcatgtcccgcagtgctggattttctgagcaggttgtggagttggacttcttgtacccgagcgagggcatccatagacgctgggacaatggcttccgtattactgcaatggctgccacgatggatcagtctgcgctgatcctaagcaagccaaggcgtcgcccaagagacgagacacaagagactctgcggactacacagtttcccagtcaacatgtcaaggacaagtgggccaagaatctctaccttgctgggatatgctatgggcgaaccgtggcctaacatcgtccgttgctgacctagctgttgtttgatgtatattttgagttttttatcagctgctaccagcatgagccacaaggcatttgccttgtcgtaacccatggaaattggaaaggggatgaattccgatgtatgtgcccgaacttgattctagggttggtctcgtaagttaatcgggaaaggcgggtgcagacactactgatgagccgtaacgtacccgtcagatcccccagatacaataaaacgagtctgtaatgtggcttttgcatcgtattttctgcatcgtgttaaggagaattctgtttttttattcagtgaattgtgaagagtggaaaatatagagcaacaaatagtaagttaaatagtatttcagctacctgcagagcatcatctagctggaccatttccttctcttccagcagcccagtcttgtggaggtttggaatgcaatcgctcaagtatgtcagcacagaatatgtgacttgtgtctttagcgctcgtagcacctgaaattttggtttgagtaattactctatccaatttgatgtgatgtgatgtattatgagtct

SEQ ID NO: 30175 - DNA, 2843 bp, Zea Mays
gcagggcgcatctatccgcatctccgcccccccccacggtggcatcgcctcgcctcgcgtcggatcaatccatcccctcgccctcgccttctgctcttcctcatcgggggcaggcggagccgcagagggaggagccgccggcgctaggaatccccaatccgtatcgctcccccaacgattttgagtatattgctgctgcttctcaagcctattcttattgtagatcgaatcgatcaattcgctgcatcgactgatagtagatagggttcatacgcccattccattgattcgacgatgttccgccgcgactgtgtgggatcgccgccgccatgacccccggctacctccctccaccttcgtatcccgacgtcttgaccaaaccccaaacctgactccgaccccggttccccgctggaagagtataatagccaaaacacaagcggcccgtgcgcaccaaccaccaccggagcaacaggatggccgatagcggcggaatcagcgccgacaacgccgcggccgctaacgacgacgacgacaccaacacggcgcctttccccgacacggtccaggtcggaggatctcccgagtacaaggtcgagaggaagcttggcaaaggtggcttcggccatgtctttcttggccgacgtctgactgccgcccacgccgcacgctccgcggcgtccgctgcccaagaggttgccatcaagtttgagcacactagcagcaagggctgtacctacggccctccagctgaatggcaaatctacaccgctcttggaggcacacacggcgtgcccaaggtgcattataaaggtcgtcagggtgactactatgtcatgattatggatatgctggggcctagtttgtgggattcatggaattcattaggccaatccatgccatcggaaatggtggcttgcattgccatggagtccatttccatcttggaaagcatgcattctaaaggatgtgcatggagacgtcaaacctgagaactttcttctggggcagccttcaacgcctcatgaaaagaaactttatcttgtggatcttggattagcaacaaagtggagagatactgctaatgggcagcatgttagttatgatcaacgtcctgatgcctttagaggaacagtcagatatgctagtgtccatgcacatttaggaagaaccgctagcaggagagatgatttggagtcacttgcctatacactagtattccttcaccggggcaggttgccatggcagggatatcagggtgataataaatcatttttggtgtgcaagagaaagatgagtacctcacctgaggccctctgcggcatatgtcctcaacctttcaaggagtttcttgaggccgttgtcaacatgaagtttgatgaagagccaaactattccaagttgatttcattgtttgacagtttaattggaccaatcccttccattagaccaatcaatactgatggagcccaaaaggtagggcagaagcgtgccaggttgcttaatgatgacgacgaccatgtaaaaaagaagattcggctgggtgctcctgcaacacagtggatttcagtatacaattcaaggcaacctatgaagcagaggtaccactataatgtggctgatgcaaggttagcgcaacatgtggagaaaggaaatgaggatggtttgttgataagttcaatatcatcatgcgcaaatctttgggcaatcattatggatgcaggaactggcttctcagctcaagtttatgagctatcttcacactttcttcataaggagtggatcatggaacaatgggataaaagtttctacatcagttctgttgctggctccaacaatggaagttctattgtagtgatgtcaaaaggcacaccatatacacagcaatcttataaagtcagtgattcctttccatttaagtggataaacaagaaatggaaagaaggttttcatgtgactgcaatggcaacatcaggcaatcgatgggctatagtcatgtcccgcagtgctggattttctgagcaggttgtggagttggacttcttgtacccgagcgagggcatccatagacgctgggacaatggcttccgtattactgcaatggctgccacgatggatcagtctgcgctgatcctaagcaagccaaggcgtcgcccaagagacgagacacaagagactctgcggactacacagtttcccagtcaacatgtcaaggacaagtgggccaagaatctctaccttgctgggatatgctatgggcgaaccgtggcctaacatcgtccgttgctgacctagctgttgtttgatgtatattttgagttttttatcagctgctaccagcatgagccacaaggcatttgccttgtcgtaacccatggaaattggaaaggggatgaattccgatgtatgtgcccgaacttgattctagggttggtctcgtaagttaatcgggaaaggcgggtgcagacactactgatgagccgtaacgtacccgtcagatcccccagatacaataaaacgagtctgtaatgtggcttttgcatcgtattttctgcatcgtgttaaggagaattctgtttttttattcagtgaattgtgaagagtggaaaatatagagcaacaaatagtaagttaaatagtatttcagctacctgcagagcatcatctagctggaccatttccttctcttccagcagcccagtcttgtggaggtttggaatgcaatcgctcaagtatgtcagcacagaatatgtgacttgtgtctttagcgctcgtagcacctgaaattttggtttgagtaattactctatccaatttgatgtgatgtgatgtattatgagtct

SEQ ID NO: 30176 - DNA, 222 bp, Zea Mays
atgcttgcatccaacacgagaaaccgtttacaatggtccaatccaacacaatgccatttgcatgcccacttagggcttgttcggttattcctaatacatatggattggatgggattggaaaaaattgagaagaagtttgacttgtttgggattcaaacccatccaatcccactcaatccacatggattgagagctaaccgaacaagtccttatagatggtaa

SEQ ID NO: 30177 - DNA, 631 bp, Zea Mays
accatggcaagtgagtagagggtccagcgacctccatcccaggacctcaataacataaaagcaaaaccgattttcaattgatactccatgaagataagtaggtaaaaatattagaagctttgttacaactaatttagaaaaagcaaacaaattctcaaagaactgttctactttaatggtgcaaacagaatgtagacactggttcatgtgcttgtatttgattactttacatacatttactttctgtccatccactactgatctacaagtgtgtggccatatgtagttacaaatctgggaggattagataagaaactatgggtgcctaaatttggcaataactatccagaaaatttaacaatagatttaatattgtacatatgctaatagaaagacaacagtcaggacatatgaatggtataaaattcaatatagatgtcatctctcaacttaatacaacagagaaaacaatatgttgatgggttcaaacacattaagttacccagatattaaccagggtaccttcttatgttggcccttaagcatataaaatgtgcacatagcagaggccctggcagaatcctgaatggaagaagaaattagaatataatcttataaatcgaaacagtac

SEQ ID NO: 30178 - DNA, 1788 bp, Zea Mays
gcttgttgcaacggacaccacgtgtattcttcactccttgctctgctcgccacctctctcttttcttagccattcaccgcattacatggcggcgcctgtcctcctcactatccctaccatggacgaagaaggcgcccccccgcccgccccagcctccccttcccgcaccccaccgcagcaggagccgaagcccgcggtcctacgctggcgcccacccgtccgcgtgacctcggagtttgacagcgaacgacggctcttctcccaccgcctctcctgccgcgtcctcgacggcctcgccaagctccgcctccgcattagccatggtgctgggggaggagggattctctggggcccgactgatgtggggctcctggcgcggaacttctccgtcgtcgtcgaccctgcaacccgaggcgccgtgctgcgcggcgccgccgacctcgccggctcgctgcgactgcgcgcctcgcacaacaccaaaaactgccagactggagagcaatcatattatattcatgtcggctgttcagcactctgtttatctatgtcttgcaactatgaatatgacaaatctattgtttcttgcattcaattggataggtgctttcaattcaagtaccacagtgtaaaggtgtgatgtcaatgataattctcacgagtggaatatttggttgtctcttgccaaagtatgtttggctgctccaaattttaaaggcaatgaggttctagtgtcaactgattgggagcagcagaggactgtctacagcacaatgttgcaggaacagctgtccagagctcatcagcgttgcacagaggtcaggggttactctaaagcgagttttgatccatggtcgggtatggcacttgagttttctacctggcggacttcaatgttgtgaagagtcattttcttactgcacttgcttgggggcaagcaagttctggcgaaggggcagatttcatggcctgaatcagtgatgcagcgggagaaccctgaagcaagtagctagcggtagagtgtgtgtttgaatgtaatggcattagggcgtgtgggccctgtagcttgggctggcccagtagagtgcctataaaggctagatttgttactttgtaaacagctaagaaataacagaaatcaaaatatccgtacctcgcgtgcgtacctgagtccttcattttgttcgtggtaactctcctcgccgcagttaacctcacgtcgcggtggcgacgccgcagccacggggaggcgttacaatatccagcacatctccacattgtatcatgttggagctccacctgtattactaaatcccagttatcaagatatttgaacagggcagctaccgatggagcttcctgtatatcttgaaccagcagcgatcaactgaaacttcctgtaccatccactgattggttttgcataatatatgcgggcaaataaatgtgggccaggatcagcagtgggctctcccaattactgcaactattctctttttcttagatgttactcattcaaggttgattttccgagtttacacattgacctgtattatataatatcatcatgcaatggtcatataatgcattctagacttgatttggttttcgatttcgatctgcctactaaacgttataacagtaaagatttaccattatatgaggtaaatatagtgttgaatctgattcttatcttatattcatgagatctctgtattgattcctttctcttttaaatatgagaaattgcacttctttgctaatactccctccgccccaaaatataattcg

SEQ ID NO: 30179 - DNA, 1458 bp, Zea Mays
gcttgttgcaacggacaccacgtgtattcttcactccttgctctgctcgccacctctctcttttcttagccattcaccgcattacatggcggcgcctgtcctcctcactatccctaccatggacgaagaaggcgcccccccgcccgccccagcctccccttcccgcaccccaccgcagcaggagccgaagcccgcggtcctacgctggcgcccacccgtccgcgtgacctcggagtttgacagcgaacgacggctcttctcccaccgcctctcctgccgcgtcctcgacggcctcgccaagctccgcctccgcattagccatggtgctgggggaggagggattctctggggcccgactgatgtggggctcctggcgcggaacttctccgtcgtcgtcgaccctgcaacccgaggcgccgtgctgcgcggcgccgccgacctcgccggctcgctgcgactgcgcgcctcgcacaacaccaaagagcaacaaggagaagtggcaattactgcaaatttgagggattcaccatgcaagattgaactgtcatctctggttcctcctaatggaccgccaagagcaacttttttctttccaaatggtgaagtctcaattaaagagaagattttggatgagcgtgacagaattttgtcagtaaatggcctagtgaagtcacgtgttctgcatggagtttgcacagctgtgtacaatgataatgtaatgagcattaaataccgctacaagctattggtacaattttgacacaaactactggggcgccatctacaaacacaaggctcacaagcatctcaagtggaaagctggctatgagtcagacaacaggcttggatgggcatcgctttgggttggagatgctggcggcagtacaaaggaggcgcctttgaaagccaaaattcacctcacgcttaaagtcccccaggacaatatacagaattcagttgtagtgttccatgttaagaaaagatgggatttttagtttctatttgtgagctcagatggtgttacgtcatgcgcacataagcaagcgtgtacagatggagagccaataagagatggatgcaaatttgtgatgtggtctgcaaaattgtttcatgcaaatgttagggagaaatcatgtaatgttagtcctcttttataggttccgtttggttcaaggtcttgttaagggaatgctaaagagctcaaccaaacaaaagtattggtaactactagaggtgtaatccgatcgaatacagacgaatatcactgaaattaaatttgttattcggatccagattcgaatacagctagctttgaatacgaatacaatatagatgttcttggatataaatacggatagcgttagtaacagatatcgtgtaagacaccattctacatatatcataattcttgtaattatttagcccctctttcgagtctaaacatttttaagaattatg

SEQ ID NO: 30180 - DNA, 1565 bp, Zea Mays
gcttgttgcaacggacaccacgtgtattcttcactccttgctctgctcgccacctctctcttttcttagccattcaccgcattacatggcggcgcctgtcctcctcactatccctaccatggacgaagaaggcgcccccccgcccgccccagcctccccttcccgcaccccaccgcagcaggagccgaagcccgcggtcctacgctggcgcccacccgtccgcgtgacctcggagtttgacagcgaacgacggctcttctcccaccgcctctcctgccgcgtcctcgacggcctcgccaagctccgcctccgcattagccatggtgctgggggaggagggattctctggggcccgactgatgtggggctcctggcgcggaacttctccgtcgtcgtcgaccctgcaacccgaggcgccgtgctgcgcggcgccgccgacctcgccggctcgctgcgactgcgcgcctcgcacaacaccaaagagcaacaaggagaagtggcaattactgcaaatttgagggattcaccatgcaagattgaactgtcatctctggttcctcctaatggaccgccaagagcaacttttttctttccaaatggtgaagtctcaattaaagagaagattttggatgagcgtgacagaattttgtcagtaaatggcctagtgaagtcacgtgttctgcatggagtttgcacagctgtgtacaatgataatgtaatgagcattaaataccgctacaagtgtatttcataggatgatgaggtatcgtttatccccagcatctcattaccatccaattctctgtcatttgcattcaagcgccaattaacgcctttggacaagttgagctattggtacaattttgacacaaactactggggcgccatctacaaacacaaggctcacaagcatctcaagtggaaagctggctatgagtcagacaacaggcttggatgggcatcgctttgggttggagatgctggcggcagtacaaaggaggcgcctttgaaagccaaaattcacctcacgcttaaagtcccccaggacaatatacagaattcagttgtagtgttccatgttaagaaaagatgggatttttagtttctatttgtgagctcagatggtgttacgtcatgcgcacataagcaagcgtgtacagatggagagccaataagagatggatgcaaatttgtgatgtggtctgcaaaattgtttcatgcaaatgttagggagaaatcatgtaatgttagtcctcttttataggttccgtttggttcaaggtcttgttaagggaatgctaaagagctcaaccaaacaaaagtattggtaactactagaggtgtaatccgatcgaatacagacgaatatcactgaaattaaatttgttattcggatccagattcgaatacagctagctttgaatacgaatacaatatagatgttcttggatataaatacggatagcgttagtaacagatatcgtgtaagacaccattctacatatatcataattcttgtaattatttagcccctctttcgagtctaaacatttttaagaattatg

SEQ ID NO: 30181 - DNA, 2211 bp, Zea Mays
cgcacctttttcctcatcaaattttgttgctgaccttggtcttggcgtgtcgacgtgtcgtgatgaattgggaatgataccaacgtggttcaattagcactagttttccaacatttggaagcaaagagaattgataggactgtgtaattatgaaatatgaaaacgaaacacaaatttgtctgcgaatgaaatttggcagaaacaaggaccatatacagagggactttgtccagagctcacctgtcaggaacaacagaatcggaatacagggttagctgatatttagtgttgtacttgtataaatatgaactttaaaagttaaattgagctcttatctattgggaaatactcttggaatgctagaaaacactagtgggctagacgttcttgatttttgcgaaggaagaataaaaacacttctcagttctttctttattgaatggttctactttgtaagaacaccttcagggattgatgtaggtattgattattgaaagccatgagcccatgagacaacatttctttctctgaaagtatgttcctatgcggttatgtcagttctactgcatttaggctgaaggttgttgagggtctttgcttctgtggtgtgtcagtgtcagtgctctcttactcgtggtatgccttcacaagttgtatgttgagagctatttccttgattccacagcatgttggatcatggacactgtaaacaaagttgctgtcgggccatatgttcatttgagaatatcaacgtttactgttgaaaatgtactttgaaatagtaaagtgtgtacaattcactgacaatttccggctcatgaaatgttaacaggggattggagagcccctgctctatgttggaaatgtagtgggaagtagttatgcatgctcaacatactgatttaactgtcatgttttttcaaatactcatgtcatgctaaacaaagttattctattcattaaatagctgatccaggcatataggtagaaaagcaaagaattgaaaatcatatactagcttgaattatgtggaatctttaattacatgtcgttctatcaggagtggttcaaaaggctgaagaactgaatgctgatatgttacctttactccttgaatgttaatgtgtctgttttctcaggagcaacaaggagaagtggcaattactgcaaatttgagggattcaccatgcaagattgaactgtcatctctggttcctcctaatggaccgccaagagcaacttttttctttccaaatggtgaagtctcaattaaagagaagattttggatgagcgtgacagaattttgtcagtaaatggcctagtgaagtcacgtgttctgcatggagtttgcacagctgtgtacaatgataatgtaatgagcattaaataccgctacaaggatgatgaggtatcgtttatccccagcatctcattaccatccaattctctgtcatttgcattcaagcgccaattaacgcctttggacaagttgagctattggtacaattttgacacaaactactggggcgccatctacaaacacaaggctcacaagcatctcaagtggaaagctggctatgagtcagacaacaggcttggatgggcatcgctttgggttggagatgctggcggcagtacaaaggaggcgcctttgaaagccaaaattcacctcacgcttaaagtcccccaggacaatatacagaattcagttgtagtgttccatgttaagaaaagatgggatttttagtttctatttgtgagctcagatggtgttacgtcatgcgcacataagcaagcgtgtacagatggagagccaataagagatggatgcaaatttgtgatgtggtctgcaaaattgtttcatgcaaatgttagggagaaatcatgtaatgttagtcctcttttataggttccgtttggttcaaggtcttgttaagggaatgctaaagagctcaaccaaacaaaagtattggtaactactagaggtgtaatccgatcgaatacagacgaatatcactgaaattaaatttgttattcggatccagattcgaatacagctagctttgaatacgaatacaatatagatgttcttggatataaatacggatagcgttagtaacagatatcgtgtaagacaccattctacatatatcataattcttgtaattatttagcccctctttcgagtctaaacatttttaagaattatg

SEQ ID NO: 30182 - DNA, 1243 bp, Zea Mays
gagtggttcaaaaggctgaagaactgaatgctgatatgttacctttactccttgagtgctttcaattcaagtaccacagtgtaaaggagcaacaaggagaagtggcaattactgcaaatttgagggattcaccatgcaagattgaactgtcatctctggttcctcctaatggaccgccaagagcaacttttttctttccaaatggtgaagtctcaattaaagagaagattttggatgagcgtgacagaattttgtcagtaaatggcctagtgaagtcacgtgttctgcatggagtttgcacagctgtgtacaatgataatgtaatgagcattaaataccgctacaaggtaagtcttgtctcagctcttttttgtttcattaattaatattactatttgccactcacaatgtttcattaagtgtatttcataggatgatgaggtatcgtttatccccagcatctcattaccatccaattctctgtcatttgcattcaagcgccaattaacgcctttggacaagttgagctattggtacaattttgacacaaactactggggcgccatctacaaacacaaggctcacaagcatctcaagtggaaagctggctatgagtcagacaacaggcttggatgggcatcgctttgggttggagatgctggcggcagtacaaaggaggcgcctttgaaagccaaaattcacctcacgcttaaagtcccccaggacaatatacagaattcagttgtagtgttccatgttaagaaaagatgggatttttagtttctatttgtgagctcagatggtgttacgtcatgcgcacataagcaagcgtgtacagatggagagccaataagagatggatgcaaatttgtgatgtggtctgcaaaattgtttcatgcaaatgttagggagaaatcatgtaatgttagtcctcttttataggttccgtttggttcaaggtcttgttaagggaatgctaaagagctcaaccaaacaaaagtattggtaactactagaggtgtaatccgatcgaatacagacgaatatcactgaaattaaatttgttattcggatccagattcgaatacagctagctttgaatacgaatacaatatagatgttcttggatataaatacggatagcgttagtaacagatatcgtgtaagacaccattctacatatatcataattcttgtaattatttagcccctctttcgagtctaaacatttttaagaattatg

SEQ ID NO: 30183 - DNA, 1257 bp, Zea Mays
gaactgaatgctgatatgttacctttactccttgaaactgccagactggagagcaatcatattatattcatgtcggctgttcagcactctgtttatctatgtcttgcaactatgaatatgacaaatctattgtttcttgcattcaattggataggtgctttcaattcaagtaccacagtgtaaaggagcaacaaggagaagtggcaattactgcaaatttgagggattcaccatgcaagattgaactgtcatctctggttcctcctaatggaccgccaagagcaacttttttctttccaaatggtgaagtctcaattaaagagaagattttggatgagcgtgacagaattttgtcagtaaatggcctagtgaagtcacgtgttctgcatggagtttgcacagctgtgtacaatgataatgtaatgagcattaaataccgctacaaggatgatgaggtatcgtttatccccagcatctcattaccatccaattctctgtcatttgcattcaagcgccaattaacgcctttggacaagttgagctattggtacaattttgacacaaactactggggcgccatctacaaacacaaggctcacaagcatctcaagtggaaagctggctatgagtcagacaacaggcttggatgggcatcgctttgggttggagatgctggcggcagtacaaaggaggcgcctttgaaagccaaaattcacctcacgcttaaagtcccccaggacaatatacagaattcagttgtagtgttccatgttaagaaaagatgggatttttagtttctatttgtgagctcagatggtgttacgtcatgcgcacataagcaagcgtgtacagatggagagccaataagagatggatgcaaatttgtgatgtggtctgcaaaattgtttcatgcaaatgttagggagaaatcatgtaatgttagtcctcttttataggttccgtttggttcaaggtcttgttaagggaatgctaaagagctcaaccaaacaaaagtattggtaactactagaggtgtaatccgatcgaatacagacgaatatcactgaaattaaatttgttattcggatccagattcgaatacagctagctttgaatacgaatacaatatagatgttcttggatataaatacggatagcgttagtaacagatatcgtgtaagacaccattctacatatatcataattcttgtaattatttagcccctctttcgagtctaaacatttttaagaattatg

SEQ ID NO: 30184 - DNA, 1104 bp, Zea Mays
ctgaatgctgatatgttacctttactccttgagagcaacaaggagaagtggcaattactgcaaatttgagggattcaccatgcaagattgaactgtcatctctggttcctcctaatggaccgccaagagcaacttttttctttccaaatggtgaagtctcaattaaagagaagattttggatgagcgtgacagaattttgtcagtaaatggcctagtgaagtcacgtgttctgcatggagtttgcacagctgtgtacaatgataatgtaatgagcattaaataccgctacaaggatgatgaggtatcgtttatccccagcatctcattaccatccaattctctgtcatttgcattcaagcgccaattaacgcctttggacaagttgagctattggtacaattttgacacaaactactggggcgccatctacaaacacaaggctcacaagcatctcaagtggaaagctggctatgagtcagacaacaggcttggatgggcatcgctttgggttggagatgctggcggcagtacaaaggaggcgcctttgaaagccaaaattcacctcacgcttaaagtcccccaggacaatatacagaattcagttgtagtgttccatgttaagaaaagatgggatttttagtttctatttgtgagctcagatggtgttacgtcatgcgcacataagcaagcgtgtacagatggagagccaataagagatggatgcaaatttgtgatgtggtctgcaaaattgtttcatgcaaatgttagggagaaatcatgtaatgttagtcctcttttataggttccgtttggttcaaggtcttgttaagggaatgctaaagagctcaaccaaacaaaagtattggtaactactagaggtgtaatccgatcgaatacagacgaatatcactgaaattaaatttgttattcggatccagattcgaatacagctagctttgaatacgaatacaatatagatgttcttggatataaatacggatagcgttagtaacagatatcgtgtaagacaccattctacatatatcataattcttgtaattatttagcccctctttcgagtctaaacatttttaagaattatg

SEQ ID NO: 30185 - DNA, 1070 bp, Zea Mays
tgatatgttacctttactccttgagagcaacaaggagaagtggcaattactgcaaatttgagggattcaccatgcaagattgaactgtcatctctggttcctcctaatggaccgccaagagcaacttttttctttccaaatggtgaagtctcaattaaagagaagattttggatgagcgtgacagaattttgtcagtaaatggcctagtgaagtcacgtgttctgcatggagtttgcacagctgtgtacaatgataatgtaatgagcattaaataccgctacaagcatctcattaccatccaattctctgtcatttgcattcaagcgccaattaacgcctttggacaagttgagctattggtacaattttgacacaaactactggggcgccatctacaaacacaaggctcacaagcatctcaagtggaaagctggctatgagtcagacaacaggcttggatgggcatcgctttgggttggagatgctggcggcagtacaaaggaggcgcctttgaaagccaaaattcacctcacgcttaaagtcccccaggacaatatacagaattcagttgtagtgttccatgttaagaaaagatgggatttttagtttctatttgtgagctcagatggtgttacgtcatgcgcacataagcaagcgtgtacagatggagagccaataagagatggatgcaaatttgtgatgtggtctgcaaaattgtttcatgcaaatgttagggagaaatcatgtaatgttagtcctcttttataggttccgtttggttcaaggtcttgttaagggaatgctaaagagctcaaccaaacaaaagtattggtaactactagaggtgtaatccgatcgaatacagacgaatatcactgaaattaaatttgttattcggatccagattcgaatacagctagctttgaatacgaatacaatatagatgttcttggatataaatacggatagcgttagtaacagatatcgtgtaagacaccattctacatatatcataattcttgtaattatttagcccctctttcgagtctaaacatttttaagaattatg

SEQ ID NO: 30186 - DNA, 514 bp, Zea Mays
ggtggggcgacatgccagggtcatctcccagctcggatcggggctgttgcaaccaaatccgtcgtcctcgcgcgataagctctctcgtccttctcgcgtgcgtggtcagctcctccattttccttgcgcgcacctatcggggaggaatcggcgggttgttgtgatccgctcggtcggtctttcccaagccggtgttgggatgaaactaacccccgcacctatcgcgagctcatccggtcggcgcaactgccgtcaccgggatctgcggctcagcctccgggctataagactccaagcctcgcgcgcatcacactgccccttcccaggacgtcgcggagtcgttggtgggcgccgttggtgtggaagaggactgcggtgcgggcaattgctcgtcggacttcgtcgagcgacaccaccgcgtggccaaactcgcccgcgcaataatccgagacgagcaagccacaatggaatctgaggttcagcaagtagagatagctgagcaggagctcgtgga

SEQ ID NO: 30187 - DNA, 466 bp, Zea Mays
ggtggggcgacatgccagggtcatctcccagctcggatcggggctgttgcaaccaaatccgtcgtcctcgcgcgataagctctctcgtccttctcgcgtgcgtggtcagctcctccattttccttgcgcgcacctatcggggaggaatcggcgggttgttgtgatccgctcggtcggtctttcccaagccggtgttgggatgaaactaacccccgcacctatcgcgagctcatccggtcggcgcaactgccgtcaccgggatctgcggctcagcctccgggctataagactccaagcctcgcgcgcatcacactgccccttcccaggacgtcgcggagtcgttggtgggcgccgttggtgtggaagaggactgcggtgcgggcaattgctcgtcggacttcgtcgagcgacaccaccgcgtggccaaactcgcccgcgcaataatccgagacgagcaagccacaat

SEQ ID NO: 30188 - DNA, 275 bp, Zea Mays
aagaaggaccggagaggggtagcgcaggggagagagagggacaggaaatccatcactggccaacacatgctttgtgggcgctcgggcgttagaggggtattctggggcagcgccatagattcggggagcttcgacgaccatcaatttatccattggaccgtcggcgtttgggcaattgctcgccggtgcgactccattgctgcggcttgatcctccgccgaggaccggcttcgccacctcgccctcgccgatcgaatatagaagttgactgtgag

SEQ ID NO: 30189 - DNA, 1615 bp, Zea Mays
cttttcaaagcgcaaatagtaatgtatttatactttctatggggtcgaatggatcttttaggatgatgtaaaatacaattttgccaaggagcatgagggcccacaattttgacggttctgaacttgataacaagacaaattcacttcatgatcagttctcgacacagttgtcattgtcatcattgtctaattccagtgatggcgaggagattgcaacttcttcatgtcctgacaaggggtgccctttggccatccttcatttatgcctaaagagttttaagcaggatgctactgaggaggatgcagctaaatggaagcttgacgggacctttgttctttcagacacagaatggggtgattcttcatatgctagttctctcagcgaacagtcatctacaatcagtgcccccagtacgccattcactcagcctgaggatcttgacagaacagatatctggatttcatctttagatcttgatgccgaggattgtgccttgctgccagagccagacaaggaacaatttccagatatactcggttttgatttccccagcccttctttcagcgcaatcagaagcctccagtttggttcttccagctttagtgctggaatgtttttgagcaaagaagccaacgactctgatgagccaatattctggccatttgagggcacctcctacaacagtcctgaatttgacagatttctgactctgtcgcctcgtagaaacacaatggatcccgggtacgctcaagtccgtcactcgaatccattcttgcggaggctccgtaacagcacactatcttcagtaaagaagtgcattgaactgcaccaaaggaccagaaattcagacgcaaaaggaagcgtggcgtcctcctgccaagagaagattcagaagacggctgcagttgcctccaggttaacaaaagcatctgcaccctccagttacagtcatcaccagatgccgagcatctgtcagaaaagaaggccgcctcacttgaaactcggtggtccaagaaagattacctctccacagttgcaggcagatcgatctagtaataagaagattgaagcagcaggcgtccaaaaagtagcggataagaagagtcggatcgaagagttgattggattggatgagtttgacggcaacgaaggcattggctcgggttcgtcagattaccagtttagtctatggatatctccaagatagttggtctgtgcaaccatcctgcagtaagcaacttaccatgttatctgtgaggtcagaagctaggattttgtaaaccagatagttggcctgtgtaatcgactcaacaaatccttgaaagctggcactgccgtagcaggagtgtacactacaaaatccttttggcagctgcgctggttccagaactgatggcgtacggggcgtgaagaaaagaacacccatattactataaagaaaaatatacagaaaacctgatggttccttattttcctacgtggctctttgactattgctacagtttagcatggggaaattatccttgctacgatcctgtactctcgacaatttttatttttgaattttatacagtaaggaaattttgaaataaatgtctttcatttctttgtcaa

SEQ ID NO: 30190 - DNA, 2257 bp, Zea Mays
atcgatttggccgagcagcctcattccagatatcagtcgtataatggaatatagccgctccaagaaccgctccgctctctcactgcgtaaccaaacactagaaaatagaaatggagccactccagtctctctcagtcctcaaccaaacacattagttactcgtacatacaatctctctctataggagtataacacaagtgaacaagaactatagtggtaagagccaaacgttcggaacaaagtgggctgagtccaaatcttgcacgccccattttgttctgcaaaataacaaggccacttctagccctgctaactttactgtgacggcattgacgcccaggagtctgcacaaagtaaaacagatggcgcatgaggcgggaatcagcctgtctttggttgaatttgaacatcatttactaacgggcttgaaacacatggtttgtgctatcaacgtggagaattcactgaatactagatatgatgataacatgaaaagcagtagttcacacatgaaataagcgtgcaagagttgtaccaaccacatcccaacccagggagaccacaatctggtaacaaaacaacctgctagagactcagggagcaatagatagccataccttgcttgcccatttacaccatggcttcctccttccttgctacaatgatcctggtcaacactctcatgtggtcagcctctagtgaaaccatagtccccaaccagatggtcagcagttacattgccaccagagcacagtagatacagcggccgcgctacttcacctttgtcatgctcgtcagggtggtgcaggagaagataccccgtagcaccttcaggatgccccgggataggcttctgtcccctgcgtccatctctgagagccaggtgttggacttcctatccaggcattccatcactgtgcccctgatgtcatcgacctcatcaggcttcccagtggatccatagtccccacccaccactagggcgacaaccaacatcaagcatcagaagctctacttcaacggcatcaagctcacaagtcctgatctctgagaagactttgaccgaaaaacaatcttgagcacatcttctctaccatctcccaacacaggttcttccacgatcactgctcacgcacctgcagcagaaagccctcaaaactcagacacttctatgtcaaaaactagattggctagtgcatactaccccaatggtagcattgacgtttaccatttttaaaatctggattcaaagccaggttcttgttcaatgaatgaatcgaatcttcattcaaggaaaataagtgcacaggagtagaattttatctttgatatgagctaataacataaaccttctagaagtctggtaacttcacctcatgcattatgataccataataaaattaccagcaataacttacaaataacaaacatatagaaaaatttaactgtaaggcagacatactaatgaactatgcatactcatgtaggacatactccagtccagaaccactttcctgtaataaacaaatcaaaataagatcataaaagtgaagtgccaggagcccaaaaacttgccagaatcaggagcaagctcaggaaaacaagtttaacaaaccactactgacacttcaaaaatagatggacgagaaatgaataactgatatcagtatcactaagcagaaaaatagcaatgtcttttaaccaaactacctacagcaggtggattattcaaacttaaaatcaaatacagccaaggctcacaatttgaacagggttgaaacaaacctggaaacttcgatgtgaaatactccctccgtcccataatatagttctttctagccctcttttttttgttcacattcaaataagtgataatgaatagacagacatacaaactacatccatagatcaatgtgaaatactccctccgtcccataatatagttctttctagccctctttttttttattcacattcaaataagtgataatgaatagacagacatacaaactacatccatagatcaattaatcaatatgtgtttgatctaaaacgaattatattttgggacaggagggagtataaaatagatgacgcaaaaaagagggacttgcatactacacgcacacccctacacccgaaaatagacgacgcaaaaagagggacttgcatactacacacgcacgcacacacacattcattgttgcagaggttgagacgttcttcctcatctatttgttaattatctatagagaat

SEQ ID NO: 30191 - DNA, 9673 bp, Zea Mays
cttctctcttttgtctgcttagtcagctctctcccccttccattctctgcttagtctgctatccttggagacttggacacgcctatgacttgtctcaccggcagctacctaggggccggagatgagcacctcttctgaaggtacctaactcagtctcatgtcattttgtgttcagtatagtactttagttcagagtttcagactgaacactgaagagatccatggtgatggacgaattgctgctgttgacctgttgttgcatctctaattctaagtatattctatatttatactctatagttctatattatataaataattaattatatactgttatatacaatgttatatatcaatatacagtgttatacacttatactgttatatgtgcgtatatatatagtgttatattgtcctgggctaaaagccttaccgccccctgaatcaatggagcctccccacccctccccgccccaccccatctcccgccctcacggcgtctccaacagccctccgccggtgtccactccggagccggtgtccactccagcagcagctccctcaggtggggcgtcactctaccttcctcaggcgggacgtccgaagcttcggcggtggattgacacctcccctgcctcgtcgtcgggggggtcctgtcagggaggccttggcactcgctgctcctcatcacctacccaggctccgacaacctttcttgaggcggttatcaagggacccatcaaggcagcctgtcccccgtcggtgcagaaattcccggaggttcacggcttaaagctagaggctttacgtcagtcctctgctccagaagccgggcgctgtcctgctactcaatacagcagggacgaagaagggtggcagctcgtggaacgcaggcggtctcggcaggttgagcgtgagcctcgtcgtaggtcccctgtggatctccgaggcaagtgctataagtgcctgtcgacctctcacttcgtggcggcgtgccgtagaccccctcgctgttttgggtgcctacatcttggccatcgcgtggcacagtgtcctacacacttcaagaaagagaagaagccgctcaaggagagactgggttcgcgggcgcctcgcacctcggtttggcagcgtattatcatggaagacggtggccgggccttgactccaactcaggcgaatccaactcagttgattccaacgaagcttccggtctggcgtcgtctctcccctccagtgtcttcagaggtaccccctcctctggccatggcggttggcagtgacataccccataagagaaaaaggcgtcgcggaaaagggggtcgggcagacccgcaagtgaagcatccctcaggatcagctggagaagacgacgctcatccggcaacggccactcacaacatggttgccaggccttcttgtgtattggatttttcctccgacatggcacgagaagaggcggcgcttcgccgcgctttgtttgtcacgatcattggtacaaggccagaggtgttaggctctgaagtcattgaagaagtggcacgaagttttgagatcgaggcagattccatgtccattcatcagaccttcccggaggatttcatcctgattctctcggatgaggatgctgcaacaaaggtgctcaatggaggaagagttctcagagggcctcagtttcatattcagttcaagcgctggacaaggctggctcatgcaacggcagctgcattgccgtcgctggtcgacatcgagatacaagggattccgttgcacgcttgggggcggtccacagctgaacagctacttggtaattcctgttggatcatagatgtgcacccggatacttccctgaaaagtgatttttcagccttcaggcttcgggcttggtgttgcgagttagagaagcttcaacgtgccatgaatctggtcattgctgagccaacgccagcggatcatgtgaaacggtgtttatcctacagtattgaagtgactgtcaccccagtcgagaagccactgtcagatgggactccacctcctcctcctggcaacgacaacaggcatgaagatggcgatcgtcgccgtcctgaggctccatcccctcgacgccggcgagaagaccttcagaggggacccatccaccaacgtctgggccctcatgctcctgtgaatgactgtggtaggggctctgctaatcacaatacaagcgttgcacccgaggcgccaagatctgttgagacagcgacggttcaggtcccaagggcaacaagatctggagaggcagcgacggtccaggttcctactttggacgatgaagtcttttcagcgccccttcctgttcttgagttgtcggctctctcgggggacgtgttccggccggcggctgttggggtaaagagccatgggggtgaagccgaagaaaaaaattgtttccgtcccgaggttgcctcgggcctcatgtctgggacacgcgtacagccgcccaacagtaatgaggcactcctggcagttgaagtggttgggccgctggaatgggccaggcaaacctcgccccagctgtctgggctgctgatggttcctgggccggtttcgccccactcactcctgcgtaataatctgctgggcagttctgttttggatgggccgctggaatctggtgcgttggtttcgccccagcatacctttgctgggtcgctggaactgagcgtccaaatttcgccccctccagagcctgcttgggccctcagcttagttgcagcccagaataaaaatttaactggccagggcagtacgtccctaaaagtttatactaggaggacagctgataacaggtggcaaaagtatgattctcaggattccccactcattcaagcccttcagccaaatcaagtctcttctcctctagaacagaatggtattggaaatgcagtccaagcctttgttgacaaagtaaccaggaaggtggatggtctgctccctccaccactcccccacagaagacgatccaagcaacttccatctgacttcatcccacgcagaagcagtcgcctggcaaagcgagatgacaaaacaaatgctgcacgaagacagattcaagctgacctgataagaagcctggatgtgccttgcgatggagagttgttaagtcctaaagcccttgaagcttatggcaacttgttcaaaaactcactctctgaagctcatatcaaagcactgtcagccctctttggatggacagtcccagatgtttttgaacctgttaatgtgttgtgtatcgccgggcaaggcccagaagaccttgagtaaggttgctgttctagcagcacctagtggttttatttggtttttcctatggatccttcaaaggttttgttttggaatgtaaggggtctgaacaataaggcaagaagagactcagtgcgtgttgtgattgataacactaagcctgatattgtctgtttgcaagaaacaaagaaagcatccatttctcggcatatgattctctctctgttaggctctgattttgtagagtatgttgttcttccggcggctggtacgcgggggggaattattttggcttggaggatttcggtctgcaagatgctccaaactagaatagacaatttttcagtctctgttcaattccagcagcaggatggtgtggcttggtggtttacgggtgtttatggtccccaactcgatgagcataaaattcaatttcttaatgagctgcgcctgattcgatctcagtgcctcggttcgtggatgattggtggggacttcaacctaatatatagagctgaggacaagagcaacgacaatcttgatagagctatgatgggaaggtttaggcggctgcttaatgacttgcttctaaaggaactgcccctttcaggtaggaagttcacctggtccaatgaacgggcttcacctactttggctcgcctggatcggattttctgtacagcagattgggaggacatgtttccaaattgtctcttgcagagctctgcatcccagatttctgatcattgtccattgctattggggctacatgatctcgtccaaggaaaaagaagatttcattttgaaagtttctggatcagattagaggggttcttggaagaggtggaaaactcttggtcacaacctctggaagtctgctgccccttgcagcggttccatgccaagctaaaaaggcttgcaaggcaccttcaagcctggagtcagaaaaaagtgggcaacattaagcagcagattctgttggcaaatgagatccttcacaggctggaaatcgctcgcgacgaaaggaatttgtctccctctgaggaatggctacgtcgctcccttaagcaccactctttggctttagcctccttggaaagaactgttgcccgagtaagaagtggactgcactggctgaaagaaggagatgccaacactgcctattttcatcaccacgccaggcacaggaaaaagaaaaacttcattggaaaactgatggtcgataacagagtaatttctgagcagcaggaaaagaaagaggtaatctgggatttctataacaagttacttgggacagcagcccccagggagtcaactttaaatctggaagaatttcatcgtcctgccctggacctttctgctcttgatcaaaatttctctatggaggaggtctgggcagcaattaaaactctccctgctgacaaagctccagggccggatggatacaccggaaaattttataaaatatcttggccaatcatcaaagaggatgttatggaggcgttaaatagggtgctacaaggtgatgtatccaaacttcatctccttaactcagcttatgtgactctactgcccaagaaagctgaagcattggaagtcaaagatttcaggcccatcagtttaattcacagctttgcaaaaattgttacaaagactctggctaacagattggcctccagacttcctgagatagtgtcagcaaatcaaagcgcttttataaaaggaagatgcatccatgacaatttcattttggtccagcagacggccaaggctgttcagaagcagcgggttcctagaattcttctgaaattggatattggtaaagcctttgattcgatttcatggcctttccttcttgaggtgttaacgcaccttggttttggttctgtatggtgtaatatcatttccaagatgctcctttcttcctcaactagggtgctggttaatggagagccaggggaaatcattcaccaccatagggggctaaggcagggggatcctctatccccaatgttatttattattgttatggatgtgctgaattctcttgttttaagagcccaagaattgagtcttttacaaccggtgctaagaagaggaaatgggcaacgtatctctctatatgccgaggatgtggtgatgttcttgcagccaagtagagaagaactcagtgtggtcaaagaaattctgagaatctttggagatgcttcaggacttgttacaaatgtgagcaaatgcagtatgacacccattcattgtgaggaacaagacatggtggccgcgcaggagttttttccttgtactgaggtggcttttccattcaaatacctgggtttacccctttcagtcaagaaactccccaaaaatatttttctagaactcattgacaagatagctgataaactaaccggatggaaatctgccctcattcacacagcaggccggctgaccttggttaaatcagtgctcacagccattcctatccatcaccttatagtgcttcaatgcccaaaatgggtgatcaaggctattgacaaaattcggaggggtttcctgtggaaaggcagaaaagatatcagaggtggtcactgctctgttggttgggcaagagtttgcagaccacttagcatgggtggcctgggtatccataaccttgaagttcttggatgggctttaaatctaagatggctttggctcaaaaaaactcaaccagaaaggccctgggcagatttcttgttcaaggttcattccaatgtcgaagctcttttctctgcctcggtccacactactgtaggtgatggctctcgaaccctgttctggactgatcgctggattcatgggcaatcaatatctgcccttgcccccactttggtcagccatattacagtgagaatcaagaaaagcagatctgtgcaggaagccttggtaaacaatagatgggttaatgacatatctggcagcctgtcagcccagattatcatcgacttcttagtaatttgggacctagtgcaaggttttcagttacatccggggattcctgatgtgcatagatggtccccgtctgcatctggagattattccactaaatcggcatatgacctttttttggctggttcagtctcttttgagccggctactagaatttggaaaagttgggcccccccaaggtgtaaattcttcatttggttggcttctctaaatcgttgctggacagcggatagattaagcagacgtggtcttgcgcatcctgtaaggtgccccctttgtgaccagcaggaggaaacagttcagcatattttagtggcttgtgtgtttgccagagacacttggtggcagactttgcataaggtagggctgcatcgcctgactccaggattggcaacaacgaccttccaagactggtggagagaagctgagtgccaggtgccaaaaaaccagaaaagaggatttaattccttagtgattctggtggcttggtggctttggaagcatagaaatgaatgtgtgtttgatggtgcatcccccaacatcagcatcatcatgcagcatattcatgaggatgctgttcggtggggcttggcaggggcaagagatcttaggagattatggccttaggtgctggtgtggctgggggttttttatttcttcttttttttctgtcttgatctatttttttggcagtttgtactgggtctattttagacctctatctcctttttcttaatatataagatgcgcagttctcctgcgcgttcgataaaaaaaaatattgtcctgggctcctggcgactaggacactaggtggatgactagggtcgatcagggcgactaatcgccctgatcgtcgccctaaaaatcacccaggccaaacgatcagccgatctgaaatcacgctgttttgaagtgtttgagatatttgagcgcgtttctgagctgcaacaccgtcgttctttgttcttgcactctctttggcttgtgtgcatgttgttgctgcggttgtgctcttgaatgtgtactctactccctcccttactccgtttttgattgagatcacttgttaaaggcgtgagagactccaacgtgtagagattcctcacaaacgggattgagttataaggaagacatatgtggcactcaagtttgatctttggatcacttgagaggggttgagtgcaacccttgaccaaaggaggtcaccacaacgtggagtaggccatcgccgaaccatggcaaaaatcattgtgtctcttgtctctttactttattgcgattattgtcttcttgagtactcatattcacttaaatattgctcctagtttaatacccatcttaaagtgagcaatcaagtgaggagttctcatctctcttcttcctactcccaaacttggcttttatttcctctaacccaagtttgtgttgttttgagcaaaaattacaggatcacctattcaccccaccctcctctaggtgctctcaatggagtcatcaggtgcaatagctctgggcccctttacccgttgcgccttcctgctgctggtgctcttcgtgcctctgtgaccacgtccctatggcaccaccatctcggacatcctagccctaaaaccctctccaatcttatgcatgcttccttaattccgcattgtaatgagaacaccaattcagccttgtgtttcaacttggccgccatactcttcttcctattcacgtatctttgtaatgggcaacacagaattttgatctagttcattgtgagttgtggacctcccctattgctagcgtttctgaatacaaatattacttggtcattcttgatggctgctcacattatgtttgtatgtttccacaactcaaggctgacacctttacttaacttttttgcttatgtctccacccattttggcgccaccattaaggcagttaagtgcgacaatggtcacaagttcgacaactccagcgcccgtgtgttcttccttagccatggtgtccacctccagatgtcatgtccctacacctccgctcaaaacaaggttgaacgcatgattcactctatgaatgatgtctctttgctcttttaggcttccgttccactttcctactgggtccaggccttgcaccacgctatctgcctccgcaacatcctacccgctaagagacttgacgattccatgccgcaccaagcctctttggatccatgcctgtgttcaatcatcttcatgtctttggttgtgcctgctatcttaacctctttgccattgctgctcacaagttagctcatgttccacgttgtgcaacttccttggctattctaacaatcacagagtactgatgtcttgatcccacttctaacagggtcatcatctctcgatatgacatcgttgacgaacattgctttccctttgcaactcagtctgcctctcaggctctggcgggtctctcctttctggatgattttgctaatgttgtgttgttgcccataggcccggctcactctttgctccctacaggctcgacgccatctgcaacgccttcgatggaagggtacttgtgtctttgatcccacttccaacaagggcatcatctctcaatatgtcatctttgattaacattactctcgttttgcgactcagtgtacctctcaggttctgatggatctctcctctctagatgattttgctaaatatcgtgcaactgcgcataggcccatctcgttctttgctccctacaggttcagtatcatttgtagcgccttcgacaaaggtgacgtgggaccccgccccacatcccacacaaacatgtgtggccccagcaaccctgcagtccgcacaaccacatgtggccacgacttcgtctgctgactagctcttacaaccacatgcggctcaggcctaggcgcctccagtccagtgcgaccagatggagctaacacaccaaagcggacacatctcccaccaccaacagtgtttgtgtccttaccagcaacaccaagagcatggttccaaacattccaccaaattcttcctcagctgatggaagaaaggtgcagggaactgctcacaagaatgcataaccaggatggaaaagtgagcattagcatcaatgtcgagagaaagcaccaaatcacttgcccactaaaggagggttgttgccatgtctttgctgcatcaataacttcatgctaacagatacagttggacaacttacaaaagattggggacctaaatatatggtttttaagttcaaaggcctactttaatcgttcatgcaaacttagaacctgcagcgcaatttacttttatgttttttgtgactaatggagtgtgtagaaaaggctatcctgtaatcagaattaaccatttcctacttgcaatgcggtacagaaggaatatctaat

SEQ ID NO: 30192 - DNA, 1106 bp, Zea Mays
cgttaatgctaggcccgagatccaccgaccaatccgttagagctctctacccagttacccacacgaaggaataataggctaggccgccgaccgccgccatcgagtcccactcgcacgccgccttcatccccctgtgcagcaggactgggtcttctaagaagcatgacctcaaatctaagcaaaaattggaaaagaagattagtttttacacaaaaaaataaacagagtcggcgccagaagaagcttaaagcatacgatctgtcggcactttctgagttcctcccagaaccagctgcaccagagcagaagactgaagcaaagctgaactgcaagtcaagacagacattagtggtgcaggagtctgctcatcttaaggctgtactggacaacccgcagttccagcttgacccattcgctgcgatccatcagcacctgctggcaacgcagccgcctgcagctgcaaagaaggacgacgcagcggggaagcaggggaaggtttccaaggacaagaaaagcaggaggaagaagggcacatcgtcaatctctcaggcaatggatatctgattgtgttccttcagtactagtaacttggtccgatgtcgactgcccgtgttccactagagggagctcatcgaagttcgatatcgatggttggcatagtttgagtaccagtagaggtagtactgtaccagccctcgcttttggcagcctgtcgattgatgtttgcagaatcggtgccatcaacatttggtgctactttggaaactggggatttgaggagaggattgagggagaaaatgaacttgaggggattgagagggtcaatcctatattcctatatgaggtggcaatttccaagcacaacaattcatttgttattatacctgccgactgtttctgaatccagctcaactgttgtaggaagcttggaaacaagcgctccaatttcatacgtttgatatggttttagctgaaagttcgcagggacgtggcatgttcagttccgatcaatctaaccgatgaaatccaaaactgacgaggtccaggccgctctatttacagcatctaataccgactacacattcgtgaataacactggacaaaaa

SEQ ID NO: 30193 - DNA, 3160 bp, Zea Mays
atgaaattactgcgttacctaaaactacttcgcgcagctatcagtgttaagccgggtaagccagttttgacgaagcaaaacaaagtagaaatatgaattacccctcatgaactgtatcaacaccagcattgctctccttttctttttccttttttttttttgagtcccagcctacggacgccacctttaatcatgggccagacatgctttgagcttccatcataagaatattcctaaacacggtcccgttatccaaagaaaatgcccaagatgatacacaattagtataacagagagcacacaaatggttaaactaattcattattcatatacccacaatattaagtaagcacgcgatactaccaccttccaagtctcaacagcaaactaattaccttaactagctactacctcacacgttaacaacccagtagtccagtacagtcagtggccactagggaaatgataattttacatggagtacactaaggcagcatcatgccctctcctcctaggcttctgtccaacaactgagttctagaacccattccaccgaaaatcgcacaactttatcaggggaacacttcattagcgtcaaccattgaggcgctccaaggtctccgcaacatgcctcatcgacggcctccgctctggattcgcctgaacgcatgcaagggcgactttcagcactgcgatcatctcaccttcctgttcagaatcctgggcaagaaaagggtccagcacatcggcagaaggtttcttgtcttcgatgcagaattggacccattgaacaagatccatctgcatggtttccaagagaacagagggcgaccggccagtgatcatttcaagcaacaccacgccataggagtaaacgtcccatttctgggagggcttcagtgtcttcagcgcttccggagcttggtagcatgaccctttgctcatgagagggctcactgaggcatctatttgctgaatctgctccttttctaattcaacttggtctgattgcaaaaatggtgatgcgccagcaatgtttgcaagtcgcccaaggccgaaatctgaaatgaacggctccatatttgtcccaaggaggacattgtttggcctcaagtcaccatggacatactttttggggctgaattcatgcaggacagacatccccttggcaactcctttcatgatctttattcgggcttcccatggcaacgggatgaatgtcatcaacccaggtttacctgtaagccatggcaatttgtcagagtaagcaatcagccaacaccactagcaagcccgtacctatattttttgggcccttggagcgaaacacaggctgaggcggcctttttcgcttttcatacaaatcttatttgtaatttttaaagatgtgacgataaaattgatctctatttcacgaggaactagggacaaaataattaattaaactactacatacctagcaaaatgaatacattatttaattaatggggcctagtttattgtaatcgttagtgacgtcattaaaaatactagtgtttcattggctaatacatacataatgctgctggaatcaattttttttgaaagatcaggaggggaaacccctactgttaaattttattaataatttaaaggtacaactcggcgtgattacaagagttagaggttagctggtaagatctaattaaagagctacaaagagtgaccagagcaatacaaaagttattgctgccactgatccagccagttcggaattgagttgtcatatttccctcgcgctctgtgtacaaccgtccgtaattccttgctgaattcattcttacagtgatgtactgaagggtctttgttttcaaataaccattcatttcgacttttccaaatgctccatgtcatgagtataatgatctccatagaaaaaggaacgttaagttgttgcttgagatttgccgaggcctcctctggttgagcaattctgggggggggggtatgccaattgtattccaacaggcttttgcaaaattgcatctgagaaacaggtgataaagagtctcctccctttgccataaacagttctcacatgaatatgactctagtgtcatgtttttcctttacagcatattcctagtgttgagtctgtttttaagccataaccaatagaaaactttatgctttggttgacatttgtttttccatagacacttgtaaatagaatgaacttgtgtctgccccattaggtgtctgtaggccttttttgttgaataactgtctgaatcccatatgtatctccatcggtcctttacagtgcttagatcaatttgctcccagactacatgtaactccaaatactgttcgtaggcttgttcacaaataggcaattgaaaaatacgaaataagtgatcttgctctttagcctctgcgatagaaagttttgtgctttttgcaaaagagaataattctggatattgttgacttggaatactcttattccactgatcttcccagaaaaggattgatctaccattgccaatgattgggtacgccaatcccttaaaattatgaaaagtttcaacatacttttccaccagaaggagccaattcttttatgaccaggaagtctgccaggcgtatagtagttattccaaatgatatttacccatggtaaatcatgactattgaagaacttgtggaagaattttaggagaagagcatcattttgagtttctaggcgtatcaccccgagtcctccactgacttttcgtttagtaatcgtggaccatgcaaccagcggcggcttttttgagcttgtgtcattccccctccaaagacaatgcttcctgtaaatgtctatctgtttaatgatagaacttgggattttgagcgtacacataaaaaaagttggcaaggctgaaaacaccgagtttactaactccaaacgcccagcctgagatagaaaattggaagtacatgacaatctcttttcaattctttggattaaaggtaggaactgctgaagtctaggctttgaaagacccaaaggcaatccaaggtaagtgaaaggcattgcacctgtctgacaattgagagttcttgataggatctccatcttctcagggttaacatttatcggatacatacttgatttgttataattgaccctaag

SEQ ID NO: 30194 - DNA, 6955 bp, Zea Mays
gaacaagtgaccttaggcacaattttctgagaaaataggaccgtacagaccaacatggatgttcagtaatatgggtggtggcattcgaaagggcagttcaagaaacagctacatgcacacgcacaaagaacaagacatggtgaaggtgaatccatacagccaccaacccaaactgataagaacaatctagcattttctatactacataatgatattttcatgtgaagtaaaaacaacacgatactaaaataatttatagttggaaaatcatgacattttttatatctctaagatgactaaggtagtgcccaacagaacaaaacatgtattcaaaaggaaccacatcatatatagattttaaaaaacataaacatgtacaatcgaggccggttttattgggtgatttagatgtatcttgaaaaggagataccatgcaatgaaccaaattgtgtaaccagttttagctacagtacaattgaagaagctcatgtgtcagtagcaacctaaaaagcctgatttcttgcacagcaatcttgtttagaagcagaacatatgtggaggccaaagcattagtctaggagttaaaactcactatagctaacattaatgatggcaggtttgtctcgattatgcaataactttctctggaaattatcacaatctatttctctagacatggcacaatctatttctatagacataagggtgtcaactgacacaatccattctgtacattcttgctgctttgaatactgaataatgggactcacgagaagcaaacaatattccatcagggaacacctccctcctgtaaaatagtttttaaagatgattaagagcagaagtgacatttcacataagcagtgaaagtagcaaatatttcacaagtattacccaacaagaatcccatgcagattttcttttgtaccacaattagtaatatatccccagtactcatccttttctaactcctagaggcgagcaaacccatgttggcgtcatcaactacatgggattcttgtttgggccgctgggctccatcgaattcttggggcccagcagtataagtaggattttggaattacacctacatttttatcatggaaacccagctagaatcagttgggatgatatccatggcagcagatcttttgttgagtttatgaatcaaagatttgagtattcgttgtgacgcatagacttgttggacataatatatacttgctcaaaagtacaatgaggcaaggtgacacacttcagcattgctctctgcattcttgacaagatccaacaccgcaacagtacctacagatgatcttccagattacatatttacatggactggcctcatgttgtttacatggaaaggcaaagttgtttacagaatgcgcctatgcaatgtacagaatgctgaactatcgttgtcgtctacgctctataaccagggagggtgtaacagactcactggaaaactgctcagtatcagcactcaatagctttaagccattaattgatgcatgcaggcgatgctttgctcgttgttcatgtgggaagttacacggacaagaatatgcaaatgaactggatcgatccaaacttccaaagcatgtgttgtactactatgttcacattctttttaagtcatatttgtaaagggcgacctaaggtgttagtctagactgatccaagatctaaatatctaatcatgcttttactccttcgcgctcagcgcttgccttctgccaaatgcgcatctaaatcaaatagctctctacgctagtcggtgtgtgtgtgtgctgcggtgcagctgcctgttcttcattaggtgtggtcactggtcaggagcttgctttcgtgtcaactgcatggttattaaaacgacgtttaaatgtcgtttaaactataaaacgctgatagaacagcgaaacgttgaaacgttttagacttcctcgtaaaacgtcatttaacgacgtttaaacgtcacgttttgacgtttaaacacgatatatagttaaacgccacgtttcgagcgtttaagttgcctgcttgtaaaatttggcctagcccaattagggattccgcctaggttacaattttgtgcttgacgaccttgacatggatgatgaagaagaaacaaacaacagtggtggctgtggtgatgagcaagacaaggatgatgttggtttagatgatttggatgatggttattgagtgcttgagtaatacttgtgtgcttgtggttgtggacattgcattctacttttgattttgtgctatgtttgtgattgtggactattagacatctcattccactttgtttgcggttgtcgacttgctattagttgaaacttgtgtttattgtggtaatgtggttgtggacatgtcattttgcacaatattattatgtgaacttatgttggttgtttggtatttgactttatataattgtctaaaattatgatatattgaaatttccctatgttgtttaaaactacgtttaaactttgtttaaaccgtttaaaagttaaaactccacccattagcgtttcaacgtttcgtcgttttaataaccatggtcaactgtgatctgataaagctcattctttctcggatataacaacaaaaacatccttgggcgaccaccttcgccttgaaactttgtctattggattgattatggcacactcagctgcctcaagacggtacccaatgacaatctctttcctctacctagctcgcagaatgacttcaaagaaatttaattcctcttcttctctaaggtacagatcagaaggtcgtatttgcatttcatttcactgtaaagggtgcagttgcaaatacagattaaccagacagaaacatgagaagacacatgattcaaaagcagccaagatgctaacttagaaatataattaggcaaagcggagcatgagaagaatcatatttctaaagaataaaaggaaaaaagtgaacttgaataaaactgtctaatcataatagtccacagctattcacatagttcttcagtctacatatgggatttcataggtaaggttaacccgcaactgtcaaatctcatttgggagggcggggcggaggaagtggaggagggtcgtgctcatcgccgtcgctgttggctatcacgatcgagagaatggcttggggaggggatggaggtggaggacccacaatacccttcaaatgtggtaattactgtgacaagcccgcaacatatgatccaatcgctcaacccgcgtgagaaactccagacgcctcgcatctctagcgcttctccgcgatcaccaaaggttcataaaccagcgtgtgattcagcatcgcaaccgcgcacgaacccatacccagccgttcgatttcccccgctgcctgcttcccgtgcccccaaattgagccacccatgtcaccaaccccactccaacagtctcgaaaccacgggaacccccaaggggtgccgcacagctgagagcagcaaatttcgggccacgcccgacggaacggatcgaggaggcacgagttagggctcgaatcacctggttgggcgagacggaggtcgaggagtccatggcgagcctgcccgcagacgcgacagcctccgccattcctctacagcatccgccgggccgagccctcgattggatccaaacccaagcgagcaacgcaaacacacaaggacgggaattaggtgaaagaaaaaggaatgagcgcgggtttatgtgagaggaaaaatgaagggggcgtcggtgcagaggcgatgaggaagggagagcatcacgcgcggagagagcgggcgtagtttagggctggggtgttacgggacggaggcaggcggaggcacggtgaaatattgtggacgctctcgttggatccttatagagtagtagagatttcaaatgggtcttattcgcgagagctagaccatagccaacacaacagtggattacgttaccccgtggcccacaagtcattcgtacgccgctgatcgatacatgtggaccagcccgactcctttccttttcttcccaatcctcctctctttcttacgccctccggattcgttgcctcgctcgcgtcgccccttcccaccccgggcctgcgtggttcaaggaattggaggcaacctaatcggcggtcaggaatgcttcaagagttcgtcgacaacgtcatcgccgtcacaaaggaatctgtgaagacatttacatatgagtcactgaacaacattgcaaggttcataaatggaatgtcagcactcctattgacactattacctggaaaaggcaacattttagaagggataaatggctgggaacttaagccagcactccgtgggccgcgtcttcctcgttggatggaaagtggggtatcttcgtttaatgagttcatccatgaactttctgttgattctgatgctgattcaattgctgactctgtcgctggggacgatgatcatgaagagtttgtctgccctccgtctccattgtcccaaagttcacggttatcacatgcaagcagctttggtagacatgatcgtcgactcaggagacatatcagatatgcagtttcttggatactatggccattgagattctttgtttctttaatattcattttgttcaatgccattaaatttcggatggtaagatcaactgctaaaggtgctgaaactcctcacctctcaagaactggtcttgccaagaaatcatttcatataagggaccagtttctccaacgcacaactgataggaggcgtggagtttttgaggatctgcatctggcaattgagattttcatcgaatcagtctttgacatcgttcacaaagcagcacattatattctttctccttcagaagtgtggcagaacctgttttgctggattcaaggaagtggtcatgatactagttctgtcgttgatgtattgactgctaatgttggcagtgataatcctgttccaacagagaggaagactgtgtatcgtcattctctgaacacagattcccggacatgtgaagatgttattactgagcttgggtatccttttgaggctataaaggttgttacttcagatgggtatgtcgtgttactggagagaattccaaggcgtgattcgcagaaggttgttttgttgcaacatggaatattggactcatctatgggctgggtgtcaaatggtgttgttggctcaccagcatttgcagcttatgatcaaggttatgatgttttccttggaaatcttcgtggcttggtctcaagggagcatatagataaaagtatttcctcctacaaatactggaaatattctgttaatgagcatgggactaaagatatgccagcaattattgaggaaattcacaagatcaaaatatcggaacttggcaaaagtcagcctcaatcagcagaggggacaggagatcaaaatgataagttaaaaagtttggaagtacaggcttcacaggaagacagtatagaagaccaaccctacaagctttgtgctgtatgtcacagcctgggtggtgcagttatgctgatgtatgtggttacttcaaggatcacacaaaagccccacagattgtctagactggtcctgctatctcctgcaggttttcatgaggattccaatgtggtattcagtatggtagagaagctcatcttgtttgttggtccagtgcttgcaccacttattcctggactttacataccaactcggttctttaggatgcttctgaacaaattagcaagggatttccacaattatccagctttgggtggacttgtccagacccttatgggctatgtcgttggcggtgacagttcaaattgggtaggagtgctcggtttgccccactacaacatggatgacatgcctggtgtgtcatttcatgttgcgcttcaccttgcccagataaagagggcaaagaagttccaaatgtatgactacggtagctctgcagcaaatattgaagcgtacggaacaccggaaccattggacttgggagctcattatggtctcattgacattcctgtggacttagtcgctgggcagagggacagagttatctcaccatccatggtaaagaagcactacaagctgatgcggaagtcaggggtggaggtttcatacaatgagtttgagtatgctcatttggatttcacattctcgcatagggaggagcttttgtcctatgttatgtcccgcctacttttagtgactgatccaggtaaaggccgtatcaagcagaccaccgtgcgactcaggaggcagaagaaagttcagtcagagattgaggagagcattgagtgcagagccaaggaggaatctgatgaactagctggacatttggagtgatgtggagcctgcaggttaagagtgtgttgtaagtttgtgaataggatactcgtgtcgtctctcatatgttatacaccatgtggaagatcaggggagaataggtctctgtttctagtatcatgttcatggggatcgctttttttaacccctgtaagtaacagtagaggtatatgcatcgactccgttgagcattaggtgtcctgctcttttaagtatcgagaacgaggagaatggtcaggaaccggatgtttacctggcaaatatccagtgttcttgcgacttcttttgtagaatgtcacagccattcaaaggatgtgatgtcaggcgtgcaagcgatggacagtatgttttctgcatatgttatggacagtatgtttcaactaaaacgtttttggtttggaaccaattgttactgttgcatgagtgttattgagcatggataattagcatagaaatgtaattctagtttcactggaatggaagaaagcttgttcactagaacgtaaaattggatctggacgctcctgaagaccggatcttgtaaaattagggtctgtgatccgttcttttgttttctccagcccccatgaacactgc

SEQ ID NO: 30195 - DNA, 2990 bp, Zea Mays
cgactcctttccttttcttcccaatcctcctctctttcttacgccctccggattcgttgcctcgctcgcgtcgccccttcccaccccgggcctgcgtggttcaaggaattggaggcaacctaatcggcggtcaggaatgcttcaagagttcgtcgacaacgtcatcgccgtcacaaaggaatctgtgaagacatttacatatgagtcactgaacaacattgcaaggttcataaatggaatgtcagcactcctattgacactattacctggaaaaggcaacattttagaagggataaatggctgggaacttaagccagcactccgtgggccgcgtcttcctcgttggatggaaaggtaacatagttttactctgttctgacaacttcattccttcttttgaacatagtggggtatcttcgtttaatgagttcatccatgaactttctgttgattctgatgctgattcaattgctgactctgtcgctggggacgatgatcatgaagagtttgtctgccctccgtctccattgtcccaaagttcacggttatcacatgcaagcagctttggtagacatgatcgtcgactcaggagacatatcagatatgcagtttcttggatactatggccattgagattctttgtttctttaatattcattttgttcaatgccattaaatttcggatggtaagatcaactgctaaaggtgctgaaactcctcacctctcaagaactggtcttgccaagaaatcatttcatataagggaccagtttctccaacgcacaactgataggaggcgtggagtttttgaggatctgcatctggcaattgagattttcatcgaatcagtctttgacatcgttcacaaagcagcacattatattctttctccttcagaagtgtggcagaacctgttttgctggattcaaggaagtggtcatgatactagttctgtcgttgatgtattgactgctaatgttggcagtgataatcctgttccaacagagaggaagactgtgtatcgtcattctctgaacacagattcccggacatgtgaagatgttattactgagcttgggtatccttttgaggctataaaggttgttacttcagatgggtatgtcgtgttactggagagaattccaaggcgtgattcgcagaaggttgttttgttgcaacatggaatattggactcatctatgggctgggtgtcaaatggtgttgttggctcaccagcatttgcagcttatgatcaaggttatgatgttttccttggaaatcttcgtggcttggtctcaagggagcatatagataaaagtatttcctcctacaaatactggaaatattctgttaatgagcatgggactaaagatatgccagcaattattgaggaaattcacaagatcaaaatatcggaacttggcaaaagtcagcctcaatcagcagaggggacaggagatcaaaatgataagttaaaaagtttggaagtacaggcttcacaggaagacagtatagaagaccaaccctacaagctttgtgctgtatgtcacagcctgggtggtgcagttatgctgatgtatgtggttacttcaaggatcacacaaaagccccacagattgtctagactggtcctgctatctcctgcaggttttcatgaggattccaatgtggtattcagtatggtagagaagctcatcttgtttgttggtccagtgcttgcaccacttattcctggactttacataccaactcggttctttaggatgcttctgaacaaattagcaagggatttccacaattatccagctttgggtggacttgtccagacccttatgggctatgtcgttggcggtgacagttcaaattgggtaggagtgctcggtttgccccactacaacatggatgacatgcctggtgtgtcatttcatgttgcgcttcaccttgcccagataaagagggcaaagaagttccaaatgtatgactacggtagctctgcagcaaatattgaagcgtacggaacaccggaaccattggacttgggagctcattatggtctcattgacattcctgtggacttagtcgctgggcagagggacagagttatctcaccatccatggtaaagaagcactacaagctgatgcggaagtcaggggtggaggtttcatacaatgagtttgagtatgctcatttggatttcacattctcgcatagggaggagcttttgtcctatgttatgtcccgcctacttttagtgactgatccaggtaaaggccgtatcaagcagaccaccgtgcgactcaggaggcagaagaaagttcagtcagagattgaggagagcattgagtgcagagccaaggaggaatctgatgaactagctggacatttggagtgatgtggagcctgcaggttaagagtgtgttgtaagtttgtgaataggatactcgtgtcgtctctcatatgttatacaccatgtggaagatcaggggagaataggtctctgtttctagtatcatgttcatggggatcgctttttttaacccctgtaagtaacagtagaggtatatgcatcgactccgttgagcattaggtgtcctgctcttttaagtatcgagaacgaggagaatggtcaggaaccggatgtttacctggcaaatatccagtgttcttgcgacttcttttgtagaatgtcacagccattcaaaggatgtgatgtcaggcgtgcaagcgatggacagtatgttttctgcatatgttatggacagtatgtttcaactaaaacgtttttggtttggaaccaattgttactgttgcatgagtgttattgagcatggataattagcatagaaatgtaattctagtttcactggaatggaagaaagcttgttcactagaacgtaaaattggatctggacgctcctgaagaccggatcttgtaaaattagggtctgtgatccgttcttttgttttctccagcccccatgaacactgc

SEQ ID NO: 30196 - DNA, 2812 bp, Zea Mays
cgactcctttccttttcttcccaatcctcctctctttcttacgccctccggattcgttgcctcgctcgcgtcgccccttcccaccccgggcctgcgtggttcaaggaattggaggcaacctaatcggcggtcaggaatgcttcaagagttcgtcgacaacgtcatcgccgtcacaaaggaatctgtgaagacatttacatatgagtcactgaacaacattgcaaggttcataaatggaatgtcagcactcctattgacactattacctggaaaaggcaacattttagaagggataaatggctgggaacttaagccagcactccgtgggccgcgtcttcctcgttggatggaaagtggggtatcttcgtttaatgagttcatccatgaactttctgttgattctgatgctgattcaattgctgactctgtcgctggggacgatgatcatgaagagtttgtctgccctccgtctccattgtcccaaagttcacggttatcacatgcaagcagctttggtagacatgatcgtcgactcaggagacatatcagatatgcagtttcttggatactatggccattgagattctttgtttctttaatattcattttgttcaatgccattaaatttcggatggatctgcatctggcaattgagattttcatcgaatcagtctttgacatcgttcacaaagcagcacattatattctttctccttcagaagtgtggcagaacctgttttgctggattcaaggaagtggtcatgatactagttctgtcgttgatgtattgactgctaatgttggcagtgataatcctgttccaacagagaggaagactgtgtatcgtcattctctgaacacagattcccggacatgtgaagatgttattactgagcttgggtatccttttgaggctataaaggttgttacttcagatgggtatgtcgtgttactggagagaattccaaggcgtgattcgcagaaggttgttttgttgcaacatggaatattggactcatctatgggctgggtgtcaaatggtgttgttggctcaccagcatttgcagcttatgatcaaggttatgatgttttccttggaaatcttcgtggcttggtctcaagggagcatatagataaaagtatttcctcctacaaatactggaaatattctgttaatgagcatgggactaaagatatgccagcaattattgaggaaattcacaagatcaaaatatcggaacttggcaaaagtcagcctcaatcagcagaggggacaggagatcaaaatgataagttaaaaagtttggaagtacaggcttcacaggaagacagtatagaagaccaaccctacaagctttgtgctgtatgtcacagcctgggtggtgcagttatgctgatgtatgtggttacttcaaggatcacacaaaagccccacagattgtctagactggtcctgctatctcctgcaggttttcatgaggattccaatgtggtattcagtatggtagagaagctcatcttgtttgttggtccagtgcttgcaccacttattcctggactttacataccaactcggttctttaggatgcttctgaacaaattagcaagggatttccacaattatccagctttgggtggacttgtccagacccttatgggctatgtcgttggcggtgacagttcaaattgggtaggagtgctcggtttgccccactacaacatggatgacatgcctggtgtgtcatttcatgttgcgcttcaccttgcccagataaagagggcaaagaagttccaaatgtatgactacggtagctctgcagcaaatattgaagcgtacggaacaccggaaccattggacttgggagctcattatggtctcattgacattcctgtggacttagtcgctgggcagagggacagagttatctcaccatccatggtaaagaagcactacaagctgatgcggaagtcaggggtggaggtttcatacaatgagtttgagtatgctcatttggatttcacattctcgcatagggaggagcttttgtcctatgttatgtcccgcctacttttagtgactgatccaggtaaaggccgtatcaagcagaccaccgtgcgactcaggaggcagaagaaagttcagtcagagattgaggagagcattgagtgcagagccaaggaggaatctgatgaactagctggacatttggagtgatgtggagcctgcaggttaagagtgtgttgtaagtttgtgaataggatactcgtgtcgtctctcatatgttatacaccatgtggaagatcaggggagaataggtctctgtttctagtatcatgttcatggggatcgctttttttaacccctgtaagtaacagtagaggtatatgcatcgactccgttgagcattaggtgtcctgctcttttaagtatcgagaacgaggagaatggtcaggaaccggatgtttacctggcaaatatccagtgttcttgcgacttcttttgtagaatgtcacagccattcaaaggatgtgatgtcaggcgtgcaagcgatggacagtatgttttctgcatatgttatggacagtatgtttcaactaaaacgtttttggtttggaaccaattgttactgttgcatgagtgttattgagcatggataattagcatagaaatgtaattctagtttcactggaatggaagaaagcttgttcactagaacgtaaaattggatctggacgctcctgaagaccggatcttgtaaaattagggtctgtgatccgttcttttgttttctccagcccccatgaacactgc

SEQ ID NO: 30197 - DNA, 1183 bp, Zea Mays
ccgccctctccccctcagtgctctgctggtggcatcaccagtgatggcgttcgatccttgaaatgtacatgatgtgataagagtaagcgtcactagagaatgggaattccaaggcgcaacaaatgatggtcctctccatcatgtcaacatgatcatatccgatgaaccggtgatctatatccactcaaatacatttatggtagcaacatgttgtacctaatatgtttttttatcacctgttaatattgatgccagctgtacttatatcctctgatgtacttctacttagcaccatgttctaacttacacattgcttagtcacctctccagattgtacctttactcttttaaactaatatgtttattactaattttttacgaagtacaatcatgcaacatggactgtcaatgaatctaaataccatatcatttttctacaatgtcttctatttctactcatatgattctgttgtaccaatagggtacacctatccatgctaagattcaagtagataaagaatatgaactcatcttaagtctgtactatgttgtatactataatgttttatccggttgacaaccagcatcgtcactttaaatacaatcatactacagttctactaatacactgatttattgttctccatgcgcgcatgggcgcgcataatacactaatgtatacaagacagcctcagttcatctcctaacaaaaaagggggttaatattaggtgcatcttagcagatatgaaatatagtactatataagagagccacatgttacaagacaattgggttatagctacaagcttcgttatatgttctgccagcttcgttatatgttctgacatgagttacttttgtgttatgtagaaaaacaagaatcatgagtgcaatggcaaatggaaggtgaaggcccttttgattgacaacttaggaaaagatggaatggaactcaaattttggtggtcggtcaagtgtgtagagttgaaatcatatatacttagttaggctcaaatttagcgcaattcagttagtattttagtttggatttagagtacacttatgtatgagttatttagcaatgcttatttatgagatattgaatgatacttatctacattatattaactatagtgttgttaaatatatgtgtgtatgtatattataatgtggtatctcaaa

SEQ ID NO: 30198 - DNA, 2585 bp, Zea Mays
aaaaatcccacaattcatttcacttatcagtcgcgtcgcgtcgcgtcgcgtctctctctctcttccccgacacggaagtcactgtcctccgcggccccaccccgccccaccgccacacacaacacaccgcacactcccctgcgccaccttttcttccacagcttccaacgccagcccgagctcccattccaaaacatcactccctcgcgaaccccaagaactgcagcgacggcaatggcgatggcggcggagggcgcggcgagcgagccagagctggtgtcgatcccggcgacgccgcacggtctgtcgacgccggagggcgcggccacgccgaccggagcgggcgggggcggcggcggcaggagcaagggctccgggaccccagggcgtcgcgtggtggagggcctgcgcgggtacctggaggacgtgggccacctcacgcgcctcgacccgcgcgacgcctggctgcccgtcaccgagagccgcggcggcaacgcccgctacgccgctttccactccctcaacgccggcctcggcttccaggcacttctcctcccgctcgccttcccggacctcggctggagctgggggataatttcattgactattgcttatttctggcaactgtacacactgtggatcctagtgaagcttcatgaggctgtgccaggcaggaggtacaacagatatgttgagcttgcacaggcagcatttggtgagacattctctcaactatttttgccagttcatgacaattactactgattcctggatccatgaatgccactgacatgtcttcagtatatgaatgggtaatcactgtatgtcgccactgcccaactattctattgacagttcttgctgcttccaaataagaggtggagcgtgactgatgggggtagtgccaggctaatctaggaatgctcttttgttttcttcgcatttggatcatgatccacagctgcttctctgtcagataacatatcgctttcatgtcatgcattacagaacggcagaaatatgttaccttttgctaccaccttcttatcaaactatccctttatctacatggaattattattgccttctggttgcaccaaactgagacatgcaatgtggcttttgtctatttcatcgatagctacacctacaagtcacatgacggaaaaggatttccaccaattatatactcacaaatatatattgttcatccaggagaaaaaatgggaatgtggctggctcttttcccaactatttatctctcggcaggcactgcaactgcactgatccttgttggaggggagaccatgaagctgttcttccaaatagtgtgtggcccactctgctcgccgaatcccattacgacagtcgagtggtacttggtgttcacatccttggcagttattctttcccagcttccgaatctcaattcaatcgctggtctttcactcatcggtggggcgactgcgataatgtactgtaccatgtcatgggttctctctgtcagccaaccgcggccaccgacagtatcttatgacccagtgacatccaattctttcggtttatccctattctcaatcttgaatgccctcgggataatagcgtttgccttcagagggcacaatcttgctctggaaatacaggcaacaatgccatcgactttcaaacatccagcacatgtgccaatgtggcgtggggccaaagtagcgtatctcctgattgcaatgtgcctcttccccgttgcagttggaggctactgggcctacggaaacatggtgccaccaggagggatgctggcggcactctacgccttccacagccatgacatctcgcagggcgttctcgcgacgacatgcctcctcgtcgtgctcaactgcctcagcagcttccaaatttactccatgccggtgtttgacagctttgaggcctactacaccggccgcaccaaccgcccgtgctcggcatgggtacggtcagggttcagggtcttctacgggttcctctcgctgttcatcagtgtggccctgccatttctctccagccttgccgggctgctgggcgggctcaccctgcctgtgaccttcgcctacccgtgctttatgtggatctgcgtcaagaagcccgagaggttcagcttcagctggtacctcaactggggccttggtctgctcggcacagcgttcagtctggcgttctcgctgggtggcgtctggagcatagttaacaatgggatgaagctcaagttcttcaagcctaactaggtacatagattgctcgcttgctccaatctgcatgcaagttattagaagaaattagtcgtggaactgaatgttacatattactactacataattatgctgtatgacgactcctacattggcttggtaagaacaatggcgtgtatgtaagttaatgtctgagaaattcgaaatctgaggggctttgcgtatagagatatttccatgtattttagtatcagctgctaaaatctcgattcctgtatatggtggtggttgtctgcttcagtgtactttgaactttagaaagttgtcagtaatttgaggacttcatcagcttcacgttcg

SEQ ID NO: 30199 - DNA, 1326 bp, Zea Mays
cgcttcctccttccgcctcgctttgttcatccgcttccttacccaggctgccccatggcccacccttcaccgtcgccgtccggcagccgccgccaccgccgcctgtcggaggtcctggctgagcagcaggagccattctcgctcgatctctatctcctcgagaaaagctgctccccggccttcatcgacgacgccgggtgtggtgatggcgcctgctcgacgtgctggcccactaccaagagcacgggaaggcaggcagtgagaaacaggaagggatcccgtcggagcggcgtgctaaggatgctgctctccaagattctcagcagcacgacggcgcctgctgtgacgaagacccggcagcggcggaccgccaccgagtggcgccgcgtcgcagaaaagcggaggacgccggacaggttcgagctcactcttcgttccgcctctccccgagccatcgaagaacacatggaggaagacgagaaacaagaagaagacgacggggacgacgagtcctcgaagaagcagctgagccctgtgtccgtgctggagcagcccctgttcgagcactcctcgccaccgccgcacgagccgaaagccctggccatcttcggtgagctccttgagtccgcctacacacccaacacactgctggacgacgtccttgtcatcgccaaggatcagagcagcgacagctcaacgtcgccgagaccgcgggtgaggcggaagaaaaagaagcacgcacatcggaaggaggacgtgacgtttgagaaagactttgccaggttgacgaccagcctcgtagcctccaagatggccggggaaacagtttgtatagaggacctgcggccaacgctggaggacgtgggcgccgccatcgcggccgccgtgctggaggcactgacggaggagaccgcggcggagctgatatgatggggatggaccgcggctatgcggttggcatggcacgatggtggacgatgcggacctccgttgttgggttttctggtggttgatgtgcgaatctgatcgacatgttcgtgcgtatacatttggtttcttcgtacttcggtgtgtgtaggttgtgttgatagcgtgacagtgcctgactagctactgactactagtacctttgtttgttggtttgacacgggagcatgctgaaacggagcttgtacaggttcaataacataacatggtgtcgtttaaaaataagagcggtttattaatatataaaccatgcatataacacacatcatgtgttcttttgtcaagattgtaatgacacacgaactattgaataaaatgttagtacataatattgtttag

SEQ ID NO: 30200 - DNA, 369 bp, Zea Mays
cgcgctctagcctagcacaacaacggcctcccaaccaccccgcatcgagctcgggcctatatgacctatgccaccgcaactccgcgcccttgattcgggcagattgatgttagccacggtcttgagcgcggaaggagggcgtgaatggagaaattgggggggcaccatagtcaattgcgcccagacaccgtcggagggtccgtgggccgtgcccgggagcttccctaagccgccacgatggtgctcgtcaatcgtctcgggcgtgtgcgacggtcggcgagcaacaatttctcgccgaactttgactttgccgcacaacgacgcaccaccatggattgcgccggtagcatctagctccgtgacgagcaa

SEQ ID NO: 30201 - DNA, 336 bp, Zea Mays
cgcccatgacgctccagatcagcactatgctgctcgccctcgcctctctggagctgctcgtcgcgccgccagatcgacgtctgctcgccgctgccgtgtagactatgatccattccgagcttcgaggaattgacggtcaagcttcggcgaccaagagatcaaactctttgagttctacgaggctgaagaccctgagcatatgtttggtgaaggcatgtgtcctctgacccattatgtcccatttactttataattcactgtcccgcatactatgaacaacgtaaggattgactacctttctatttaccttgtccttgattaccttttgggttacta

SEQ ID NO: 30202 - DNA, 880 bp, Zea Mays
atcaacaaaaaaatattataatccctaaccctaataacatttcctactcctgccggatcagactagcgagccaagccaccgacggccgacgtcgagcctccgcggccgagcctccgcctagcaccaactccgtcgtcgatcgtcctatgcgaccacgcccccgtccgccttccgtctcctgcctccactgagtcgcgggcgcgacatcggggaacgccaaggctgagcttcgcccgggccaggagcttctcccggcagacccacccccgcccaacggagctccatgcctccgcccagggccattgtccgagctacgccccacgctcctgtccagtgccctggccacttagatggttctgctcagtcatgtttagtgtctggttcaacaacttcaacttcaaccaagggacgcatctatcacaagacgtatggttgccaaatgaatataagtgacatggagattgtgctttctatcatgaaaaatgaagcgatacgggtctgccatctctatatgacatttggctgtaaatggattatgatcatagttgaataagttggagcgtcaggtcaatggtccccccaataattaaactagatggtggagtggagctttgttttgggatgatgcaagcaacttttatgtttcagaacattgtactcaactgatgcttgtggccgttgaacctattctacttacttttggatttaagttaaggatagttaaaaatatttgatgtttaatacttgtgttggatgttttatgtgtcaattctatgtggatgctagaaaagttgtgtacactcatgttatttgatgaaattgtatgcacgatttggtttgaattcaattgaatattgatttttattaattaatgatgaac

SEQ ID NO: 30203 - DNA, 1626 bp, Zea Mays
tattataatccctaaccctaataacatttcctactcctgccggatcagactagcgagccaagccaccgacggccgacgtcgagcctccgcggccgagcctccgcctagcaccaactccgtcgtcgatcgtcctatgcgaccacgcccccgtccgccttccgtctcctgcctccactgagtcgcgggcgcgacatcggggaacgccaaggctgagcttcgcccgggccaggagcttctcccggcagacccacccccgcccaacggagctccatgcctccgcccagggccattgtccgagctacgccccacgctcctgtccagtgccctggccacttagatggttctgctcagtcatgtttagtgtctggttcaacaacttcaacttcaaccaagggacgcatctatcacaagacgtatggttgccaaatgaatataagtgacatggagattgtgctttctatcatgaaaaatgaaggttatattgaaattgttcctcatcctgagagtgcatataatatttatcaacacctatgacatctaggacaatgtagataatatttatcaacatgatactgatgtatccttaatccttactgttctccatatattactcccatggtacattgttgctctggagattttcttacctatgctgttatgatcataactagaatgaccaattcgttgaacaggagtgcaagaaacttgtcattgttcacctatccgagagtattttgttgttctaaggaatttaaaactgcttgttgttccactatttgaactctgcaacaatgttcaggtgatgcagcattcatagtctcgttgtcgatggtgtccggctgaaactttggaaactttacacatccattgagttctcgatctgggagcagtaaatttatcttttttgaagtagagattgtacatggcattcttgttttatctattttgtttcgattaaccttgtttgtcttaaactgcttacattccatatataggttactgcctccattctacagggtattgctagtatgatgattgaaatacacaatttattgatattcagacttaatatattcttgtgagcctttccagccataactgttgtacatggttttccttcttttgtttggccataaccagtgtgtgctaatattgtatattgtgtcatgctttcaagtttcaagaatttattaagattttgtttctaaaacctgtttcatgtacattgatgcagcgatacgggtctgccatctctatatgacatttggctgtaaatggattatgatcatagttgaataagttggagcgtcaggtcaatggtccccccaataattaaactagatggtggagtggagctttgttttgggatgatgcaagcaacttttatgtttcagaacattgtactcaactgatgcttgtggccgttgaacctattctacttacttttggatttaagttaaggatagttaaaaatatttgatgtttaatacttgtgttggatgttttatgtgtcaattctatgtggatgctagaaaagttgtgtacactcatgttatttgatgaaattgtatgcacgatttggtttgaattcaattgaatattgatttttattaattaatgatgaac

SEQ ID NO: 30204 - DNA, 912 bp, Zea Mays
taatccctaaccctaataacatttcctactcctgccggatcagactagcgagccaagccaccgacggccgacgtcgagcctccgcggccgagcctccgcctagcaccaactccgtcgtcgatcgtcctatgcgaccacgcccccgtccgccttccgtctcctgcctccactgagtcgcgggcgcgacatcggggaacgccaaggctgagcttcgcccatacgcctaccgccctgttatgccccgaaccgccgtgctgaggtccgcccaggccgggccaggagcttctcccggcagacccacccccgcccaacggagctccatgcctccgcccagggccattgtccgagctacgccccacgctcctgtccagtgccctggccacttagatggttctgctcagtcatgtgtctggttcaacaacttcaacttcaaccaagggacgcatctatcacaagacgtatggttgccaaatgaatataagtgacatggagattgtgctttctatcatgaaaaatgaagcgatacgggtctgccatctctatatgacatttggctgtaaatggattatgatcatagttgaataagttggagcgtcaggtcaatggtccccccaataattaaactagatggtggagtggagctttgttttgggatgatgcaagcaacttttatgtttcagaacattgtactcaactgatgcttgtggccgttgaacctattctacttacttttggatttaagttaaggatagttaaaaatatttgatgtttaatacttgtgttggatgttttatgtgtcaattctatgtggatgctagaaaagttgtgtacactcatgttatttgatgaaattgtatgcacgatttggtttgaattcaattgaatattgatttttattaattaatgatgaac

SEQ ID NO: 30205 - DNA, 1613 bp, Zea Mays
aaccctaataacatttcctactcctgccggatcagactagcgagccaagccaccgacggccgacgtcgagcctccgcggccgagcctccgcctagcaccaactccgtcgtcgatcgtcctatgcgaccacgcccccgtccgccttccgtctcctgcctccactgagtcgcgggcgcgacatcggggaacgccaaggctgagcttcgcccgggccaggagcttctcccggcagacccacccccgcccaacggagctccatgcctccgcccagggccattgtccgagctacgccccacgctcctgtccagtgccctggccacttagatggttctgctcagtcatggtatttgtctggttcaacaacttcaacttcaaccaagggacgcatctatcacaagacgtatggttgccaaatgaatataagtgacatggagattgtgctttctatcatgaaaaatgaaggttatattgaaattgttcctcatcctgagagtgcatataatatttatcaacacctatgacatctaggacaatgtagataatatttatcaacatgatactgatgtatccttaatccttactgttctccatatattactcccatggtacattgttgctctggagattttcttacctatgctgttatgatcataactagaatgaccaattcgttgaacaggagtgcaagaaacttgtcattgttcacctatccgagagtattttgttgttctaaggaatttaaaactgcttgttgttccactatttgaactctgcaacaatgttcaggtgatgcagcattcatagtctcgttgtcgatggtgtccggctgaaactttggaaactttacacatccattgagttctcgatctgggagcagtaaatttatcttttttgaagtagagattgtacatggcattcttgttttatctattttgtttcgattaaccttgtttgtcttaaactgcttacattccatatataggttactgcctccattctacagggtattgctagtatgatgattgaaatacacaatttattgatattcagacttaatatattcttgtgagcctttccagccataactgttgtacatggttttccttcttttgtttggccataaccagtgtgtgctaatattgtatattgtgtcatgctttcaagtttcaagaatttattaagattttgtttctaaaacctgtttcatgtacattgatgcagcgatacgggtctgccatctctatatgacatttggctgtaaatggattatgatcatagttgaataagttggagcgtcaggtcaatggtccccccaataattaaactagatggtggagtggagctttgttttgggatgatgcaagcaacttttatgtttcagaacattgtactcaactgatgcttgtggccgttgaacctattctacttacttttggatttaagttaaggatagttaaaaatatttgatgtttaatacttgtgttggatgttttatgtgtcaattctatgtggatgctagaaaagttgtgtacactcatgttatttgatgaaattgtatgcacgatttggtttgaattcaattgaatattgatttttattaattaatgatgaac

SEQ ID NO: 30206 - DNA, 854 bp, Zea Mays
aaccctaataacatttcctactcctgccggatcagactagcgagccaagccaccgacggccgacgtcgagcctccgcggccgagcctccgcctagcaccaactccgtcgtcgatcgtcctatgcgaccacgcccccgtccgccttccgtctcctgcctccactgagtcgcgggcgcgacatcggggaacgccaaggctgagcttcgcccgggccaggagcttctcccggcagacccacccccgcccaacggagctccatgcctccgcccagggccattgtccgagctacgccccacgctcctgtccagtgccctggccacttagatggttctgctcagtcatggtatttgtctggttcaacaacttcaacttcaaccaagggacgcatctatcacaagacgtatggttgccaaatgaatataagtgacatggagattgtgctttctatcatgaaaaatgaagcgatacgggtctgccatctctatatgacatttggctgtaaatggattatgatcatagttgaataagttggagcgtcaggtcaatggtccccccaataattaaactagatggtggagtggagctttgttttgggatgatgcaagcaacttttatgtttcagaacattgtactcaactgatgcttgtggccgttgaacctattctacttacttttggatttaagttaaggatagttaaaaatatttgatgtttaatacttgtgttggatgttttatgtgtcaattctatgtggatgctagaaaagttgtgtacactcatgttatttgatgaaattgtatgcacgatttggtttgaattcaattgaatattgatttttattaattaatgatgaac

SEQ ID NO: 30207 - DNA, 950 bp, Zea Mays
gtcttagccacgaagcagttcgcgccatagaatttgcccggccacggcctcatcgaactgcgaagctccctcgccgtgcgctctggcatcggctaccgccgattccgccatagagttcacgagcgctccttgctctattcatttcgctgtgggcaatttctccacgcttcaaatccgtgttgctcgccccgcgtgcgctcgctcctcatccatcggtttcggcgtgttcgcgtttgccgtcgagtcgtcgaacccgtcatcccttactcgactcccaagcaaactccctgatccgtgtcctgctcgtcgtcgactctcggcaccacaagctcaccttcccgtgcgcacatctccacagaccctgcctcatcacgcgtgtgcgttatcaatctcgtcgacgttctgtgcatcatcaagaaatacaaagcgtcgggtgaagacgaagctggcagcgtgatgttcacaaagtgctcgacaaaaagctcgaacaagtcatcaatcgtcatcctcgtctacgccaaaaattcgagaagattaggcgaagaaagaaataaatcagtacacggccggaggattctcgatgtggatggagaagaagtgcgagtcgatgcagcactcaccatgtgttcagtgaaatgctagagctgaaaggcgtcgtcgatttcgtggttgcaagtttgatttagtatggtacgtttattaaccacatgatgcggagaaccaaagctgagtcgaccacaagatgttgctgcgcgtgagcttctccacaaggtgatgctgtcggatgaacctgaagatggacagacaaagcaagtatcagaacaaaagctaatcgccaagtggtcgacatctaacaaacactaacatagtgttatccaggcaagccccgtgcatttgccacctccttgctgttttaaatttttatcaccttatatgatgcattaggtgat

SEQ ID NO: 30208 - DNA, 4170 bp, Zea Mays
aagaataagagacaaagctgggtagtcgagggtaaaaaaaaccccctccctgctcctgtctgagcttcgccgtggcgtgcccgtttcgaccctggaaaatcacgaaatcgccccgacagcacacgaccgacctgtccccccttcaccgcatcagcaacatcccctctcctccctcgctccttcttcctcctcttcccgccgccgtcgtccgccgccgccgctggcttggcggccgcctctcgtacacccatcgcagttgcgggcgacgacgaccacatgactatgatgacgccgccccctctcgagcagcaggaggacgacgagatgctggtgccgcatcaggagctccctgtcgctggcccagaagcagccccacagccgatggaagttgttgcgcagacagagcctgccaccacagcggagagccagccgcctgaggacccgcagacgacgcgcttcacctggacgatcgagagcttcagccgtcttaacactaagaagcactactctgatgtatttgtcgttggaggatacaaatggcgtgtcctaattttccccaaggggaacaatgtggatcacttctcgatgtatttggatgttgcagattctgggaacctcccatacgggtggagccggtatgctcagttcagcttggctgttgtgaatcagatccatcctaagtatacgattcggaaagatactcagcaccaatttaatgcacgtgagagcgactggggtttcacatcatttatgcctttgagtgacctatatgacccaagcaggggctatcttgtgaatgacaccattattgtggaagctgaggttgctgtccgcagaatggttgattattggacttatgactcgaaaaaagaaacaggttttgtaggtcttaagaatcaaggtgctacctgttatatgaattctctccttcaaacgttataccatacaccatattttagaaaggctgtatatcatatgccaacaactgagaatgacatgccatctgggagtatccctttagccctgcagagcctgttttacaagctacagtatagtgacaacagtgtagcaacgaaagagttgactaaatcctttggatgggatacctatgattctttcatgcagcatgatgtgcaagaactcaacagagttctttgtgagaaactggaagataagatgaagggaactgttgtggaaggaacaattgaacaattattcgaaggccaccacattaattacattgagtgcattaacgtggactataaatctaacagaaaagaatcattttatgatctacaacttgatgtgaaaggttgtcgtgatgtttatgcatcatttgataagtatgtggaagtggagagtctagagggtgataacaagtaccatgcggagcgttatggcttacaggatgcaaggaaaggtgtgcttttccttgatttccctcctgttttgcagcttcaactgaagcgttttgaatatgattacatgcgagatacaatggttaagattaatgaccgctatgagttccctcttcaacttgatcttgatagagacaatggaaaatatctatctccagatgcagatcgaagtattagaaacctctatactcttcacagtgttcttgttcatagtggaggagtacatggtggtcactactatgctttcattcggccgacactctcggatcagtggtacaaattcgatgatgagcgggttacaaaagaagacactaaaaaggcacttgaagagcagtatgggggtgaggaagagttgcctcaaataaaccctggtttcaataacacaccattcaaattcacaaagtattcaaatgcctacatgcttgtctatatacgtgagaatgacaaggataaaataatgtgtaatgtcgatgagaaggatattgctgagcatttgcggataaggttgaagaaagaacaagaagagaaagagcacaagaagaaggagaagtctgaagctcatctctacactatcataaagattgctcgagacaaggatttaaaggagcaaattggtaaaaatatatattttgacctggtggaccatgaaaaagtttgcagcttccgcattcagaagcagttgccttttactgcattccaggaggaagttgcaaaggaatttggcatcccagtacagtttcagcgcttctggttgtgggctaagaggcagaaccatacataccgcccgaatcgtccattgaccccccatgaggaagcacaatcagtcgggcagcttagggaagtctcaaataaggcacacaatgctgagctgaagctgtttttggaagttgaacttggaccggagctatgtccaattcgtccacctgagaagagcaaagaagacatacttcttttcttcaagctctataatgccgagaaggaagaactttgttttgtcggtaggctttttgtgaaggctctgggaaaaccgtctgaaatattgacaaaactgaatgaaatggctggattttctccaaatgaagaaattgagctatatgaggaaattaagtttgagccaaatgtgatgtgcgaacatattgacaagaaacttactttccgttctagtcagcttgaagatggagacatcatctgtttccaaaaggctcctgttccagatggtgatccacaagtgcgctatccagatgtcccttcattcttggagtatgttcacaataggcaggttgtgcactttcggtctctggacaaaccaaaggatgatgatttttctttggaattgtcaaagcttcatacttatgatgatgttgttgagagagttgcacataaacttgggttggatgatccatcaaagattcggcttacatctcacaattgttattctcagcaacctaaaccacaacctattagatataggggagtagaacatctactggatatgcttgtgcattataaccagacttctgatatcttgtattatgaggttctggacattccactgccagaattgcagtgtttgaaaacgcttaaagttgcattccaccatgcaacaaaagatgaggtggttgttcatagcataagacttccaagaaacagcaccatcagtgacgtgatcactgatttgaaaaccaaggttgaactatcaaatcctgatactgagctccgcttgcttgaagtattttaccacaagatttataagatttttccgcctcatgagaagatagagaacataaatgatcagtactggacattacgagctgaggagattccagaggaagagaagaatcttggcccacatgaccgtttgattcatgtttatcattttatgaaagaccctaatcagaatcagcagattcagaatttcggagatccttttttgatggttatccgtgaagttgagactgctgcagaggtactggagcgcatccaaagaaaacttagagttccggatgaggacttctccaagtggaagcttgcattcatatccatgaaccggccagagtacctccaggacactgatgttgtatcagcacgttttcagaggagagatgtatatggtgcttgggaacaataccttggcttggagcacaccgatacaacatcgaaaaggtcttacacagccaatcagaatcggcacacctatgagaagcccgtgaaaatttataattgagaaaacttaaagtttcaatcgattgacggaggcctcgacaacagtatgcccaagatgatgaggcttagaacagaaaaattggcagaggaatatagttgctgcctgtgctgaggcctatacaagcccatgaatgccacgtcaaccttcagtgttgttactgctgttgtctattggttcttctcgaggctttgcttccaagcaaccaagcatgtgtgttggttttttcatcgtgtctagtatgatggcccctgctaggatagtttgcttaatttgtagagcaaagcgagtacataaaaaaagatttttggtagggggcatgtatacaggattatagccgatactgattgctgccgcttgctgctgtgggaacaatggcagagattgtataatgggtttgttattggttcctaattttcgtgatgttgagaaatgtaagaggagaaccgcgtggatagtacagttttgagttccagcctaggctgtttgttgcaacttggcatatttggtataatattctgctttccacaa

SEQ ID NO: 30209 - DNA, 4169 bp, Zea Mays
aagaataagagacaaagctgggtagtcgagggtaaaaaaaaccccctccctgctcctgtctgagcttcgccgtggcgtgcccgtttcgaccctggaaaatcacgaaatcgccccgacagcacacgaccgacctgtccccccttcaccgcatcagcaacatcccctctcctccctcgctccttcttcctcctcttcccgccgccgtcgtccgccgccgccgctggcttggcggccgcctctcgtacacccatcgcagttgcgggcgacgacgaccacatgactatgatgacgccgccccctctcgagcagcagcaggaggacgacgagatgctggtgccgcatcaggagctccctgtcgctggcccagaagcagccccacagccgatggaagttgttgcgcagacagagcctgccaccacagcggagagccagccgcctgaggacccgcagacgacgcgcttcacctggacgatcgagagcttcagccgtcttaacactaagaagcactactctgatgtatttgtcgttggaggatacaaatggcgtgtcctaattttccccaaggggaacaatgtggatcacttctcgatgtatttggatgttgcagattctgggaacctcccatacgggtggagccggtatgctcagttcagcttggctgttgtgaatcagatccatcctaagtatacgattcggaaagatactcagcaccaatttaatgcacgtgagagcgactggggtttcacatcatttatgcctttgagtgacctatatgacccaagcaggggctatcttgtgaatgacaccattattgtggaagctgaggttgctgtccgcagaatggttgattattggacttatgactcgaaaaaagaaacaggttttgtaggtcttaagaatcaaggtgctacctgttatatgaattctctccttcaaacgttataccatacaccatattttagaaaggctgtatatcatatgccaacaactgagaatgacatgccatctgggagtatccctttagccctgcagagcctgttttacaagctacagtatagtgacaacagtgtagcaacgaaagagttgactaaatcctttggatgggatacctatgattctttcatgcagcatgatgtgcaagaactcaacagagttctttgtgagaaactggaagataagatgaagggaactgttgtggaaggaacaattgaacaattattcgaaggccaccacattaattacattgagtgcattaacgtggactataaatctaacagaaaagaatcattttatgatctacaacttgatgtgaaaggttgtcgtgatgtttatgcatcatttgataagtatgtggaagtggagagtctagagggtgataacaagtaccatgcggagcgttatggcttacaggatgcaaggaaaggtgtgcttttccttgatttccctcctgttttgcagcttcaactgaagcgttttgaatatgattacatgcgagatacaatggttaagattaatgaccgctatgagttccctcttcaacttgatcttgatagagacaatggaaaatatctatctccagatgcagatcgaagtattagaaacctctatactcttcacagtgttcttgttcatagtggaggagtacatggtggtcactactatgctttcattcggccgacactctcggatcagtggtacaaattcgatgatgagcgggttacaaaagaagacactaaaaaggcacttgaagagcagtatgggggtgaggaagagttgcctcaaataaaccctggtttcaataacacaccattcaaattcacaaagtattcaaatgcctacatgcttgtctatatacgtgagaatgacaaggataaaataatgtgtaatgtcgatgagaaggatattgctgagcatttgcggataaggttgaagaaagaacaagaagagaaagagcacaagaagaaggagaagtctgaagctcatctctacactatcataaagattgctcgagacaaggatttaaaggagcaaattggtaaaaatatatattttgacctggtggaccatgaaaaagtttgcagcttccgcattcagaagcagttgccttttactgcattccaggaggaagttgcaaaggaatttggcatcccagtacagtttcagcgcttctggttgtgggctaagaggcagaaccatacataccgcccgaatcgtccattgaccccccatgaggaagcacaatcagtcgggcagcttagggaagtctcaaataaggcacacaatgctgagctgaagctgtttttggaagttgaacttggaccggagctatgtccaattcgtccacctgagaagagcaaagaagacatacttcttttcttcaagctctataatgccgagaaggaagaactttgttttgtcggtaggctttttgtgaaggctctgggaaaaccgtctgaaatattgacaaaactgaatgaaatggctggattttctccaaatgaagaaattgagctatatgaggaaattaagtttgagccaaatgtgatgtgcgaacatattgacaagaaacttactttccgttctagtcagcttgaagatggagacatcatctgtttccaaaaggctcctgttccagatggtgatccacaagtgcgctatccagatgtcccttcattcttggagtatgttcacaataggttgtgcactttcggtctctggacaaaccaaaggatgatgatttttctttggaattgtcaaagcttcatacttatgatgatgttgttgagagagttgcacataaacttgggttggatgatccatcaaagattcggcttacatctcacaattgttattctcagcaacctaaaccacaacctattagatataggggagtagaacatctactggatatgcttgtgcattataaccagacttctgatatcttgtattatgaggttctggacattccactgccagaattgcagtgtttgaaaacgcttaaagttgcattccaccatgcaacaaaagatgaggtggttgttcatagcataagacttccaagaaacagcaccatcagtgacgtgatcactgatttgaaaaccaaggttgaactatcaaatcctgatactgagctccgcttgcttgaagtattttaccacaagatttataagatttttccgcctcatgagaagatagagaacataaatgatcagtactggacattacgagctgaggagattccagaggaagagaagaatcttggcccacatgaccgtttgattcatgtttatcattttatgaaagaccctaatcagaatcagcagattcagaatttcggagatccttttttgatggttatccgtgaagttgagactgctgcagaggtactggagcgcatccaaagaaaacttagagttccggatgaggacttctccaagtggaagcttgcattcatatccatgaaccggccagagtacctccaggacactgatgttgtatcagcacgttttcagaggagagatgtatatggtgcttgggaacaataccttggcttggagcacaccgatacaacatcgaaaaggtcttacacagccaatcagaatcggcacacctatgagaagcccgtgaaaatttataattgagaaaacttaaagtttcaatcgattgacggaggcctcgacaacagtatgcccaagatgatgaggcttagaacagaaaaattggcagaggaatatagttgctgcctgtgctgaggcctatacaagcccatgaatgccacgtcaaccttcagtgttgttactgctgttgtctattggttcttctcgaggctttgcttccaagcaaccaagcatgtgtgttggttttttcatcgtgtctagtatgatggcccctgctaggatagtttgcttaatttgtagagcaaagcgagtacataaaaaaagatttttggtagggggcatgtatacaggattatagccgatactgattgctgccgcttgctgctgtgggaacaatggcagagattgtataatgggtttgttattggttcctaattttcgtgatgttgagaaatgtaagaggagaaccgcgtggatagtacagttttgagttccagcctaggctgtttgttgcaacttggcatatttggtataatattctgctttccacaa

SEQ ID NO: 30210 - DNA, 1512 bp, Zea Mays
caagtgtcagtatcaatctgtaattaccttcaggtttatgttgtgcactttcggtctctggacaaaccaaaggatgatgatttttctttggaattgtcaaagcttcatacttatgatgatgttgttgagagagttgcacataaacttgggttggatgatccatcaaagattcggcttacatctcacaattgttattctcagcaacctaaaccacaacctattagatataggggagtagaacatctactggatatgcttgtgcattataaccagacttctgatatcttgtattatgaggttctggacattccactgccagaattgcagtgtttgaaaacgcttaaagttgcattccaccatgcaacaaaagatgaggtggttgttcatagcataagacttccaagaaacagcaccatcagtgacgtgatcactgatttgaaaaccaaggttgaactatcaaatcctgatactgagctccgcttgcttgaagtattttaccacaagatttataagatttttccgcctcatgagaagatagagaacataaatgatcagtactggacattacgagctgaggagattccagaggaagagaagaatcttggcccacatgaccgtttgattcatgtttatcattttatgaaagaccctaatcagaatcagcagattcagaatttcggagatccttttttgatggttatccgtgaagttgagactgctgcagaggtactggagcgcatccaaagaaaacttagagttccggatgaggacttctccaagtggaagcttgcattcatatccatgaaccggccagagtacctccaggacactgatgttgtatcagcacgttttcagaggagagatgtatatggtgcttgggaacaataccttggcttggagcacaccgatacaacatcgaaaaggtcttacacagccaatcagaatcggcacacctatgagaagcccgtgaaaatttataattgagaaaacttaaagtttcaatcgattgacggaggcctcgacaacagtatgcccaagatgatgaggcttagaacagaaaaattggcagaggaatatagttgctgcctgtgctgaggcctatacaagcccatgaatgccacgtcaaccttcagtgttgttactgctgttgtctattggttcttctcgaggctttgcttccaagcaaccaagcatgtgtgttggttttttcatcgtgtctagtatgatggcccctgctaggatagtttgcttaatttgtagagcaaagcgagtacataaaaaaagatttttggtagggggcatgtatacaggattatagccgatactgattgctgccgcttgctgctgtgggaacaatggcagagattgtataatgggtttgttattggttcctaattttcgtgatgttgagaaatgtaagaggagaaccgcgtggatagtacagttttgagttccagcctaggctgtttgttgcaacttggcatatttggtataatattctgctttccacaa

SEQ ID NO: 30211 - DNA, 779 bp, Zea Mays
atggaccacgacaaacatcctgctccggagtgtcctcaccaaggttggtccaagagccacccattgcaggaaaggcttttcctcgttgggcagtgggctcaagcgctagaggagaggtcatatcgctttcgtcctccccttcaacctctccggatggggaatcaagggttgacccttgtgacggagggtaatcgcctattcctctcccacctaccatgtgctgcaatgtggggtcggatcctcagcccttccgatgttggcgatggacgagctacagggctgactggagatacctcgctcggttgtgcggatgtccgacactcatatcacgggtctccaagcgtgattagccatcgtggaggcctgaggctgagttggtggagcttcattaggagattgactcggtgacccaaagcgtctatgctcgcgagacaacctgcttgcaatgcttactcgacattcgaatccgcattcgaaacatcgtggatcacatccttctccatggggccggtgttgcctttgctgtcgccaagctccgcactagggtgcttcgttcgtggtctttgagaacctaatctagggatacgacgatgccgcctgtggggtcgtcagcgctgtgtctttaaaggatctgatctgatgggttccctagggccctcttctggcgttcaccttttggttcattggtgcaggcatcttgtaacaccacaaaactatcaactaaaaataatgcaattagtttattagtggtaaatatagtaatgatttttttcttccaa

SEQ ID NO: 30212 - DNA, 1325 bp, Zea Mays
aaccaaacccacacaacaaaggccgcgcggctgttggataaccaaggcgtcggaggatttgcctgccgtgtagttcttcctcgttggcacccggctccgcactgagaaagcgcgatgacggcccaggcgaagcggcggcaagcggaggaccctctaaggcccgaattctgacggtcgagggcgaagagcaggatggaggtgcggtggtaggggcggggagggctgaagggaacggcagcaagggggtggagacggtagttggcggagaggctgacgggattagtgtgcgcatcgacccggatgtgctcgattgctccatctgcttcgatcccctccaaccgcccctctaccaggtagttattcccgttttgaaaatcgcctatattgcttgattccccgtagtaatttgggtaggatgacataatatgctgtaaaagcataatatgattagcatcctagttcctgaaatgtttgtacaaactgtaagaactaagaagcaacagtttgttactaaattgaggatatgaaaggagacagtaacatataaatacaaagcagttgacttaccagtgtgcgtgcagcacgcttcgacaaaattttcattcatatccttcatgtatggttttgtagcaaccgtgatttgaaggcagctaaacgctgtactcaatcctgactatgacttcccaaaatgcctgcaattgaatcaatacttatctgtctcaaacagttgaacctgacatttagaaacaaaggcaagtaactgctcttctgaccacatggattattaaatcctttttttaacgtaatggcatgagctctgtctttccattaagaagattagaattgatcaagttttaaggaaaactgggcccgaaacctaaacagagtgcccaaacaacacaagcagcgacaaccccacacacaaagctcatctagagtcatcgttgccgagctcaacacaagatacaagcaccttcgactttgccagacgggccgcacacggccaaaagaaaaacgacgacgcctacacctaaaacctagcacagaaggacaaagaccgcgacgcgccatcgttgccaagcctcaacacacccacactctaggcaactctgattcttcaccaatgatctttatccaacacccaccttcagttttttgcctggccagatctcgaggaagggggttcacctcatgtcatcgttaccgagccacattccctaacgaggcagcttcgacttcacgttgcaaaaaacccaccacccgcaatccagatgccgagaagcgaaagcatcaacagatggcaacgtcgaggctgagacaaactc

SEQ ID NO: 30213 - DNA, 1035 bp, Zea Mays
aaccaaacccacacaacaaaggccgcgcggctgttggataaccaaggcgtcggaggatttgcctgccgtgtagttcttcctcgttggcacccggctccgcactgtgccaaaatggccatgtagcgtgcttttcctgctggtctaggctcaccaacaaatgccacatttgttctagtgatgctaactttaaacgctcatgaagaatcctgcctttttgctccatcgatgtgtcctattcctggttgtgggtacagaggatttactggatggtggtcaggacatttccttacaaaccataatagtgatgggctgcgcttctcatatggtcagtgttttgatgtgagtttggaaatgtcagttccttttctggttcttctagcagaggatgatcacctattcattttcatcaacaagaacgtgattccctttggccatgcgctttcagtgtgttgccttaggactggcaatctgaattggaatttcttatacgaaatgagagcaactagtaaaggaaacactaaaaacagtctgcaattgaaggcttctgtcacaaatacaagggagtggcgaggtctcaatcctacagaagttttccttttggttccatatgccttcagcaaatctagcaaacttacactgaatgtctctattgagagggttgctgatgtgaagtgaatatctgcagtttgtaatgtgttgtaaaatgtaaaaaaggtggcagtgtaagtttgtctttagaaactggttttccactgaggcatctctgacccatttggtttgctaaacccttgactctattcttgtgattcagatgatgccatcaaggtttgtaactgtatgtgtatactcccatgtactaaaatctgtaactgagatgcttgacgtaggaactatatgaaatattcaatttgcattcttgtgtaaaccatgaattcttgatatacatgcaacaattggttccttctgttcttaggtctgggaatttggttgtgtttattgatgtatttagatgcaaggaatgaatggcaccattta

SEQ ID NO: 30214 - DNA, 1254 bp, Zea Mays
aaccaaacccacacaacaaaggccgcgcggctgttggataaccaaggcgtcggaggatttgcctgccgtgtagttcttcctcgttggcacccggctccgcactgagaaagcgcgatgacggcccaggcgaagcggcggcaagcggaggaccctctaaggcccgaattctgacggtcgagggcgaagagcaggatggaggtggggtggagacggtagttggcggagaggctgacgggattagtgtgcgcatcgacccggatgtgctcgattgctccatctgcttcgatcccctccaaccgcccctctaccagtgccaaaatggccatgtagcgtgcttttcctgctggtctaggctcaccaacaaatgccacatttgttctagtgatgctaactttctatgcatgcagaaacgctcatgaagaatcctgcctttttgctccatcgatgtgtcctattcctggttgtgggtacagaggatttactggatggtggtcaggacatttccttacaaaccataatagtgatgggctgcgcttctcatatggtcagtgttttgatgtgagtttggaaatgtcagttccttttctggttcttctagcagaggatgatcacctattcattttcatcaacaagaacgtgattccctttggccatgcgctttcagtgtgttgccttaggactggcaatctgaattggaatttcttatacgaaatgagagcaactagtaaaggaaacactaaaaacagtctgcaattgaaggcttctgtcacaaatacaagggagtggcgaggtctcaatcctacagaagttttccttttggttccatatgccttcagcaaatctagcaaacttacactgaatgtctctattgagagggttgctgatgtgaagtgaatatctgcagtttgtaatgtgttgtaaaatgtaaaaaaggtggcagtgtaagtttgtctttagaaactggttttccactgaggcatctctgacccatttggtttgctaaacccttgactctattcttgtgattcagatgatgccatcaaggtttgtaactgtatgtgtatactcccatgtactaaaatctgtaactgagatgcttgacgtaggaactatatgaaatattcaatttgcattcttgtgtaaaccatgaattcttgatatacatgcaacaattggttccttctgttcttaggtctgggaatttggttgtgtttattgatgtatttagatgcaaggaatgaatggcaccattta

SEQ ID NO: 30215 - DNA, 1453 bp, Zea Mays
aaccaaacccacacaacaaaggccgcgcggctgttggataaccaaggcgtcggaggatttgcctgccgtgtagttcttcctcgttggcacccggctccgcactgagaaagcgcgatgacggcccaggcgaagcggcggcaagcggaggaccctctaaggcccgaattctgacggtcgagggcgaagagcaggatggaggtggggtggagacggtagttggcggagaggctgacgggattagtgtgcgcatcgacccggatgtgctcgattgctccatctgcttcgatcccctccaaccgcccctctaccaggtaaaagttggtccatgctgtatgccttctcataatatgcagaccattcttatcaaaagtcatatcttaaggttgcctttcaatgattgcagcttgtttctgtattttttcagtgccaaaatggccatgtagcgtgcttttcctgctggtctaggctcaccaacaaatgccacatttgttctagtgatgctaactttgtaagaaacattgcactggagaaagttgttgagtcagttaagtcatcctgctcatatgccaaatggggctgtaacaagttggtcagctatgcatgcagaaacgctcatgaagaatcctgcctttttgctccatcgatgtgtcctattcctggttgtgggtacagaggatttactggatggtggtcaggacatttccttacaaaccataatagtgatgggctgcgcttctcatatggtcagtgttttgatgtgagtttggaaatgtcagttccttttctggttcttctagcagaggatgatcacctattcattttcatcaacaagaacgtgattccctttggccatgcgctttcagtgtgttgccttaggactggcaatctgaattggaatttcttatacgaaatgagagcaactagtaaaggaaacactaaaaacagtctgcaattgaaggcttctgtcacaaatacaagggagtggcgaggtctcaatcctacagaagttttccttttggttccatatgccttcagcaaatctagcaaacttacactgaatgtctctattgagagggttgctgatgtgaagtgaatatctgcagtttgtaatgtgttgtaaaatgtaaaaaaggtggcagtgtaagtttgtctttagaaactggttttccactgaggcatctctgacccatttggtttgctaaacccttgactctattcttgtgattcagatgatgccatcaaggtttgtaactgtatgtgtatactcccatgtactaaaatctgtaactgagatgcttgacgtaggaactatatgaaatattcaatttgcattcttgtgtaaaccatgaattcttgatatacatgcaacaattggttccttctgttcttaggtctgggaatttggttgtgtttattgatgtatttagatgcaaggaatgaatggcaccattta

SEQ ID NO: 30216 - DNA, 1047 bp, Zea Mays
aaccaaacccacacaacaaaggccgcgcggctgttggataaccaaggcgtcggaggatttgcctgccgtgtagttcttcctcgttggcacccggctccgcactgtgccaaaatggccatgtagcgtgcttttcctgctggtctaggctcaccaacaaatgccacatttgttctagtgatgctaactttctatgcatgcagaaacgctcatgaagaatcctgcctttttgctccatcgatgtgtcctattcctggttgtgggtacagaggatttactggatggtggtcaggacatttccttacaaaccataatagtgatgggctgcgcttctcatatggtcagtgttttgatgtgagtttggaaatgtcagttccttttctggttcttctagcagaggatgatcacctattcattttcatcaacaagaacgtgattccctttggccatgcgctttcagtgtgttgccttaggactggcaatctgaattggaatttcttatacgaaatgagagcaactagtaaaggaaacactaaaaacagtctgcaattgaaggcttctgtcacaaatacaagggagtggcgaggtctcaatcctacagaagttttccttttggttccatatgccttcagcaaatctagcaaacttacactgaatgtctctattgagagggttgctgatgtgaagtgaatatctgcagtttgtaatgtgttgtaaaatgtaaaaaaggtggcagtgtaagtttgtctttagaaactggttttccactgaggcatctctgacccatttggtttgctaaacccttgactctattcttgtgattcagatgatgccatcaaggtttgtaactgtatgtgtatactcccatgtactaaaatctgtaactgagatgcttgacgtaggaactatatgaaatattcaatttgcattcttgtgtaaaccatgaattcttgatatacatgcaacaattggttccttctgttcttaggtctgggaatttggttgtgtttattgatgtatttagatgcaaggaatgaatggcaccattta

SEQ ID NO: 30217 - DNA, 1287 bp, Zea Mays
caatagcaccaggtatgctcctaataaagtaggtagatttccaattttctcgaaaaaaagaaactgcataaactgaatgctttcggaaccctggtggagccacgcacctggtttcgtccccaaatctcactcaatccccagtcccgacacccatcctctccaccgaagtcaccaccgcatggacgacgccgcgaatcccacccctccaccatccacctccgccgcatccgcggcggccgcggcggcgcaacaccagcagctccagcgccaactcttcctaatgcagcaggcgcagtcccatccgcagcagctgtcgcagcaggccatgtcccgcttcccctccaacatcgacgctcacctccgccctctagggccgcttcgcttccaacagccccagccccagccccagccgtcccactcccagggtccatctcagtcgccgtcgcaggccacgcagcaggcgtcaccccagcagcagcagcagcaggcggcggcggcggcggcagcggcgcaggcacaagcacaggcccaggcccaggcggcacgggtacgaagccccgagatggagatggcgctgcaggacgccatgcgggtctgcaatccggacgtcaagacgcccttccagtccatcgaggacgctgtcaacaggttattaccttaccatgttgttgccgactatgaggctgaagaagatgacaggatccttgatagcgacacaacaggccagatcccttctcgcctgcagcaatgggaccataatattctggtgaagattgctgagttcacgacaacttttgacaagcaagtattggcatataacataatgaccaagaaaagggccatcggtgagttcaggtcggaggagcggctcatgctggagcaagccttattgcaggaggaaaagcaagctatgctgggactgagggcagagatggagtcgagagagaaagctggtcgcgaggctgccgaagtgaagatgcgtttggcaatggagcatgctcgtgctgaggcacaagctcactctgagatgatgaatcatggtcctataagggccagtgctgttgcttcgcaaggggaggatggtccgagtcatgacatggtgcaagaacatggcgaagatgggtggggaaattctcagagggatgatgaagatccatcggaggatttcctcaacgatgagaacgaacctgagaatgggaactcagatgggcaggaggactggcgcagatctggggagtttgatctcaactctagtttgcatgctgcggaatggttttggacactaag

SEQ ID NO: 30218 - DNA, 1441 bp, Zea Mays
cacgcacctggtttcgtccccaaatctcactcaatccccagtcccgacacccatcctctccaccgaagtcaccaccgcatggacgacgccgcgaatcccacccctccaccatccacctccgccgcatccgcggcggccgcggcggcgcaacaccagcagctccagcgccaactcttcctaatgcagcaggcgcagtcccatccgcagcagctgtcgcagcaggccatgtcccgcttcccctccaacatcgacgctcacctccgccctctagggccgcttcgcttccaacagccccagccccagccccagccgtcccactcccagggtccatctcagtcgccgtcgcaggccacgcagcaggcgtcaccccagcagcagcagcagcaggcggcggcggcggcggcagcggcgcaggcacaagcacaggcccaggcccaggcggcacgggtacgaagccccgagatggagatggcgctgcaggacgccatgcgggtctgcaatccggacgtcaagacgcccttccagtccatcgaggacgctgtcaacaggaagaagcaacttagctagagcattgagatattgtagcaactactgaatttaataaaggttattaccttaccatgttgttgccgactatgaggctgaagaagatgacaggatccttgatagcgacacaacaggccagatcccttctcgcctgcagcaatgggaccataatattctggtgaagattgctgagttcacgacaacttttgacaagcaagtattggcatataacataatgaccaagaaaagggccatcggtgagttcaggtcggaggagcggctcatgctggagcaagccttattgcaggaggaaaagcaagctatgctgggactgagggcagagatggagtcgagagagaaagctggtcgcgaggctgccgaagtgaagatgcgtttggcaatggagcatgctcgtgctgaggcacaagctcactctgagatgatgaatcatggtcctataagggccagtgctgttgcttcgcaaggggaggatggtccgagtcatgacatggtgcaagaacatggcgaagatgggtggggaaattctcagagggatgatgaagatccatcggaggatttcctcaacgatgagaacgaacctgagaatgggaactcagatgggcaggaggactggcgcagatctggggagtttgatctcaactctaggtaaggcagttggatttccacatgaaggtttctaggtaggctacgacatgctggtattgtatctactattctattgttgtgttcggtgaagatgtctttgtggctgtaaacatggcattcgaacaattcagtttctttgtaatttgactagtaatatttacttgagcactcaatatgtgccatttccaacttggagaaaaaaaattacaataatccacctgcattgcac

SEQ ID NO: 30219 - DNA, 975 bp, Zea Mays
gcgagtcggtgcatgcaagctgttcatcatcggattgctccgtcgtggtgccgacgacaacgtgcaggtgatcacgagcgtggggttgctgcagaccacctgccgctttgagtccgaccacctcgacctacagctgaaaggttattaccttaccatgttgttgccgactatgaggctgaagaagatgacaggatccttgatagcgacacaacaggccagatcccttctcgcctgcagcaatgggaccataatattctggtgaagattgctgagttcacgacaacttttgacaagcaagtattggcatataacataatgaccaagaaaagggccatcggtgagttcaggtcggaggagcggctcatgctggagcaagccttattgcaggaggaaaagcaagctatgctgggactgagggcagagatggagtcgagagagaaagctggtcgcgaggctgccgaagtgaagatgcgtttggcaatggagcatgctcgtgctgaggcacaagctcactctgagatgatgaatcatggtcctataagggccagtgctgttgcttcgcaaggggaggatggtccgagtcatgacatggtgcaagaacatggcgaagatgggtggggaaattctcagagggatgatgaagatccatcggaggatttcctcaacgatgagaacgaacctgagaatgggaactcagatgggcaggaggactggcgcagatctggggagtttgatctcaactctaggtaaggcagttggatttccacatgaaggtttctaggtaggctacgacatgctggtattgtatctactattctattgttgtgttcggtgaagatgtctttgtggctgtaaacatggcattcgaacaattcagtttctttgtaatttgactagtaatatttacttgagcactcaatatgtgccatttccaacttggagaaaaaaaattacaataatccacctgcattgcac

SEQ ID NO: 30220 - DNA, 659 bp, Zea Mays
  misc_feature (1)..(2): n is a, c, g, or t
nntttgtcctcgtcgccacaccatcgagttttgcctcgccgcatcgttctccatccttgcttttcaaagtttcgagccaagaagtgatttgtgaaggagcctgctccaattctattgattcaatggtggatttcatctaactgtctatccgtgatagatctcagatctcctcttgtaataaggcaagccccggtatatttgtctctttcttgtgttttaaatgttttatcaccttaaatgatgcattatgtgatatgagttgtgtgatgaataattgatgcattattattccttagaatttgaatactataccttgatccttgatttataaaaagaactgataatgcttaaccctgcttagaaactaaaaattccttaaccctgcttagaaactaaaaattcctttcttttcaaaaagaatgatgtggaacattggttatgggctttttgattcaaaaatcaaaacaaactaaggtgatgaatcctctacggccggagtggactcgtcactcgaaaagagtatccctgccgggtaccaaaaatggggaaagggtttgaataaatctagaccagacgttgagcagacaaggtcgcccgtctgtgtcggttaaggaccgtaccgttgactggcctgttgtggttgagactttgcaactagc

SEQ ID NO: 30221 - DNA, 553 bp, Zea Mays
  misc_feature (1)..(1): n is a, c, g, or t
ntttgtcctcgtcgccacaccatcgagttttgcctcgccgcatcgttctccatccttgcttttcaaagtttcgagccaagaagtgatttgtgaaggagcctgctccaattctattgattcaatggtggatttcatctaactgtctatccgtgatagatctcagatctcctcttgtaataaggagaagttttgtttccttatctttgatagttgcttcgggtggaggccttgaagcttagaatgtgtatgtatatatcttatggaaaggcttcacccttccaattattgtaataagttatgcactttgggtactatcaggacttgtaataattacaattcttcttatgttgtaaaacttgagctttgaaaatgtaaaatatgttttgtaaagtcttccactctatctccaaagtgtgtgtgtatcgagtgtgattactgtaatatgcatgaatgtgggagatccttgggatgatgagttcgagttgatgagctcgatagccttgttaagttacccggtacacgtgcacaaccatctgagaccgataatagcaag

SEQ ID NO: 30222 - DNA, 563 bp, Zea Mays
  misc_feature (1)..(1): n is a, c, g, or t
ntttgtcctcgtcgccacaccatcgagttttgcctcgccgcatcgttctccatccttgcttttcaaagtttcgagccaagaagtgatttgtgaaggagcctgctccaattctattgattcaatggtggatttcatctaactgtctatccgtgatagatctcagatctcctcttgtaataaggcaagccccggagaagttttgtttccttatctttgatagttgcttcgggtggaggccttgaagcttagaatgtgtatgtatatatcttatggaaaggcttcacccttccaattattgtaataagttatgcactttgggtactatcaggacttgtaataattacaattcttcttatgttgtaaaacttgagctttgaaaatgtaaaatatgttttgtaaagtcttccactctatctccaaagtgtgtgtgtatcgagtgtgattactgtaatatgcatgaatgtgggagatccttgggatgatgagttcgagttgatgagctcgatagccttgttaagttacccggtacacgtgcacaaccatctgagaccgataatagcaag

SEQ ID NO: 30223 - DNA, 880 bp, Zea Mays
aagagatggcgggagtagcatgtaccctcctggccctcctggcatagtagcacgtctggtagggtaatgtgctctcgggtggcgcagacctgttcatgtagtggaggactccgtgggaatggttgacatatgcaagggttaagtactacatatttcgtgtggttagagagccccagctgggtataatcggttcgaatcgtcattgctcctcggttatggagactcatcccggtgaccatcatcgtagttagaaagtgaaatatgagaatggataaaatgcagctagtataggccaagtgcttgaattagatcaggcaaatatagcttcaggtaataacctaacttgtgaagtaaaacttggcttaaggaccaactggtagtaagcttttctgcaaaaagggtccttgataattgataagctataccttgagtcccaaaagctagcatacccttgagagtcttttctttagtcaggtaagtcttgctgagtaattccatactcatgggataattgtttttgcaggagaagttttgtttccttatctttgatagttgcttcgggtggaggccttgaagcttagaatgtgtatgtatatatcttatggaaaggcttcacccttccaattattgtaataagttatgcactttgggtactatcaggacttgtaataattacaattcttcttatgttgtaaaacttgagctttgaaaatgtaaaatatgttttgtaaagtcttccactctatctccaaagtgtgtgtgtatcgagtgtgattactgtaatatgcatgaatgtgggagatccttgggatgatgagttcgagttgatgagctcgatagccttgttaagttacccggtacacgtgcacaaccatctgag

SEQ ID NO: 30224 - DNA, 626 bp, Zea Mays
caaaggttcatgcaaatacacgagtaaaatttactgggtctccaataggaaccaattcatatgcagcagcaatgataataatagcataagctgcttattcttttcaatttggtgatgctattgacagggacatagcaattactgaaatacaaggatctacatgtacacccccaagcctttggctattcatagaaaaaaaaatgtaggcttatatcagcggaaatagtgctaaactgtaccagaacgaaactaaaaaacttcaaactcaaggtcctctgagttgcttctgaactccaggcacttgccttctttcttccgctctttggcaagagtcacgatgttgcaaggttgtgtctctggtggagcagcagaccgaatcagagcccaattcaagccttcaaagaaggggtgctgcttgatctcagcagctcctctcaacgatccaaatctgttctcaggctccttaaccagtaaacctctgatgagatctttggtgttgctgctcacagctggatggtctgggaaccggagattctgcgagaccacatttgccaatgtttcatcattcccaggtcctctgaagggtgtcttgccgtatagaagttcataaaggaagacaccaaacg

SEQ ID NO: 30225 - DNA, 1491 bp, Zea Mays
cggactaaaatgttctccggctttagatcacggtatatgacccctaacatgtgaagatattccaaagcaaggagaacttctgcaacataaaacctacaatgcaaccattttatcaatatcataaatgatcaaagcacaacagaccagttgagaacttaatgaatgtatgggaaggcaaacaggccatgcataattcacaagcaccacatacaaaacagaagttacaggtctacggttaactcttaacagtaggttattattgttgcaaaaagaaggcctatgacattgtttctgtgataagctaatgggaattgaatgagatgccagacaaaccaatcaaaaatgtactctcgagtgcccacaactacatttccaggtaacagttacaatgtgtgacaaaccaactaaagactcaagtgcctacaactacatgcacagctaacagttgcaatggaggcacaaatgcaagatcctagcaaaatgattaatcagaaaaaattagctatttgtgcagaagagcatagcagatcgcatagcaccagctgtcaaagtgaatgaattcaaaaggacaaagaaataaggaaatgagacaactctttcttcaacaatttcataggcaggtcttcccctccacaccaatcacatgttttttattgctttcgtatatcgttgtcacacccttaatgataggttttgttttttcaatgtcattcccatttaggttggattcggatctcgctgttgtttcctttccttccaaactttttactcaaaatgataaagaatcttgtacacttgaattgtagtattatttaagtgcttattgcttggcaaaaatcctacttctacaactggtaggtcaccgggttgttgaaataagttgtgctttatgtgcttttcccatgttataaccataccaattctatcgatatggaatggatcagctaaacattctattaggaagcccagtcttgatgcttctgttcggtattcacttttgttcggctcttagaggcacatcccgcagtggttggaacagtccacacaatccacccacttcacctactttactgcccgcgaccgtttgtgtacctctatacaaacagaaggatttcatgttctttcatctaaagggtattcctctccatgtgtatttgaaactcaaggagtgcaaatacatcttcagagttttctcaaggagatattgacttaaattagcaagtatgagctaaaatcttcatctgtctacatgtgtagctttaagcatgcaattctaatcttggagaaaaacaagaaaatcagattgaaacaacttcttaaagtagacagtgtacagtagtatattggtcattgcatttaacttgtggtcaataggcaaatttagttttagaagaaatacccgagtcagaaaaggaatagataaaacaatggagacttctagtgcgctgaatataaaataatgtttaggtatggaactacggattggaattt

SEQ ID NO: 30226 - DNA, 3521 bp, Zea Mays
aacggacggtccgatgcccatgactgcaggcatacatcgctgcgggtgaagttcggctatctgatttgccgcccgcgatacggcgaaaccctagctccacagcgccgttgcatggagtcccagcgatacaactacggcagcggcgccggcaccggcggcaaaatccgccgctaccctccctctcgcgccgtggctgcgtcaccatatgctcgaccggccaccgccccgacccacgctcctggaaccgccacggcggcggtttcgcatgagggcgggtggctgtcccggatcatagccgccggcacctcgcgattccttccctccttgttcagcttcagcacgtctcaacctcagcaagccgcgccggccccgtcgccaacgcgcgaccagctgccagtcgtcgagccgccttcgccgcttcccccacctttagtggatgatcgtccagaatgtgaagaaaacggtggagtggctgccaataatttgtgtactgaaaatcctcaaagttgtaccaaggaagaggaagaaaacatgctaagaaattctgatgaccatggtggaacggctcttgaagaattattgaagcagagaactttcacgaggagtgagtttgaatatttggccaatttgttatggtctaaaactattggagcaaattcactgaagctagaagatggtaacgtcaggaaaatgattgtttatgacaaagaaaatgcctcggaatactccaacttacctcttaatttttccactacaacattcagcgctgatgatcaagttgccacgcctgcagaaattgcaaaagcttatatgggtttaaaatcttccaagggttcccctctacgccttagattgcacgatccctcctctatgcctatcacatctatggaagttagtatgtcacaaaaagctaagcctcccacaatcccacttgcccaaggctcaagattgcatacttccaaaacttctgattgtcttgaaagcaactacacaacaccgaatggagtaatctgcaaaatgtcatcatctccttatttcaagagtggtgtgtcttcaaaggagctatttggttctgtatcttcacattaccagacctcaaatagtgttcatacttttggcagacaggttttgaagaggaagagtactgtcagcaatgagtttgtatctgctggtccgatacgcagaattcatcaaagatacaacagaacatcaccactgttggaaacacagctgggttatcgtagataccctgtgggctatggaagcaaactcgaaggttctgagcaattggcacggactcaaaaacgccggtgtctggataaagttggtgatgccagtctcggtagcgtagaggacaaaactaatgtgaactatcctggtcaggtgccagagaagtcagctgagatggcaactaagatactgaagcagcttgacacattagtaccttcacagaaggaaaacacatcagaaacaaagcagaaacatgagagtgccatatatttcgaggaagatgtttctcgacaaaagaaagtacaagcagagagagatcttttggaaccttctccatcagaagtacctgatggtattgcatcgaacaaatcaatctcacaaattaccttgaacaaggaaaagcctccagccttttcttccagagggccctccaacacctacattgacatctcctatactaacagttgaaaagcagccttcagtattctgcagtgcttcagtcacttctgcacaaagtgaccctaggatttcaaaatcagttttgggaggaccagttacacagaaattagaaagcaagttaaatggagataatcaacgagtgccttccaagaattctggacaagttgcatctttcacaagtaatcctgtatttaaggttgatggccctgggcatgcgtcaaactctgttctctcagctgtacaatcttataatacatcaactggctcagtttcatttcaaagtgctggctcttctaccatctccactaacttaacttcaaacattacacagagctgttcaactggaggcagtttcactttctccaatactcgttttggtagtttatcggcaacctcaaatatgtttgcagcaaaatctttagcgttgtcttgtacagcaagccccggtgcttctttgggtttccctccagttcatactgcaagttctccagctgctcaccgcaaatctgaagcagcaaatagcagtatcagttttagttccatgcagcagtttggcattgcaggttcttccacagtgcaggacaaatccaaggcagtagacagcagtaccccttttggctttccccagaagtttgacaccgtgagttccgcttcagaggatatgtccaaggcagactctcctgagccgacatttttttctgggaatcataatgtgcaatcagaaaattgcagttccctgttcacacagagtccaggaaataatttgagttccaaatcttcagaaaatttgaactctggaagctcgcatagttttgcagattcaccagttggttcagcaacaatgtgctctagcccttcgaattcaaactctctgttttcttgggctgctggctcaggtgcaagaactgctccaccatcttcccctgctacaagctcatcttttgcttttagttccagtccagcattttcagcacaaccagtattcgccagcaaattgactacacctgcttcactttcatatggctcaccaaatactggccctgctacatcaccattcagctcaatgccaagcgctgtattttcattcacgtcagctactccttcaataccaaatccatcacccacaacaccaatatttggtgaccctactgtacagatgaatggagggaacatagttattgacaggaatgggtccccttcccctgcaacttcgccatttggcttgccaagcagctctccatcgactccaactttcagtacgcctgcaactcagtttgcttctagtacatcaggctcacctggagtttttgaaattggcaagtatagtcaagcttcttcaggtgggttctcaatgggccctagtggtggcaacgacaaatcaaacagaagaattgtcagagttaagagaaggaaatgaaataccaatatttttcaagttgctctgagcatttataagactaaggcaatcagcacgtagaactttttgtttcacatcatttgtctgcggtggcaatgagaatgagatgccattcttaaattgatgatcacaattctggcacagtagcagcaatggaactagccttttcgcgatacggtcgcccatgacattttgttgtacggtttgtcacaacaatgctataatgaaatatataggtacttctccaacttgtattaaacatgttcagcgatcaagctgccctttttttgtgcaattggatcctgaaactaaatttcatcctaataataataatttaggcacgccaattattattattgattatgcaggtgagatttatgtactatatttttttactgtggggagcgagtcaaat

SEQ ID NO: 30227 - DNA, 586 bp, Zea Mays
cttaaatagtaaaaaagcttaaattatacacataggaatttgaactatagtttccaaactcacatttacatccacctagccaatataacaaaaaaaactattacaacgtacaatgaagaacatcagcacatgcgagtacgctgcgtacggcacgtaactagtacacaacacaccacatgtcaattgattgcaagcttcaaaaaatggtggcaagctcatgccagcgacagcaacgggtgcaatgcattacattaccgcaggcaatatcaatcagcatatgcagaataattgaggaaagaaaacaatcccaagtagtttttccagaagtaacatgaaaacagtgaaataaaaataacgccggagttcgggagggggcaaggttgcatatggtagcaacgaatgatgttgaagaaagtaagatttatacacgcacttggctttcaatctgatgacagcaaactgggggaaatagtcaaaggctactgttgtttctcagtggtggaagccacgttagacgctgatctggattctgattcaccacaagcccttataaccgcctcattctgtgataaaacattgcaaaata

SEQ ID NO: 30228 - DNA, 444 bp, Zea Mays
atggaggcgaggtggagatggaggccgagcccggctgggcgcgaacgagcagagggagaagacgagggcgcgcgccagctggaaggaactgggaagccacggcaccggaggagcagaagagatggacgtgcgcgcacgaagctcgacggcggccatgggaatgagcttgaaggagcgcctgccatgggggagagagaaaagcaggaggcgccatgggagaccagggagaggggcgcgccaggcagagggagcgtgcagggagaaatgccggcgagccagggagctggggaagggactcaaggagagggagatctcggcgagctggagcagagaccgagcgccgcgagcaggacaaggcaccgcgagggagaagcagaggaagtaggcacagccagggaggaagacgcgcgtaggggagctgagcgcagagagaacgacgactga

SEQ ID NO: 30229 - DNA, 2155 bp, Zea Mays
gttagtctttagtacacggtcagccgcccgagccgggtcggagttgagcacttccccttctcctacccttcacctcccgtttgcccgcagccgccaccgcgtccccaagcactccagcgcccccgtccccgatcgacgccatggtgtcggaggccagcaagaagaaggccgcccagaagaaggccgctgccgccgcaaagaggggaggcaaggcctcggtggcgtcctcgtcgtcttcatctgcggccgcggccgccgataaggtggcgaacggcgtcgtggcgcttaagctatcagaccgcacctgcaccggggtcctcgcatctcaccccctttcccgggatatccacatagagtctctttctttaacattccatggacacgaccttattgtggattctgatttggagctgaactacggaaggcgatacggtttgcttgggttgaatggctgtggaaaatctactcttctcacagcaataggctgcagagaacttcctatccctgaacacatggacatataccatctaagccatgagattgaagcttctgacatgtctgcactggatgatggtggtggtgaagcattggagcgtgtttatgagcgtctagatgcaatggatgctggaactgcagaaaagcgagctgctgaaattttatttggtctgggttttgacaaacaaatgcaagcaaagaaaactaaagatttctctggaggttggcgtatgaggattgctttagcaagagcactgtttatgaatccaacaatccttttgcttgatgagcccacaaaccatctagatcttgaggcttgtgtctggttggaagagacactgaagaaatttgaccgcatacttgttgtcatatcacactcccaagattttctaaatggagtgtgtactaacattatccatatgcaaaacaagaagctcaagttatacaccggtaactacgatcagtatgttcaaactcgctccgatcttgaagagaatcaaatgaagcagtacaaatgggagcaggaacagattgcttcaatgaaggagtacattgctcgcttcggtcatggttctgcaaagcttgctcgtcaggctcagagcaaagagaaaactcttgcaaagatggagcgaggtggtctcaccgagaaggttgttagggacagagttctagtgttcaggtttacagatgtaggcaaacttcctccacctgtgctgcagtttgttgaagtcaagtttgggtatacaccagataatctcatatacaagagtcttgactttggtgttgatcttgactctagaatcgcattggttggtcccaatggtgcagggaagagcactcttctgaagcttatgactggtgaccttgctccattagatggcatggttcggcgccacaatcacctgcgcattgcacagtaccatcagcatcttgcggacaagctggatctggacatgccggctctggcttacatgatgaaggaataccctgggaccgaagaagagaagatgcgagctgctgttggcaggtttggcctatcaggaaaggcgcaggtgatgccaatgaggaatctttctgatgggcaaaggagccgtgtcatctttgcatggttggcatataggcagccgcaactgctactgctcgatgagccgacaaatcatttggacattgagaccattgactccctggcggaggcactgaatgagtgggatggtggtttggtcttggtgagccatgatttcaggctgatcaaccaggttgctcaagagatttgggtgtgtgagaatcaggcggtgacaaggtgggaaggtgatatcatggatttcaaggcacacttgaagagcaaggctggtttatctgattagagggctttttccagcaaccatgagctttttaactctgtatcacgaagtcccagttttccaatagcgaactatcagagttactttattgtatcggatttcttttgacttgcattgcaacctgattaccttatactacctggaatatttatttatatatcttttgaaatgctattatgtgtattgttaagtttcgtagattttggaagttttgatttgtcaaagttactagattctatgatcattgtgaacatacaacttaaatttagttttcaattcaactgattttatttcttcag

SEQ ID NO: 30230 - DNA, 1693 bp, Zea Mays
aaaatatgcaaaaaaaaaaatctattgcctgactccttcaaaccctgcacaccccacctgccttgtaccaaattcccctgacccgtcggtctgctatcccatctgagctcacggcgatcctctttctcctcatcggcatgagcggcttcttggcggtggtcggcaaggtcggcacctttctgctgtgggtgctgttcctggtcttgcagaccgccaccaggatcgtcggcagcctccttgccagctcagctgagcagcaggatgaccaccatcaggaatcggcggcggcacggcgcaggtcgccgccagcctccccacatcccgaactttacgagccggcgtctgcgtctctggcgcagctgtgggacccaccgcctcttccgcaccttgcttttgctcccgctgcggatgagagctcttcgtcctccagcttacggcggcgtgccagtgcgccgctgccccgagcggatgaagactttgtggtgccatcgagcgcttactcgcgtccaacagtgggggtggctcatacacactctgtgtcagcaccaccactgagggcaatcgagacgcgggcggtgccatctaggctggtgacagccgggggtaagcggccaaggctggagaggaagtactccaagattgttgaccagtaccgatccttggatgaggttattgaagcattagcacaggctggtcttgagtcttctaatttgatcataggaattgatttcacaaagagtaatgaatggacaggaaagaattgcttcaatggtatgagcctgcataatatcagtgacaacccaaatccttatgaacaggcaatatccatcattgggaaaaccttatctgcttttgatgaggataatttaattccttgctttggttttggagacgcatctactcatgaccaagatgtatttgccttctatcctgatgaaagaccatgcaatggttttcaagaagctttagctcgatacagagagattgtacctcatcttcgcctttcgggtcctacgtcattcgccccaataattgacatggccacaaccattgtggagcaaagtggtggccaataccatgttttagtaattattgctgacgggcaggtcacaagaagtgtagatactgaatttggtcagttaagcacccaggagcaaatgacagttgatgctattgtacaagcaagccaattcccattgtctataattcttgttggagttggagatggtccatgggatatgatgaaggaatttgatgacaatataccagctaggtcttttgacaatttccagtttgtcaacttcactgcgatcatgtcaaaaaagataagtcaaagcaaaaaggagacagagttcgccctttcagcactaatggaaattccattgcaatacaaggcaacattagagcttggaattttaggacgtcgaattggagagtcacctgagcggattccacttcctcctccttttgcaagttatagcacagtttcaagagcagaaccatctcgggcaaatagttatcgaagtgtgccttcacatccaagggaggagccagctgtaaattcaactatcacagcatcagttacatccccatcagctgccgaaagtagagttttagaaccccagggcccacatgttgttaatataatgagctgtaataaagaactatgttgattttctgttacaatgcaggt

SEQ ID NO: 30231 - DNA, 1693 bp, Zea Mays
aaaatatgcaaaaaaaaaaatctattgcctgactccttcaaaccctgcacaccccacctgccttgtaccaaattcccctgacccgtcggtctgctatcccatctgagctcacggcgatcctctttctcctcatcggcatgagcggcttcttggttattgaagcattagcacaggctggtcttgagtcttctaatttgatcataggaattgatttcacaaagagtaatgaatggacaggaaagaattgcttcaatggtatgagcctgcataatatcagtgacaacccaaatccttatgaacaggcaatatccatcattgggaaaaccttatctgcttttgatgaggataatttaattccttgctttggttttggagacgcatctactcatgaccaagatgtatttgccttctatcctgatgaaagaccatgcaatggttttcaagaagctttagctcgatacagagagattgtacctcatcttcgcctttcgggtcctacgtcattcgccccaataattgacatggccacaaccattgtggagcaaagtggtggccaataccatgttttagtaattattgctgacgggcaggtcacaagaagtgtagatactgaatttggtcagttaagcacccaggagcaaatgacagttgatgctattgtacaagcaagccaattcccattgtctataattcttgttggagttggagatggtccatgggatatgatgaaggaatttgatgacaatataccagctaggtcttttgacaatttccagtttgtcaacttcactgcgatcatgtcaaaaaagataagtcaaagcaaaaaggagacagagttcgccctttcagcactaatggaaattccattgcaatacaaggcaacattagagcttggaattttaggacgtcgaattggagagtcacctgagcggattccacttcctcctccttttgcaagttatagcacagtttcaagagcagaaccatctcgggcaaatagttatcgaagtgtgccttcacatccaagggaggagccagctgtaaattcaactatcacagcatcagttacatccccatcagctgccgaaagtagagttttagaaccccagatgtgcccagtttgcctttccaaaccccgggacatggcatttggttgtggccaccagacatgttcagaatgtggaccgcaagtcacagattgccccatctgtcgaaggcccattgacacgagagtaaaattgtactaattatttttgggtggaactaggtttaactgaagcacatgccaggagtagaatccactaaaataaatctctatttgactgttaacgatgtagtgtgaattaatttaataaatcagacgtagagaaaaggaggatacttgttctttgcttgtatcctgttcctacattgtgcgttgatagatgtgaggctacttccattatctgatactggacaggcgccctacttcgctgcggcgattacatataatgttgaagtatggttatggtttgtctgtaaactggatggtatttggcttgttagtatggataacctagcttgtatataaagagacaatcattagtagatgatgtggtttgctaatatgaataactaaacactccctctattcccgtttataattcgtaccattccgtcttattcatcttttttttttgcaaaaaataaaaaa

SEQ ID NO: 30232 - DNA, 2176 bp, Zea Mays
aaaatatgcaaaaaaaaaaatctattgcctgactccttcaaaccctgcacaccccacctgccttgtaccaaattcccctgacccgtcggtctgctatcccatctgagctcacggcgatcctctttctcctcatcggcatgagcggcttcttggcggtggtcggcaaggtcggcacctttctgctgtgggtgctgttcctggtcttgcagaccgccaccaggatcgtcggcagcctccttgccagctcagctgagcagcaggatgaccaccatcaggaatcggcggcggcacggcgcaggtcgccgccagcctccccacatcccgaactttacgagccggcgtctgcgtctctggcgcagctgtgggacccaccgcctcttccgcaccttgcttttgctcccgctgcggatgagagctcttcgtcctccagcttacggcggcgtgccagtgcgccgctgccccgagcggatgaagactttgtggtgccatcgagcgcttactcgcgtccaacagtgggggtggctcatacacactctgtgtcagcaccaccactgagggcaatcgagacgcgggcggtgccatctaggctggtgacagccgggggtaagcggccaaggctggagaggaagtactccaagattgttgaccagtaccgatccttggatgaggttattgaagcattagcacaggctggtcttgagtcttctaatttgatcataggaattgatttcacaaagagtaatgaatggacaggaaagaattgcttcaatggtatgagcctgcataatatcagtgacaacccaaatccttatgaacaggcaatatccatcattgggaaaaccttatctgcttttgatgaggataatttaattccttgctttggttttggagacgcatctactcatgaccaagatgtatttgccttctatcctgatgaaagaccatgcaatggttttcaagaagctttagctcgatacagagagattgtacctcatcttcgcctttcgggtcctacgtcattcgccccaataattgacatggccacaaccattgtggagcaaagtggtggccaataccatgttttagtaattattgctgacgggcaggtcacaagaagtgtagatactgaatttggtcagttaagcacccaggagcaaatgacagttgatgctattgtacaagcaagccaattcccattgtctataattcttgttggagttggagatggtccatgggatatgatgaaggaatttgatgacaatataccagctaggtcttttgacaatttccagataagtcaaagcaaaaaggagacagagttcgccctttcagcactaatggaaattccattgcaatacaaggcaacattagagcttggaattttaggacgtcgaattggagagtcacctgagcggattccacttcctcctccttttgcaagttatagcacagtttcaagagcagaaccatctcgggcaaatagttatcgaagtgtgccttcacatccaagggaggagccagctgtaaattcaactatcacagcatcagttacatccccatcagctgccgaaagtagagttttagaaccccagatgtgcccagtttgcctttccaaaccccgggacatggcatttggttgtggccaccagacatgttcagaatgtggaccgcaagtcacagattgccccatctgtcgaaggcccattgacacgagagtaaaattgtactaattatttttgggtggaactaggtttaactgaagcacatgccaggagtagaatccactaaaataaatctctatttgactgttaacgatgtagtgtgaattaatttaataaatcagacgtagagaaaaggaggatacttgttctttgcttgtatcctgttcctacattgtgcgttgatagatgtgaggctacttccattatctgatactggacaggcgccctacttcgctgcggcgattacatataatgttgaagtatggttatggtttgtctgtaaactggatggtatttggcttgttagtatggataacctagcttgtatataaagagacaatcattagtagatgatgtggtttgctaatatgaataactaaacactccctctattcccgtttataattcgtaccattccgtcttattcatcttttttttttgcaaaaaataaaaaa

SEQ ID NO: 30233 - DNA, 1590 bp, Zea Mays
cgtctctgtgtgcgcgtgattgtcggtcgcacatcgctctcagacgaaggttattgaagcattagcacaggctggtcttgagtcttctaatttgatcataggaattgatttcacaaagagtaatgaatggacaggaaagaattgcttcaatggtatgagcctgcataatatcagtgacaacccaaatccttatgaacaggcaatatccatcattgggaaaaccttatctgcttttgatgaggataatttaattccttgctttggttttggagacgcatctactcatgaccaagatgtatttgccttctatcctgatgaaagaccatgcaatggttttcaagaagctttagctcgatacagagagattgtacctcatcttcgcctttcgggtcctacgtcattcgccccaataattgacatggccacaaccattgtggagcaaagtggtggccaataccatgttttagtaattattgctgacgggcaggtcacaagaagtgtagatactgaatttggtcagttaagcacccaggagcaaatgacagttgatgctattgtacaagcaagccaattcccattgtctataattcttgttggagttggagatggtccatgggatatgatgaaggaatttgatgacaatataccagctaggtcttttgacaatttccagtttgtcaacttcactgcgatcatgtcaaaaaagataagtcaaagcaaaaaggagacagagttcgccctttcagcactaatggaaattccattgcaatacaaggcaacattagagcttggaattttaggacgtcgaattggagagtcacctgagcggattccacttcctcctccttttgcaagttatagcacagtttcaagagcagaaccatctcgggcaaatagttatcgaagtgtgccttcacatccaagggaggagccagctgtaaattcaactatcacagcatcagttacatccccatcagctgccgaaagtagagttttagaaccccagatgtgcccagtttgcctttccaaaccccgggacatggcatttggttgtggccaccagacatgttcagaatgtggaccgcaagtcacagattgccccatctgtcgaaggcccattgacacgagagtaaaattgtactaattatttttgggtggaactaggtttaactgaagcacatgccaggagtagaatccactaaaataaatctctatttgactgttaacgatgtagtgtgaattaatttaataaatcagacgtagagaaaaggaggatacttgttctttgcttgtatcctgttcctacattgtgcgttgatagatgtgaggctacttccattatctgatactggacaggcgccctacttcgctgcggcgattacatataatgttgaagtatggttatggtttgtctgtaaactggatggtatttggcttgttagtatggataacctagcttgtatataaagagacaatcattagtagatgatgtggtttgctaatatgaataactaaacactccctctattcccgtttataattcgtaccattccgtcttattcatcttttttttttgcaaaaaataaaaaa

SEQ ID NO: 30234 - DNA, 1012 bp, Zea Mays
attgtcggtcgcacatcgctctcagacgaaggttattgaagcattagcacaggctggtcttgagtcttctaatttgatcataggaattgatttcacaaagagtaatgaatggacaggaaagaattgcttcaatggtatgagcctgcataatatcagtgacaacccaaatccttatgaacaggcaatatccatcattgggaaaaccttatctgcttttgatgaggataatttaattccttgctttggttttggagacgcatctactcatgaccaagatgtatttgccttctatcctgatgaaagaccatgcaatggttttcaagaagctttagctcgatacagagagattgtacctcatcttcgcctttcgggtcctacgtcattcgccccaataattgacatggccacaaccattgtggagcaaagtggtggccaataccatgttttagtaattattgctgacgggcaggtcacaagaagtgtagatactgaatttggtcagttaagcacccaggagcaaatgacagttgatgctattgtacaagcaagccaattcccattgtctataattcttgttggagttggagatggtccatgggatatgatgaaggaatttgatgacaatataccagctaggtcttttgacaatttccagtttgtcaacttcactgcgatcatgtcaaaaaagataagtcaaagcaaaaaggagacagagttcgccctttcagcactaatggaaattccattgcaatacaaggcaacattagagcttggaattttaggacgtcgaattggagagtcacctgagcggattccacttcctcctccttttgcaagttatagcacagtttcaagagcagaaccatctcgggcaaatagttatcgaagtgtgccttcacatccaagggaggagccagctgtaaattcaactatcacagcatcagttacatccccatcagctgccgaaagtagagttttagaaccccagagataagctgaatgcaaaactgct

SEQ ID NO: 30235 - DNA, 3625 bp, Zea Mays
ctcatttttccgcctattccgaaagaagaatcatgtaacctctgctaacaaacatatagcgccaaggctaaaaataataatgactttcgtgttcattgtatctccatcatccttcgccatttaaacacaatatttagtaaaggacgtgctacaagattaatcaacaaccgagagtaatccatcaccataccttgttaaaacattgtattctagccgtattcgaagtaataataaacatgaaatacataacaatggtcttgcagcacgtaaaagcaaaaggaggaggcagtgcccttcggccactagcagtccttgaatcaagtaaaaaaaggaaaaaagaaaacaacagtgactacaacaaataattatcgataactgttagttaaccaatccaaaaaacaatctaatgcttgcacgggcaggaaattctacgattctaaactagacggagctataaaacataagtagtcatttgtgtgttgtataagaacacaggcatgaattgaaaagaaaagtattaatgaaggaactgaaagattgtagggtaaatcgtctagaatggttagaggaaatataagtaacagttctgttaccatgtgttatatgaagggttttatattaaagtgatttgagcatattcatgtagtaaagtcacagtgcctttcacgaatatcacatacctaattaatactaacagttatcccattcttcctagggataaaatggatattcatttgataaggaaaatggatgtcataatggtaaaactatatacataatgagaactgatgcttgatagaggagcagtgatatggtacatatatcctttgtctcacaatctgaacctttcttcctgcaaagtggaactgttaagtgccaaataccagaatgcagtgtcctaataaagttggtcaatataaacataacgttggcaacccaacaagaaatcgtgaatatataaagctgctctcatgaaaaggttaaacatatataagtgaaaaagaaataattttatttttctttataagcatgtatatcagcagggagaaaatcaattgaaaagaaattaacactagaattcaaataaaggttctcaagaattcatgcaatgaagaaaagatctcatcttctagggcatgtgcctggaaagttagattatgtccactttatagaaagaagttgaagtaagcaaagattgaaagaaattttgcactatatacatcaaactgtgagaccacaattaaaaaagttaggtcacggtgtattttcagctttgtgactaatgattattttgagccattcatacgtagtcttaagttgttttgtatttttattacttgaagtgtctagaaatatttatttctatatgaacatcaagtttctccatgtgaataggcaagggaatggtcattgcattgtcagcaaattgactttcttcaggaaagtagtaccttaagtggtgcaggcatcacagtgtatcaggctagtcttgtggcctagcttcgttgatatgatgatatcttttaacaatcaaattcaggatttaatctcgaatactgggctgctacgtgcggtaaagggtgatgactgtcttttgtgatcagccagattggcttcaagtatgggcagagattgagagacatgacagtcttaatatgcttgtctattgtggcatccggcgtggaagcacaagacgtcgtagcatatggcgtggaaacatcggaggagctccggccaccgctactggcaatctcggaaccccacgacttcttggcctgtggagcggtcttcccctgaaggccaactctaggtgccatagaaaatggagcgaatcttcggcggctggtgccgtacttgcagttgtcgccatcgccgcctaccaagcacacgttggtggcgccgtccgcagcacccatgatgccgcatcggagcagcacgtcgcggagatgagcgtcgtgccacacggatgtagagatgtcgtgcgccaccggacgggagcctgcggcgggagagcaacgttcggccgagatgcggggagggcggtggacgggatccgaggaggccagcggttgaacatgagccgacgcgtgggtcggcggcgaagcgagtcggtggtcgtgccccagggcgaggtgggccaacaagggcgacggcagggacgagaggtctgggagggagtgtcaaactcacggcgggtgaaggacgaggaaaccttggacgccccttgcggcgcggcgccgtttgacggggaggcgtattataattcgttgaacttcggaattgtagtatctgcgtcagatttagctgcagtaatcctcgtttttacggcagtccgtttcttacaacggatccacggagctcctctccccgagcgctgctcttcctcgggcatctccaccgcgcggatggtgatggtcccgggcggcgtcgcgccgctgcactcccacccgggaggcaccgagctcatcttcgtcatcgagggcagcgtcgtctccggcttcatcagcgccacgctcaacagggtgtacaccaagacgctcagcgacaaccccggcctgcagatcctcgacttcgcgctcttcgccaacgacctgcccacagaggtcgtgaacaaggtgaccaacctggacgaactgcagatcgtcaaactcaaggcgctgttcggagggaggggctagacgcatatgtactccgtatataggaacagtcaacggtgttgatcattgaattgtgtgtattattctatacttgtgatggatatttatcttgtcattctataaaataaattgtaacgcgggcagcaagcgtgagagcgaaagtagctgccacatttgatgtactaatatttacatctcgattgttaataataatacattattagcgctagtttgatgaccctattttttaagaaatttagataaattgttgagaatcgctggtaaaaatgaagaaccattcaaattaacagatttctttgagaagaaccattccaacttcttcagcgtaactctgcccgtcaaatcactaggtaaagactgacatctaagagaatgataaattagacaaaataaaaaggaaaaaagaactgattcgatgtctccattaactagtagccccaaagctgcatctaacgtcagatgctcaagacactgcacaggcgtcatcagaacgggagatgggaagtaagaattgggcgtgttttcgggaatatttacctctgcctgttccgttccagtcactcaagaagaaggcgcctgcgcatacgacatcgcggcgatagagtagaaaggcgtgaacgcggtcgccaacttcgacctgagatcctaacgtcacatggctgaaagtggctggaaccaagtgcagctccggcagccttcaacccagaggcggcggcgcggcgctcgtgatgcaggcagctccaccgccaggtggagacgacccagatgctcccgcgaggcaggttcctactcgaccatagcagtagctgcggcggcggcaaggaggcccctatgtccatggcgtctccaggtgcgggcggcatgaggaagagaggctcctcaaccgcgctcagcctcctgctcgaggagaggaggagcgctcggggagagcagcgctcgtggatccg

SEQ ID NO: 30236 - DNA, 1014 bp, Zea Mays
tcacgcaaccaccactgcctcacgcaaccacctcagcccggtccacctctaccaccggccacccactgcctccacccccgccctagatcaccaccgcactctcaggcgcaagaacgagctcaccaggcaaagtcacggcggcgacctccgccttccaggtctcgcccttgctggcgcgcgcctctgctcaccacccagcgccgcgtcttccttctccagtccggtcgctggccgaccgccagcgcggctccgggccctgctttccgcacgcccaagcctgcgcgctccggacgcacctctcctgctcttctgggcttgggaaagagaagaaaccagcataaaaacactagatctgtgaaggatttgaggaagaaaccaaaccgaaaccctagtgacgatgctagagttcggacctcgctctgagtcgaaacgaccagagaccgctgccttccctccccattttcctttcccatgaaccaagcagcgtatgagctttccatccctcctcatttacctatcccacctctcatatcccgttatccaaacggcacctcagggtactgcaatccagaagcaggggccctggcctcagcgcacctggatggcagggctggaggagttgaagaagaagctacaacccttgctgttcgatgacctggacagagttggcgccagtaccagggtgcccttaccagaagatacttgcgattcctacgcagtttctgatggtgggactgttaatttacttagtagatccttgggtgagtataaaatcaatgagcatggctttcataaacgaagtgctgggccagacgagttagattctgatgagaaggcttaccgttgtgcctctcatgagatgcatatatttggtcccatcggtaatggtgcaagcagtgtagtggagagagctatatttattccagttcatcgaatcttggccttgaagaagataaacatattcgagaagattcatcttgaagcaatcttgctcattagaagtgtcattttgtc

SEQ ID NO: 30237 - DNA, 2366 bp, Zea Mays
tcacgcaaccaccactgcctcacgcaaccacctcagcccggtccacctctaccaccggccacccactgcctccacccccgccctagatcaccaccgcactctcaggcgcaagaacgagctcaccaggcaaagtcacggcggcgacctccgccttccaggtctcgcccttgctggcgcgcgcctctgctcaccacccagcgccgcgtcttccttctccagtccggtcgctggccgaccgccagcgcggctccgggccctgctttccgcacgcccaagcctgcgcgctccggacgcacctctcctgctcttctgggcttgggaaagagaagaaaccagcataaaaacactagatctgtgaaggatttgaggaagaaaccaaaccgaaaccctagtgacgatgctagagttcggacctcgctctgagtcgaaacgaccagagaccgctgccttccctccccattttcctttcccatgaaccaagcagcgtatgagctttccatccctcctcatttacctatcccacctctcatatcccgttatccaaacggcacctcagggtactgcaatccagaagcaggggccctggcctcagcgcacctggatggcagggctggaggagttgaagaagaagctacaacccttgctgttcgatgacctggacagagttggcgccagtaccagggtgcccttaccagaagatacttgcgattcctacgcagtttctgatggtgggactgttaatttacttagtagatccttgggtgagtataaaatcaatgagcatggctttcataaacgaagtgctgggccagacgagttagattctgatgagaaggcttaccgttgtgcctctcatgagatgcatatatttggtcccatcggtaatggtgcaagcagtgtagtggagagagctatatttattccagttcatcgaatcttggccttgaagaagataaacatattcgagaaggagaagaggcaacaaattctgaatgagatgagaacattatgtgaagcatgttgttatcctggtttagttgaattccagggtgcattttacatgcctgattctggacaaataagtatcgctcttgaatacatggatggtggttccttggcagatgttataagggtcaagaagtctataccagaaccagttctttcacatatgctacagaaagtattgcttggtctgcgatacttgcatgaagtaaggcatctagtgcatagagatataaagccagcaaatttactggtaaatcttaagggcgaggcgaagattacagattttggtgtgagtgctggtttggacaatacaatggctatggcacagtcacatatatgtcacctgagagaattcgtaatgagaactattcttatgctgctgatatttggagtcttggactaacaatattggaatgtgctactggaaaattcccatatgacgtaaatgagggccctgcaaatctaatgttgcagatacttgatgatccatcaccaacaccaccagtagatacttgttcattagaattctgctcattcatcaatgattgcttgcagaaagatgctgatgcaaggcccacatgtgagcagcttctgtcacacccattcatcaagaggtatgcaggaactgaagtggacttggcagcatatgtcaaaagtgtagttgacccaacagaaaggctaaagcaaatagctgagatgcttgctatacattactacctcttgtttaatggacctgatgggatttggcatcatatgaagacattctacatggaacaatctactttcagtttctcagagaacgtgtatgttggccagaatgaaatttttgatattttgtcaaatataaggaaaaagctaaaaggtgataggcctcgagagaaaattgttcatgttgtcgagaagctacattgtcgtgcaaatggtgaaactggggttgcaattcgtgtgtctggatctttcattgtgggaaaccaatttcttgtatgtggcgaggggataaaagctgaagggatgcctagcttggatgagctctctattgacattccaagcaaacgcgtaggccagttcagagagcagtttatcatgcaaccgggaaacttaatgtcatgctattacatatcaaagcaagatctgtacattatccaatcctgattgaacatattatttgtaagattattctctgaagcacatgtatagaggatttagaagaattcctttcggacctggttttgaatcttatttactttgtggaactgaaattttgggccaaacctctgacaagaattgaaaagtttaagtcttcaactatattcatgtttagaactgtttttatatttggttggtattgataattttcgttt

SEQ ID NO: 30238 - DNA, 2465 bp, Zea Mays
tcacgcaaccaccactgcctcacgcaaccacctcagcccggtccacctctaccaccggccacccactgcctccacccccgccctagatcaccaccgcactctcaggcgcaagaacgagctcaccaggcaaagtcacggcggcgacctccgccttccaggtctcgcccttgctggcgcgcgcctctgctcaccacccagcgccgcgtcttccttctccagtccggtcgctggccgaccgccagcgcggctccgggccctgctttccgcacgcccaagcctgcgcgctccggacgcacctctcctgctcttctgggcttgggaaagagaagaaaccagcataaaaacactagatctgtgaaggatttgaggaagaaaccaaaccgaaaccctagtgacgatgctagagttcggacctcgctctgagtcgaaacgaccagagaccgctgccttccctccccattttcctttcccatgaaccaagcagcgtatgagctttccatccctcctcatttacctatcccacctctcatatcccgttatccaaacggcacctcagggtactgcaatccagaagcaggggccctggcctcagcgcacctggatggcagggctggaggagttgaagaagaagctacaacccttgctgttcgatgacctggacagagttggcgccagtaccagggtgcccttaccagaagatacttgcgattcctacgcagtttctgatggtgggactgttaatttacttagtagatccttgggtgagtataaaatcaatgagcatggctttcataaacgaagtgctgggccagacgagttagattctgatgagaaggcttaccgttgtgcctctcatgagatgcatatatttggtcccatcggtaatggtgcaagcagtgtagtggagagagctatatttattccagttcatcgaatcttggccttgaagaagataaacatattcgagaaggagaagaggcaacaaattctgaatgagatgagaacattatgtgaagcatgttgttatcctggtttagttgaattccagggtgcattttacatgcctgattctggacaaataagtatcgctcttgaatacatggatggtggttccttggcagatgttataagggtcaagaagtctataccagaaccagttctttcacatatgctacagaaagtattgcttgtatggatcttccatgtcttttcaatccatatctgtagtttctagacattagtaaaagccatgatatggctttctgtatatttgacttggtacattcttctgtttataattcaaaagggtctgcgatacttgcatgaagtaaggcatctagtgcatagagatataaagccagcaaatttactggtaaatcttaagggcgaggcgaagattacagattttggtgtgagtgctggtttggacaatacaatggctatgtgtgctacctttgtaggcacagtcacatatatgtcacctgagagaattcgtaatgagaactattcttatgctgctgatatttggagtcttggactaacaatattggaatgtgctactggaaaattcccatatgacgtaaatgagggccctgcaaatctaatgttgcagatacttgatgatccatcaccaacaccaccagtagatacttgttcattagaattctgctcattcatcaatgattgcttgcagaaagatgctgatgcaaggcccacatgtgagcaggaactgaagtggacttggcagcatatgtcaaaagtgtagttgacccaacagaaaggctaaagcaaatagctgagatgcttgctatacattactacctcttgtttaatggacctgatgggatttggcatcatatgaagacattctacatggaacaatctactttcagtttctcagagaacgtgtatgttggccagaatgaaatttttgatattttgtcaaatataaggaaaaagctaaaaggtgataggcctcgagagaaaattgttcatgttgtcgagaagctacattgtcgtgcaaatggtgaaactggggttgcaattcgtgtgtctggatctttcattgtgggaaaccaatttcttgtatgtggcgaggggataaaagctgaagggatgcctagcttggatgagctctctattgacattccaagcaaacgcgtaggccagttcagagagcagtttatcatgcaaccgggaaacttaatgtcatgctattacatatcaaagcaagatctgtacattatccaatcctgattgaacatattatttgtaagattattctctgaagcacatgtatagaggatttagaagaattcctttcggacctggttttgaatcttatttactttgtggaactgaaattttgggccaaacctctgacaagaattgaaaagtttaagtcttcaactatattcatgtttagaactgtttttatatttggttggtattgataattttcgttt

SEQ ID NO: 30239 - DNA, 3372 bp, Zea Mays
tctatatttaatatatagctatctatatttcatctgaaaatacccgtgtttgtctgtgcattcgaagctattcgaatctgagtaaaaatataaaaagaatggtttcatcgccgtccctagctgcctgccagtgcagtccagtgctggtgagccgcgtgcggcccgcgggttgccttcttctcttgctagttcacccgtcaccaactcgctcctcgcagcagcagcggacgagcccctctgccctcccctctcgtccctccaggcggcaggcgctagctcgacgttcggccccgcgggccggatccgtcgccacagatccgctgcctcctccccgagtcctgcctgatcgggttttttcagttttccccgttccccgtgggccactcgaccggccgacagggcggaaaggctgccccggccgacagggctggtggcagtgagtccgcgcaggcaaattgaattccggcggcgaatcccatcctgtggtcctctctcgagtcctccgcgtctgcgcctcctccatctcgtcgccgttctcgacgcccgcggatccaacggtccaacactgggtttgcccaacagcccaagtgatggcagacgtccaggaatgccattatgattcaacgtcacaggccactgacagcttgcatgttgagcctatatatgagtcgttcctatgcccgcttaccaaacaggttatgcgggatcctgtctctattgacagtggtgttacgtttgaacgcgatgccattttgaagtacttcaatgaatgtcttagcagcagaaggaggcttgtctgccctgtaactaagatggagctcagcaacactgagttaaatccaagcatagctctgaggaacactattgatgaatggatgaaccgcaatgaggtggctaaacttgacgtcgctcggaagtcattgacttctgatagcacggaaagtgatatggtacaagcactccagtatgttgatgagatatgtcagagaagtcgatccagtaggcaggttgtgagaagagatgggttgataatcatgattgctgacttgttgaagaaaagcagtacgaaagtacggcaaatggcactagagactcttcgctccatcgcaaaagatgacaatgacaataaggttgagattgctgctggagacaatattcgcacaattgtaaagttcttaaatcatggtcagactcaggaaaaggaacgagctgtgtctctgttgtttgaactttcagagaacaaggctctttcagaaagaattggcagtgtttctggagctattcttatacttgttggcttgtcaagcagtaaagtagaaaactcgctgattgttgacagagctgagaagacattggaaaacttagagagctgcgaaaagaatgttagacagatggctgaaaatggtagattgcaaccccttctgaggctgcttcttgaaggttcacctgacatacaattatctatggctgcatacctcggagagcttgttttaagcaatgatgttaaggtacttgtggcacaaaaggctggttccacactagtcaatatcatgaaaaaagggaatagagaggccagagaagcagctttgaaggcattgaaccaaatttcatcttatgatgctagtgcaaagatattaattgaagcaggtattcttccgcctctcatcacagacctctttactgttggcagtaatcagcttcctatgagattgaaggaggtctcagcgaccattcttgcaaatgttgtggcatcgggtgcacgttttgagtccattccacttgatcataataggcagaccttagtgtctgaagacattgttcacaatctacttcatcttataagcaacacaggacctgcaattgagtgtaagttgctccaggtgctcgttggtctaactgattcttcgacatctgtacaaaatatagttgatgctatcaaaggttcaggtgctattgtcagtttaattcagtttgttgaagcacctcaaagggaagtacgcatgaattccatcaagctcctgaataacatatcaccatatatgggtcaagaacttgctgatgcttttcgtggaaactttagtcaactccgcagcttggtcaaggtcattgttgataacaatggtatttctgaagagcaagcagctgctgctggccttgtagctgatcttcccatgcgggactctgtcctcaccagacgtcttcttcaagatggggcatttgcaacaatcattccaaaagttttaagaatccgacaaggcgagattcgtggggggcgttttgtgaacccattcctcgaaggtctagttagaatagtctcccggatcacatttgtcttggatgatgatccagatatcattgttgttgcttgtgattacaatcttacttcactcttcactgatctgcttcagatgaatgggcttgacattgtccagatcgtctctgctaatgcgctagagaaactctcacagcagtcaaaacatcttacgaagatactgcctgctcccagcccagggttgtgcttttcaatatttccatgcctcagccagaagactgtagcaactggggtttgtagagttcactgtgggatttgttctgcaagggagagcttctgtctcttggaggggaagtcagtggagaagttggttgcttgcttggataataataatgagaaagtagttgaagctgccctatcagcgttatccactttactggaggatggagtggacattgaccaaggtgtcatggtgctgtgtgatgccgaaggaatcaacccaatacttgacgtattgtgtgagaacagaaatgaggcactgcgccagagagcggtgtgggcagtggagagaatcctgaggatggatgaaatagcatatgaaatatcaggaaaccaaaatgttggtacagccttggttgaggccttcaggcatggtgactataggacaagacaagttgcagagcgagcattgaagcatgtagataagctgcccaatttctctgggatattttctaagatgggagcacaatgacgacgttacatggaagtagtctaattctattttgacacatggattgcagatccacatgaggcacagatgaacacatgtagattggttttgctgacccgcagatggtggtagcgatccgattgatcgaagaagaatcgaaacattgcacgtgttgtatagtgtatatttctacctgtaaacttgtatgtattttttagattggtcagattcatagaataggttgctatccctgttgtgtttagataaatataaataatgcataatccccagctctgggtggggaaaaagaaagaaatgtgaagtatttgcacgtatttaatcatggttttctggttgagtttattgcgat

SEQ ID NO: 30240 - DNA, 3228 bp, Zea Mays
gtccagtgctggtgagccgcgtgcggcccgcgggttgccttcttctcttgctagttcacccgtcaccaactcgctcctcgcagcagcagcggacgagcccctctgccctcccctctcgtccctccaggcggcaggcgctagctcgacgttcggccccgcgggccggatccgtcgccacagatccgctgcctcctccccgagtcctgcctgatcgggttttttcagttttccccgttccccgtgggccactcgaccggccgacagggcggaaaggctgccccggccgacagggctggtggcagtgagtccgcgcaggcaaattgaattccggcggcgaatcccatcctgtggtcctctctcgagtcctccgcgtctgcgcctcctccatctcgtcgccgttctcgacgcccgcggatccaacggtccaacactgggtttgcccaacagcccaagacgtccaggaatgccattatgattcaacgtcacaggccactgacagcttgcatgttgagcctatatatgagtcgttcctatgcccgcttaccaaacaggttatgcgggatcctgtctctattgacagtggtgttacgtttgaacgcgatgccattttgaagtacttcaatgaatgtcttagcagcagaaggaggcttgtctgccctgtaactaagatggagctcagcaacactgagttaaatccaagcatagctctgaggaacactattgatgaatggatgaaccgcaatgaggtggctaaacttgacgtcgctcggaagtcattgacttctgatagcacggaaagtgatatggtacaagcactccagtatgttgatgagatatgtcagagaagtcgatccagtaggcaggttgtgagaagagatgggttgataatcatgattgctgacttgttgaagaaaagcagtacgaaagtacggcaaatggcactagagactcttcgctccatcgcaaaagatgacaatgacaataaggttgagattgctgctggagacaatattcgcacaattgtaaagttcttaaatcatggtcagactcaggaaaaggaacgagctgtgtctctgttgtttgaactttcagagaacaaggctctttcagaaagaattggcagtgtttctggagctattcttatacttgttggcttgtcaagcagtaaagtagaaaactcgctgattgttgacagagctgagaagacattggaaaacttagagagctgcgaaaagaatgttagacagatggctgaaaatggtagattgcaaccccttctgaggctgcttcttgaaggttcacctgacatacaattatctatggctgcatacctcggagagcttgttttaagcaatgatgttaaggtacttgtggcacaaaaggctggttccacactagtcaatatcatgaaaaaagggaatagagaggccagagaagcagctttgaaggcattgaaccaaatttcatcttatgatgctagtgcaaagatattaattgaagcaggtattcttccgcctctcatcacagacctctttactgttggcagtaatcagcttcctatgagattgaaggaggtctcagcgaccattcttgcaaatgttgtggcatcgggtgcacgttttgagtccattccacttgatcataataggcagaccttagtgtctgaagacattgttcacaatctacttcatcttataagcaacacaggacctgcaattgagtgtaagttgctccaggtgctcgttggtctaactgattcttcgacatctgtacaaaatatagttgatgctatcaaaggttcaggtgctattgtcagtttaattcagtttgttgaagcacctcaaagggaagtacgcatgaattccatcaagctcctgaataacatatcaccatatatgggtcaagaacttgctgatgcttttcgtggaaactttagtcaactccgcagcttggtcaaggtcattgttgataacaatggtatttctgaagagcaagcagctgctgctggccttgtagctgatcttcccatgcgggactctgtcctcaccagacgtcttcttcaagatggggcatttgcaacaatcattccaaaagttttaagaatccgacaaggcgagattcgtggggggcgttttgtgaacccattcctcgaaggtctagttagaatagtctcccggatcacatttgtcttggatgatgatccagatatcattgttgttgcttgtgattacaatcttacttcactcttcactgatctgcttcagatgaatgggcttgacattgtccagatcgtctctgctaatgcgctagagaaactctcacagcagtcaaaacatcttacgaagatactgcctgctcccagcccagggttgtgcttttcaatatttccatgcctcagccagaagactgtagcaactggggtttgtagagttcactgtgggatttgttctgcaagggagagcttctgtctcttggaggggaagtcagtggagaagttggttgcttgcttggataataataatgagaaagtagttgaagctgccctatcagcgttatccactttactggaggatggagtggacattgaccaaggtgtcatggtgctgtgtgatgccgaaggaatcaacccaatacttgacgtattgtgtgagaacagaaatgaggcactgcgccagagagcggtgtgggcagtggagagaatcctgaggatggatgaaatagcatatgaaatatcaggaaaccaaaatgttggtacagccttggttgaggccttcaggcatggtgactataggacaagacaagttgcagagcgagcattgaagcatgtagataagctgcccaatttctctgggatattttctaagatgggagcacaatgacgacgttacatggaagtagtctaattctattttgacacatggattgcagatccacatgaggcacagatgaacacatgtagattggttttgctgacccgcagatggtggtagcgatccgattgatcgaagaagaatcgaaacattgcacgtgttgtatagtgtatatttctacctgtaaacttgtatgtattttttagattggtcagattcatagaataggttgctatccctgttgtgtttagataaatataaataatgcataatccccagctctgggtggggaaaaagaaagaaatgtgaagtatttgcacgtatttaatcatggttttctggttgagtttattgcgat

SEQ ID NO: 30241 - DNA, 8460 bp, Zea Mays
agaaaaaaaagcgacaccacccggccccaaacaacaatcacaaccctctctctccctctccttcacgtagccgcctctgaatccccacctctctgctctcccgtcggcctcctccgcgaccgatgtgtgtgccccgccgccggcccaaaacactagaggtgacgagcaggtaaggggttccgatcggagatggcggcggcggcggccgcacatagagccagcttcccgttgcgcctgcagcagatccttgctggaagccgcgctgtctcacctgcgatcaaggtcgagtctgagccgcccgcaaatgtcaaagcatttattgatcaagtaatcaatattccactacatgacattgccataccgctatcaggcttccgttgggagttcaataagggaaatttccaccactggaagcctttatttattcattttgacacatatttcaagacatacatttcttctcggaaggatcttcttttatctgatgatatgactgaggctgaacctatgccaaagaatgccatcttgaaaattttaatagttatgcagattattttggagaactgtcagaatagaagttcttttactggtcttgaggccaccagtgagttgctcttcacaatgagcaggccaccatcttcacctatggagacagatagtaaaactggaaaggatggaaaggatatgaattcttcatggatctatggtcccctcatcagctatggcgcaattatggatcatcttgtgacctcgtcttttattctctcttcatcaactagacaattacttgagcagcctatttttaatggatctgtaaggtttcctcaagatgctgagaggttcatgaagttacttcagtctaaggtgttgaagacagttcttcccatctgggctcatcctgagtttccagaatgcaacattgagttgattagttcagtcatgtccatcatgaggcatgtttgctctggggtggaagtgaaaaacactgttggcaatgatggtgctcgtttaactggtccacctcctgatgagagtgcaatttcattgattgtagagatggggttttctcgtgcaagagctgaagaagcattaagacaagttggaaccaacagtgttgaaatagcaactgattggttattctcacacccagaggatgaacttgctcgggcgctcgcaatgtctcttgggaattctgatacacctgcacaagagggaaatggtaggtccaatgaccttgagctggaggaagtaacagtccagctgcctcctatagatgaaatgttacactcatgttttcagctacttcagacaaaggaagcattagctttccctgtcagggatatgcttgttactatcagctcacagaaggatggccaaaaccgagtaaaggtgcttacatatttgattgaaaatctgaaacaatgtgtggtggcatctgagccttcaaatgatactgcactgtctgctcttttacatgttcttgctttgattctccatggagatactgctgctcgtgaagttgcctcaaaggcaggaattgtgaaggttgctttagatctgctttccagctgggagttggaacttagggaaagtggcatgattgaggttcctaattgggtaagttcctgtttcctttctgttgatcagatgctccagttggaaccaaagttgccagatgttacagagctagatgttctgaaaagggataattcaaatataaaaacatcacttgtgattgatgagagcaagaaaaaagattcagaatccttgtcaagtgttggattactagacatggaggaccagtatcaacttttgaagatctgttgcaagtgcatagaaaaacagttgccttcggcttccatgcatgctattcttcagctctctgcaacactgacaaaagttcatgcagctgctatttgtttccttgagtctggtggtctgaatgcattgctatcattgccaacaagtagtttgttttctgggttcaacagtgtggcttctacaataattcgtcatattttggaggaccctcacacccttcagcaagcaatggaattagagatacgtcacagtcttgtcacagctgctaatcgacatacaaatcccagggttaccccacgcaattttgtccagaatttggcatttgtcatatatagggacccagtgatatttatgaaagctgtccagtctgtgtgccagattgagatggttggagatagaccgtatgttgttctgttaaaggatcgtgagaaagaaaggagcaaggagaaggataaggacaaatcagttgataaggataaagcaacaggtgcagtcgctaaggtagtgtccggggacacagctgcaggatctcctgcaaatgctcaggggaaacagtctgatttgaattcaagaaacgtgaaatctcaccgcaagccaccccaaagttttgtcactgttatagagcatctcttagatctggtgatgtcctttgttccgccaccccgtccagaggatcaagctgatgttgtctctggtactgccttatcttctgacatggacattgactgcagttctgcaaaagggaaagggaaagctgtgtctgtcccacctgaagagagcaagcatgctatccaagagtctactgcatcccttgccaaagcttcatttttccttaagttgatgacagatgtgttgttaacttacacatcatccattcaagttgttcttcgtcatgatgctgatctgagcaacatgcacggtccaaatcgaacaaattctggtctaattagtggtggaatctttaaccatatcctgcagcatttccttcctcatgccacaaagcaaaagaaagagagaaaaagtgatggagattggatgtataaattggcaacaagggctaatcagttcttggtggcttcatctattcgttctgcagaggcccgaaaaaaagttttttctgaaatctgcaatatacttcttgatttcaccgactcgtctgcagcttacaaagccccagtagcaaggatgaatgtgtatgttgatttactgaatgatattctgtcagcccgatcaccaactggctcctcattgtcagcagaatctgcagttacatttgttgaagttggtcttgctccttcattattgaaaatgcttcaaaatcttgatttggatcaccctgattctgcaaagatcgttactgccattgttaaggccctggaactcgtcagtaaggaacatgttcattcagcagataatgcaaaaggagagaactcatcaaagattgcttccgacagcaacaatgtgaattcatcacctaataggttccaggctcttgacatgacttctcagcccacagagatgattactgatcacagggaaacatttaatgctgaccaaacttcacaaagttcagattcagtggcagatgagatggatcatgatcgtgatatggatggtggctttgctcgtgatggtgaagatgattttatgcatgagatggctggcgatggaactggtaatgaatctacaatggaaatcagatttgaaatttcacgcaatagagacgatatggctgatgatgatgatgatgatgacaacactgatgaagatatgtctgcagaggatgatgaggaggttaatgaagatgatgaagacgaagatgaggagaataacaatttggaggaagatgatgcccatcagatgtctcatcctgacacagaccaggaagaccgtgaaatggatgaagaagaatttgacgaggatctactagaagatgatgacgatgaggatgaggagggagtcatccttcgcctggaggaggggattaatggcattaatgtgtttgaccatattgaagtatttggtggtagcaacaatttgtctggggatacactgcgtgtgatgcctctggacatttttggtacaagaaggcaaggccgaagtacctccatatacaatcttcttggcagggctagtgatcatggtgttcttgatcacccacttcttgaagagccttcctcgacattgaatttttcacatcaagaacaaccagatgacggtccacaacgcaatggatctgctgcccctgcagtacctgaaggcattgaagaattgctgatctctcatttgagtcggcccactcaacaacctggtgcccagactgttggtggtactcaagaaaatgaccaacccaaacatggctcagctgctgaggcaagggaaggatcgccagctcagcaaaatgagaacagtgaaaatacaacgaatcctgtagatctgtcagaaagtgctggccctgcacctcctgatagtgatgcacttcaaagagttgtgtccaatgcaagtattgagcatgctacggagatgcagtatgaacgcagcgacactataacacgtgatgttgaagcagtgagccaagcaagcagtggcagtggtgctactttaggggagagcctcagaagtttagaggttgaaataggaagtgttgaagggcatgatgatggtgaccggcatggaacttcaggggcctcagaacgattacctttgggtgatattcaagctgctgctcgatcacgcaggccatctggaaatgctgtggctgtaagcagtagagatatgtctctggagagtgttagtgaggttcctcaaaatccagatcaagaacctgatcataatgctagtgaggggaatcaggagcctagaggggttggtgctgacacaattgatcctacatttttggaggctcttcctgaggacttgcgagctgaagttctttcttcacgtcaaaatcaagtgactcagacttctaatgaccaacctcagaatgatggtgatattgatcctgaattccttgctgcactcccccttgatataagagaggaggtgctagctcaacaacgtagtcaaaggatacaacaacaatcacaagaattagaaggacaaccagttgaaatggatgctgtttcaattattgcaacattcccttcagaaattcgggaagaggtccttttgacatctcctgacaccctcctagctacactcacacctgcactagttgctgaggccaacatgttaagggagagatttgctcatcggtatcacagtagttctctttttggtatgaactccaggaacaggagaggtgagtcctcccgacgtgacataatggcagcaggacttgataggaacacaggtgatccctccagatcaactagcaaaccaattgagattgaaggtgctcctcttgttgatgaagatggccttaaagctcttattcggttacttcgagttgttcagcccctatacaagggtcagctgcagaggcttcttgtgaacctttgcacgcatcgggataacagacaggccttggttcaaattctggtggacatgcttatgcttgatctgcaggggttttcaaagaaatcagtagatgcatctgagccaccatttaggttgtatggatgccatgcaaatatcacatattcacgtcctcaatcttcaaatggtgttcctccattggtttcacgtcgtgtgctcgaaacactgacaaacttggcaagaagccatccaaatgttgctaaactcttgctctttcttgagttcccttgcccatcaagatgtcgctctgaagcacatgatcataggcatggcaaggctgttctagaagatggtgaagaacggaaagcctttgcggttgttcttttgttaactctgttgaatcagccactttatatgagaagtgtagctcatcttgaacagttactaaacctccttgaagttgtcatgcataacgctgagaatgaaattaatcaagctaagctagaagcgtcatctgagaagccatctgagaatgcagtgaaagatgtcaaagataacaccagcatttctgattcatatggatcaaagtcgaatcctgaggatggtagcaaagcccttgctgttgacaataaaagtaacttgcgagctgttctgcgaagtcttccccaatcagagcttagattgctatgttcattgcttgcgcatgatggattgtcggacagcgcttatctccttgtaggtgaagtgttgaaaaagattgtggctctggcccctttcttctgttgccatttcataaatgagcttgcacgatcaatgcaaagcttgacattttgtgcaatgaaggagcttcgtttgtacgagaattctgaaaaggctcttcttagttctacatcagccaatggaactgcgattcttagagttgtgcaggctttgagttctcttgtcagtactcttcaagatagaaaggatccagaacagcctgctgagaaggaccattcagatgcagtttcccagatttctgaaattaacacagcattggatgctttgtggttggaattgagcaactgcataagcaaaatagaaagctcttcagagtatgcatcaaatctaactcctgcttctgcaagtgcagctacattaacagcaggagtagcacctccattgcctgcaggaactcaaaacatattaccatatatagagtcattttttgtgacatgtgagaagttgcgtcctgggcaacctgatgctgtacaagaggcttcgacttctgatatggaagatgcttcaacatctagtggtgggcagagatcatattcctgtcaagctagtcttgacgagaagcaaaatgcttttgtgaaattctcagagaagcacagaagattgctgaatgcattcatccatcaaaaccctggattactggagaagtcattctcgctgatgttaaaaattcctcgcctgattgattttgacaacaaacgtgcatatttccggtctaaaatcaagcatcagtatgatcatcatcatcataatcctgttagaatttctgtgcgtcgttcatatattcttgaggactcctacaatcagcttaggatgcgctctcctcaggacttgaagggtagactcactgttcattttcaaggagaagaaggaattgatgctggtgggctgacaagggaatggtaccaatcgctttcacgagtcatttttgacaagagtgcccttctatttacaacagtcgggaatgatttgacgtttcaaccgaatcctaattctgtatatcaaactgagcacctctcatactttaaatttgctggacgagtggttggcaaagctctcttcgatggtcagcttttagatgctcattttactagatctttctacaaacacatacttggtgtcagggttacataccatgacattgaagctatcgatcctgcatactacaagaatttgaaatggatgctcgagaatgacataagtgatgttttggatctcaccttcagcatggatgcggacgaagagaaactgatattgtacgagaaggcagaggtcactgattgtgagttgattccaggagggcgtaacatcagggttactgaggagaataaacatcaatatgtagatcgggtagcagagcatcgactgacgactgcaatcaggcctcaaattaatgccttcctggaagggtttaatgaactcattccacgggagctgatatctatcttcaacgacaaagagcttgaacttctgattagcggtcttccagatattgacttggacgatttgaaagcaaatacagaatattctggctacagcatagcctctccagtcatccagtggttctgggaaatcgttcaggggttcagcaaggaagacaaagcccggttcctccagttcgtcactggcacttcaaaggtaccgttggaaggttttagtgcacttcaagggatctctgggccacaaaggtttcagatacataaggcctacggcagcacgaaccatctgccttcagctcatacttgctttaaccaactagacttgcctgagtacacatccaaagagcagctccaggagcggttactattggcaatccacgaagcaaatgaaggtttcggatttggctaatcagttatactcgtttgtccgtgccctgagaactgcaataggcgagcagcacgtgtgtggctgatcacattatgaactccacgtgtgtgatgagagatggccggagagaacatgtccaggatagacgaatgcccgtgggagaggtactactgttaagagagagagcgactattttgtgtttataatctttgtctgtttgtagtttttgccttacattggtcgttgctccgaagtttttccccttcttttcgttcatagactggtgtaagttgtaaccgaacattatgtcaaatgcaggtcatcttacgctggaatgttatacctcccctaatctgttaaaacaactgtaaattccgaaggactatttattctaatattattagagcgaaaattctctctttcgctctcccaatcctgtccatctcctactgcctcttattccgtcgtctctctcttacgcttcgttctttcagttatatataaaacctttgtcattaatgttgttattgtgtggccgctccggccttttttgtgtcg

SEQ ID NO: 30242 - DNA, 10932 bp, Zea Mays
cggccccaaacaacaatcacaaccctctctctccctctccttcacgtagccgcctctgaatccccacctctctgctctcccgtcggcctcctccgcgaccgatgtgtgtgccccgccgccggcccaaaacactagaggtgacgagcaggtaaggggttccgatcggagatggcggcggcggcggccgcacatagagccagcttcccgttgcgcctgcagcagatccttgctggaagccgcgctgtctcacctgcgatcaagtcatctaatttgtgtgtgatacatattccagacatgcatcttcagaaagaggatgacttgagcatactgaagcaatgcgtggacaaattcaatgtgcctccagagcacaggtttgcattgcttacaaggataagatatgcccgcgccttcaactccacacggacttgtagtatctatagccgcataagtcttctttcgttcattgtacttgtgcaatcaagtgatgctcacgatgagctcacatatttctttacaaatgaaccagaatacataaacgagttaatcaggcttgttcggtcagaagattctgtccctgggcccattcgtgcacttgctatgctagcactgggagcacagctggcagcatatgcatcatctcatgagcgtgctaggatattgagtggctcaagtatcatttctgctggtggaaatcgtatggtgttgctcagtgtcttgcagaaagcaatattctcactcaatagcccaaatgatgcctcatctcctctaattgttgatgctcttcttcagttttttctgctccatgtattgtcctcatcaagttcagggactacggttagaggctcaggcatggttcctcctctcttgcccctgctgcgagataatgattcttctcatatgcatcttgtctgcttggcagtgaagactcttcaaaagcttatggagtacagcagccctgctgtttctctgttcaaagacttgggtggtgtagaccttttgtctcggaggttacatgtagaagtgcagcgtgttattggtactgctgatggtcataattcaatggttactgatgcagttaaatcaaaagaggaccacctgtactcccagaagcgattgattaaagctttgcttaaggctttggggtcttctacttattcccctgggattcctgctcgttctcaaagctcccaagataattcattgcctgtgtcactttcccttatatttcagaatgtagaaaagtttgggggcgacatttatttttcagcagttacagttatgagcgaaataatccataaagatcctacatgctttcctgctttgaaagaacttggtcttccagatgcttttctctcatcagtgactgctggggtaataccatcttgtaaagccctgatctgtgttcctaatggcctgggtgcaatatgcctcaataaccaaggacttgaggctgtcagggaaacttcagcactacgatttcttgtatataccttcactagcaggaaatacttgataccactgaatgagggcgttgttcttctagctaatgcagcagaagagcttcttcgtcatgtgcaatccctgagaagtattggtgttgacatcattattgaaataatcaataaactaagttcatctctgaaagatagaaacaatgaaacagccatcttggaagaaaaaacagatatggaaactgatgttgaaggtcgtgatttggtaggtggtatggattccagtgtggagggcagtaatgatgaacagttttctcatttgagcattttccatgtgatggtattggttcaccggacaatggaaaactctgaaacctgccggttatttgtcgaaaagggaggtctaaatgctcttttgacactcttgttgaggcctagcattacactgtcatctggagggatgcctattgctttgcatagcacaatggtgttcaagggatttactcagcatcactctactccacttgcacgtgcattttgctcgtctttaagggagcatttgaagagtgcattaggggaacttgataaagtttctaactcatttgagatgaccaagattgaaaaaggagcgataccttctttgtttgttgttgaatttctgctatttttagctgcctcaaaagacaatcgttggatgaatgctttgctctcagaatttggcgatgctagcagggaggtcctggaagatattgggcgagtccaccgggaagtgctttggaaaatttcgctttttgaagaaaacaagattgacgctgaaattagtttatcttcttccacatctgaagcccagcagcctgacttgtctgccagcgacattggtgatagcagatacacttctttcaggcaatatcttgatccaattttaaggcgaaggggttctgggtggaacatagagtctcaagtgtctgacctcattaatatgtatcgagacattggcagtgcagctagtgactctcagagagttggttctgatagatattctagtctgggtttgccctcaagttcccaggaccagtcttccagttcatctgatgcaaatgtcagcacaagatcagaagaggaaaagaaaaattctgagcattcctcctgctttgacatgatgagatctctctcctaccatatcaaccatctttttatggagcttggtaaagcaatgcttcttacatctcgtcgggagaacagtcctgtaaacctatccccatccgttatatctgttgctaacaacattgcttctattatgttggaacacctcaactttgaaggacattcggtaagttctgagagggagatgactgttaccacaaaatgccaatatcttggaaaggtagctgaatttattgatgggatattattagatcggccagaatcctgtaatccaattatggtaaattcattctattgctgtggtgtcattcaggccatcctgaccacatttcaggccaccagtgagttgctcttcacaatgagcaggccaccatcttcacctatggagacagatagtaaaactggaaaggatggaaaggatatgaattcttcatggatctatggtcccctcatcagctatggcgcaattatggatcatcttgtgacctcgtcttttattctctcttcatcaactagacaattacttgagcagcctatttttaatggatctgtaaggtttcctcaagatgctgagaggttcatgaagttacttcagtctaaggtgttgaagacagttcttcccatctgggctcatcctgagtttccagaatgcaacattgagttgattagttcagtcatgtccatcatgaggcatgtttgctctggggtggaagtgaaaaacactgttggcaatgatggtgctcgtttaactggtccacctcctgatgagagtgcaatttcattgattgtagagatggggttttctcgtgcaagagctgaagaagcattaagacaagttggaaccaacagtgttgaaatagcaactgattggttattctcacacccagaggatgaacttgctcgggcgctcgcaatgtctcttgggaattctgatacacctgcacaagagggaaatggtaggtccaatgaccttgagctggaggaagtaacagtccagctgcctcctatagatgaaatgttacactcatgttttcagctacttcagacaaaggaagcattagctttccctgtcagggatatgcttgttactatcagctcacagaaggatggccaaaaccgagtaaaggtgcttacatatttgattgaaaatctgaaacaatgtgtggtggcatctgagccttcaaatgatactgcactgtctgctcttttacatgttcttgctttgattctccatggagatactgctgctcgtgaagttgcctcaaaggcaggaattgtgaaggttgctttagatctgctttccagctgggagttggaacttagggaaagtggcatgattgaggttcctaattgggtaagttcctgtttcctttctgttgatcagatgctccagttggaaccaaagttgccagatgttacagagctagatgttctgaaaagggataattcaaatataaaaacatcacttgtgattgatgagagcaagaaaaaagattcagaatccttgtcaagtgttggattactagacatggaggaccagtatcaacttttgaagatctgttgcaagtgcatagaaaaacagttgccttcggcttccatgcatgctattcttcagctctctgcaacactgacaaaagttcatgcagctgctatttgtttccttgagtctggtggtctgaatgcattgctatcattgccaacaagtagtttgttttctgggttcaacagtgtggcttctacaataattcgtcatattttggaggaccctcacacccttcagcaagcaatggaattagagatacgtcacagtcttgtcacagctgctaatcgacatacaaatcccagggttaccccacgcaattttgtccagaatttggcatttgtcatatatagggacccagtgatatttatgaaagctgtccagtctgtgtgccagattgagatggttggagatagaccgtatgttgttctgttaaaggatcgtgagaaagaaaggagcaaggagaaggataaggacaaatcagttgataaggataaagcaacaggtgcagtcgctaaggtagtgtccggggacacagctgcaggatctcctgcaaatgctcaggggaaacagtctgatttgaattcaagaaacgtgaaatctcaccgcaagccaccccaaagttttgtcactgttatagagcatctcttagatctggtgatgtcctttgttccgccaccccgtccagaggatcaagctgatgttgtctctggtactgccttatcttctgacatggacattgactgcagttctgcaaaagggaaagggaaagctgtgtctgtcccacctgaagagagcaagcatgctatccaagagtctactgcatcccttgccaaagcttcatttttccttaagttgatgacagatgtgttgttaacttacacatcatccattcaagttgttcttcgtcatgatgctgatctgagcaacatgcacggtccaaatcgaacaaattctggtctaattagtggtggaatctttaaccatatcctgcagcatttccttcctcatgccacaaagcaaaagaaagagagaaaaagtgatggagattggatgtataaattggcaacaagggctaatcagttcttggtggcttcatctattcgttctgcagaggcccgaaaaaaagttttttctgaaatctgcaatatacttcttgatttcaccgactcgtctgcagcttacaaagccccagtagcaaggatgaatgtgtatgttgatttactgaatgatattctgtcagcccgatcaccaactggctcctcattgtcagcagaatctgcagttacatttgttgaagttggtcttgctccttcattattgaaaatgcttcaaaatcttgatttggatcaccctgattctgcaaagatcgttactgccattgttaaggccctggaactcgtcagtaaggaacatgttcattcagcagataatgcaaaaggagagaactcatcaaagattgcttccgacagcaacaatgtgaattcatcacctaataggttccaggctcttgacatgacttctcagcccacagagatgattactgatcacagggaaacatttaatgctgaccaaacttcacaaagttcagattcagtggcagatgagatggatcatgatcgtgatatggatggtggctttgctcgtgatggtgaagatgattttatgcatgagatggctggcgatggaactggtaatgaatctacaatggaaatcagatttgaaatttcacgcaatagagacgatatggctgatgatgatgatgatgatgacaacactgatgaagatatgtctgcagaggatgatgaggaggttaatgaagatgatgaagacgaagatgaggagaataacaatttggaggaagatgatgcccatcagatgtctcatcctgacacagaccaggaagaccgtgaaatggatgaagaagaatttgacgaggatctactagaagatgatgacgatgaggatgaggagggagtcatccttcgcctggaggaggggattaatggcattaatgtgtttgaccatattgaagtatttggtggtagcaacaatttgtctggggatacactgcgtgtgatgcctctggacatttttggtacaagaaggcaaggccgaagtacctccatatacaatcttcttggcagggctagtgatcatggtgttcttgatcacccacttcttgaagagccttcctcgacattgaatttttcacatcaagaacaaccagagaatcttgttgagatggctttctctgatcgaaatcacgaaggtagctcctcccgtttggatgctatattccgcagcttgcgaagtgggcgtaatggacatcgctttaatatgtggctagatgacggtccacaacgcaatggatctgctgcccctgcagtacctgaaggcattgaagaattgctgatctctcatttgagtcggcccactcaacaacctggtgcccagactgttggtggtactcaagaaaatgaccaacccaaacatggctcagctgctgaggcaagggaaggatcgccagctcagcaaaatgagaacagtgaaaatacaacgaatcctgtagatctgtcagaaagtgctggccctgcacctcctgatagtgatgcacttcaaagagttgtgtccaatgcaagtattgagcatgctacggagatgcagtatgaacgcagcgacactataacacgtgatgttgaagcagtgagccaagcaagcagtggcagtggtgctactttaggggagagcctcagaagtttagaggttgaaataggaagtgttgaagggcatgatgatggtgaccggcatggaacttcaggggcctcagaacgattacctttgggtgatattcaagctgctgctcgatcacgcaggccatctggaaatgctgtggctgtaagcagtagagatatgtctctggagagtgttagtgaggttcctcaaaatccagatcaagaacctgatcataatgctagtgaggggaatcaggagcctagaggggttggtgctgacacaattgatcctacatttttggaggctcttcctgaggacttgcgagctgaagttctttcttcacgtcaaaatcaagtgactcagacttctaatgaccaacctcagaatgatggtgatattgatcctgaattccttgctgcactcccccttgatataagagaggaggtgctagctcaacaacgtagtcaaaggatacaacaacaatcacaagaattagaaggacaaccagttgaaatggatgctgtttcaattattgcaacattcccttcagaaattcgggaagaggtccttttgacatctcctgacaccctcctagctacactcacacctgcactagttgctgaggccaacatgttaagggagagatttgctcatcggtatcacagtagttctctttttggtatgaactccaggaacaggagaggtgagtcctcccgacgtgacataatggcagcaggacttgataggaacacaggtgatccctccagatcaactagcaaaccaattgagattgaaggtgctcctcttgttgatgaagatggccttaaagctcttattcggttacttcgagttgttcagcccctatacaagggtcagctgcagaggcttcttgtgaacctttgcacgcatcgggataacagacaggccttggttcaaattctggtggacatgcttatgcttgatctgcaggggttttcaaagaaatcagtagatgcatctgagccaccatttaggttgtatggatgccatgcaaatatcacatattcacgtcctcaatcttcaaatggtgttcctccattggtttcacgtcgtgtgctcgaaacactgacaaacttggcaagaagccatccaaatgttgctaaactcttgctctttcttgagttcccttgcccatcaagatgtcgctctgaagcacatgatcataggcatggcaaggctgttctagaagatggtgaagaacggaaagcctttgcggttgttcttttgttaactctgttgaatcagccactttatatgagaagtgtagctcatcttgaacagttactaaacctccttgaagttgtcatgcataacgctgagaatgaaattaatcaagctaagctagaagcgtcatctgagaagccatctgagaatgcagtgaaagatgtcaaagataacaccagcatttctgattcatatggatcaaagtcgaatcctgaggatggtagcaaagcccttgctgttgacaataaaagtaacttgcgagctgttctgcgaagtcttccccaatcagagcttagattgctatgttcattgcttgcgcatgatggattgtcggacagcgcttatctccttgtaggtgaagtgttgaaaaagattgtggctctggcccctttcttctgttgccatttcataaatgagcttgcacgatcaatgcaaagcttgacattttgtgcaatgaaggagcttcgtttgtacgagaattctgaaaaggctcttcttagttctacatcagccaatggaactgcgattcttagagttgtgcaggctttgagttctcttgtcagtactcttcaagatagaaaggatccagaacagcctgctgagaaggaccattcagatgcagtttcccagatttctgaaattaacacagcattggatgctttgtggttggaattgagcaactgcataagcaaaatagaaagctcttcagagtatgcatcaaatctaactcctgcttctgcaagtgcagctacattaacagcaggagtagcacctccattgcctgcaggaactcaaaacatattaccatatatagagtcattttttgtgacatgtgagaagttgcgtcctgggcaacctgatgctgtacaagaggcttcgacttctgatatggaagatgcttcaacatctagtggtgggcagagatcatattcctgtcaagctagtcttgacgagaagcaaaatgcttttgtgaaattctcagagaagcacagaagattgctgaatgcattcatccatcaaaaccctggattactggagaagtcattctcgctgatgttaaaaattcctcgcctgattgattttgacaacaaacgtgcatatttccggtctaaaatcaagcatcagtatgatcatcatcatcataatcctgttagaatttctgtgcgtcgttcatatattcttgaggactcctacaatcagcttaggatgcgctctcctcaggacttgaagggtagactcactgttcattttcaaggagaagaaggaattgatgctggtgggctgacaagggaatggtaccaatcgctttcacgagtcatttttgacaagagtgcccttctatttacaacagtcgggaatgatttgacgtttcaaccgaatcctaattctgtatatcaaactgagcacctctcatactttaaatttgctggacgagtggttggcaaagctctcttcgatggtcagcttttagatgctcattttactagatctttctacaaacacatacttggtgtcagggttacataccatgacattgaagctatcgatcctgcatactacaagaatttgaaatggatgctcgagaatgacataagtgatgttttggatctcaccttcagcatggatgcggacgaagagaaactgatattgtacgagaaggcagaggtcactgattgtgagttgattccaggagggcgtaacatcagggttactgaggagaataaacatcaatatgtagatcgggtagcagagcatcgactgacgactgcaatcaggcctcaaattaatgccttcctggaagggtttaatgaactcattccacgggagctgatatctatcttcaacgacaaagagcttgaacttctgattagcggtcttccagatattgacttggacgatttgaaagcaaatacagaatattctggctacagcatagcctctccagtcatccagtggttctgggaaatcgttcaggggttcagcaaggaagacaaagcccggttcctccagttcgtcactggcacttcaaaggtaccgttggaaggttttagtgcacttcaagggatctctgggccacaaaggtttcagatacataaggcctacggcagcacgaaccatctgccttcagctcatacttgctttaaccaactagacttgcctgagtacacatccaaagagcagctccaggagcggttactattggcaatccacgaagcaaatgaaggtttcggatttggctaatcagttatactcgtttgtccgtgccctgagaactgcaataggcgagcagcacgtgtgtggctgatcacattatgaactccacgtgtgtgatgagagatggccggagagaacatgtccaggatagacgaatgcccgtgggagaggtactactgttaagagagagagcgactattttgtgtttataatctttgtctgtttgtagtttttgccttacattggtcgttgctccgaagtttttccccttcttttcgttcatagactggtgtaagttgtaaccgaacattatgtcaaatgcaggtcatcttacgctggaatgttatacctcccctaatctgttaaaacaactgtaaattccgaaggactatttattctaatattattagagcgaaaattctctctttcgctctcccaatcctgtccatctcctactgcctcttattccgtcgtctctctcttacgcttcgttctttcagttatatataaaacctttgtcattaatgttgttattgtgtggccgctccggccttttttgtgtcg

SEQ ID NO: 30243 - DNA, 11285 bp, Zea Mays
ccccaaacaacaatcacaaccctctctctccctctccttcacgtagccgcctctgaatccccacctctctgctctcccgtcggcctcctccgcgaccgatgtgtgtgccccgccgccggcccaaaacactagaggtgacgagcaggtaaggggttccgatcggagatggcggcggcggcggccgcacatagagccagcttcccgttgcgcctgcagcagatccttgctggaagccgcgctgtctcacctgcgatcaaggtcgagtctgagccgcccgcaaatgtcaaagcatttattgatcaagtaatcaatattccactacatgacattgccataccgctatcaggcttccgttgggagttcaataagggaaatttccaccactggaagcctttatttattcattttgacacatatttcaagacatacatttcttctcggaaggatcttcttttatctgatgatatgactgaggctgaacctatgccaaagaatgccatcttgaaaattttaatagttatgcagattattttggagaactgtcagaatagaagttcttttactggtcttgagcatcttaagcttctcctggcatcgtcagaccctgagatagttgtagcagcattggaaactcttgttgccttggtcaaaataaatccttcaaagttgcatatgaatggaaagctaattagctgcggatccataaacacccatcttctatcattggcccaaggatggggcagcaaggaggaaggcctaggcatatattcttgtgttgtggcaaatgaaggaaaccagcaggggggcctgtccttgttcccagtagacttggagagcaaatatcagcatcgtcttggttcaactcttcattttgagtataatttgggttctgcacagtaccctgaccaaactagtgacaagggcaagtcatctaatttgtgtgtgatacatattccagacatgcatcttcagaaagaggatgacttgagcatactgaagcaatgcgtggacaaattcaatgtgcctccagagcacaggtttgcattgcttacaaggataagatatgcccgcgccttcaactccacacggacttgtagtatctatagccgcataagtcttctttcgttcattgtacttgtgcaatcaagtgatgctcacgatgagctcacatatttctttacaaatgaaccagaatacataaacgagttaatcaggcttgttcggtcagaagattctgtccctgggcccattcgtgcacttgctatgctagcactgggagcacagctggcagcatatgcatcatctcatgagcgtgctaggatattgagtggctcaagtatcatttctgctggtggaaatcgtatggtgttgctcagtgtcttgcagaaagcaatattctcactcaatagcccaaatgatgcctcatctcctctaattgttgatgctcttcttcagttttttctgctccatgtattgtcctcatcaagttcagggactacggttagaggctcaggcatggttcctcctctcttgcccctgctgcgagataatgattcttctcatatgcatcttgtctgcttggcagtgaagactcttcaaaagcttatggagtacagcagccctgctgtttctctgttcaaagacttgggtggtgtagaccttttgtctcggaggttacatgtagaagtgcagcgtgttattggtactgctgatggtcataattcaatggttactgatgcagttaaatcaaaagaggaccacctgtactcccagaagcgattgattaaagctttgcttaaggctttggggtcttctacttattcccctgggattcctgctcgttctcaaagctcccaagataattcattgcctgtgtcactttcccttatatttcagaatgtagaaaagtttgggggcgacatttatttttcagcagttacagttatgagcgaaataatccataaagatcctacatgctttcctgctttgaaagaacttggtcttccagatgcttttctctcatcagtgactgctggggtaataccatcttgtaaagccctgatctgtgttcctaatggcctgggtgcaatatgcctcaataaccaaggacttgaggctgtcagggaaacttcagcactacgatttcttgtatataccttcactagcaggaaatacttgataccactgaatgagggcgttgttcttctagctaatgcagcagaagagcttcttcgtcatgtgcaatccctgagaagtattggtgttgacatcattattgaaataatcaataaactaagttcatctctgaaagatagaaacaatgaaacagccatcttggaagaaaaaacagatatggaaactgatgttgaaggtcgtgatttggtaggtggtatggattccagtgtggagggcagtaatgatgaacagttttctcatttgagcattttccatgtgatggtattggttcaccggacaatggaaaactctgaaacctgccggttatttgtcgaaaagggaggtctaaatgctcttttgacactcttgttgaggcctagcattacactgtcatctggagggatgcctattgctttgcatagcacaatggtgttcaagggatttactcagcatcactctactccacttgcacgtgcattttgctcgtctttaagggagcatttgaagagtgcattaggggaacttgataaagtttctaactcatttgagatgaccaagattgaaaaaggagcgataccttctttgtttgttgttgaatttctgctatttttagctgcctcaaaagacaatcgttggatgaatgctttgctctcagaatttggcgatgctagcagggaggtcctggaagatattgggcgagtccaccgggaagtgctttggaaaatttcgctttttgaagaaaacaagattgacgctgaaattagtttatcttcttccacatctgaagcccagcagcctgacttgtctgccagcgacattggtgatagcagatacacttctttcaggcaatatcttgatccaattttaaggcgaaggggttctgggtggaacatagagtctcaagtgtctgacctcattaatatgtatcgagacattggcagtgcagctagtgactctcagagagttggttctgatagatattctagtctgggtttgccctcaagttcccaggaccagtcttccagttcatctgatgcaaatgtcagcacaagatcagaagaggaaaagaaaaattctgagcattcctcctgctttgacatgatgagatctctctcctaccatatcaaccatctttttatggagcttggtaaagcaatgcttcttacatctcgtcgggagaacagtcctgtaaacctatccccatccgttatatctgttgctaacaacattgcttctattatgttggaacacctcaactttgaaggacattcggccaccagtgagttgctcttcacaatgagcaggccaccatcttcacctatggagacagatagtaaaactggaaaggatggaaaggatatgaattcttcatggatctatggtcccctcatcagctatggcgcaattatggatcatcttgtgacctcgtcttttattctctcttcatcaactagacaattacttgagcagcctatttttaatggatctgtaaggtttcctcaagatgctgagaggttcatgaagttacttcagtctaaggtgttgaagacagttcttcccatctgggctcatcctgagtttccagaatgcaacattgagttgattagttcagtcatgtccatcatgaggcatgtttgctctggggtggaagtgaaaaacactgttggcaatgatggtgctcgtttaactggtccacctcctgatgagagtgcaatttcattgattgtagagatggggttttctcgtgcaagagctgaagaagcattaagacaagttggaaccaacagtgttgaaatagcaactgattggttattctcacacccagaggatgaacttgctcgggcgctcgcaatgtctcttgggaattctgatacacctgcacaagagggaaatggtaggtccaatgaccttgagctggaggaagtaacagtccagctgcctcctatagatgaaatgttacactcatgttttcagctacttcagacaaaggaagcattagctttccctgtcagggatatgcttgttactatcagctcacagaaggatggccaaaaccgagtaaaggtgcttacatatttgattgaaaatctgaaacaatgtgtggtggcatctgagccttcaaatgatactgcactgtctgctcttttacatgttcttgctttgattctccatggagatactgctgctcgtgaagttgcctcaaaggcaggaattgtgaaggttgctttagatctgctttccagctgggagttggaacttagggaaagtggcatgattgaggttcctaattgggtaagttcctgtttcctttctgttgatcagatgctccagttggaaccaaagttgccagatgttacagagctagatgttctgaaaagggataattcaaatataaaaacatcacttgtgattgatgagagcaagaaaaaagattcagaatccttgtcaagtgttggattactagacatggaggaccagtatcaacttttgaagatctgttgcaagtgcatagaaaaacagttgccttcggcttccatgcatgctattcttcagctctctgcaacactgacaaaagttcatgcagctgctatttgtttccttgagtctggtggtctgaatgcattgctatcattgccaacaagtagtttgttttctgggttcaacagtgtggcttctacaataattcgtcatattttggaggaccctcacacccttcagcaagcaatggaattagagatacgtcacagtcttgtcacagctgctaatcgacatacaaatcccagggttaccccacgcaattttgtccagaatttggcatttgtcatatatagggacccagtgatatttatgaaagctgtccagtctgtgtgccagattgagatggttggagatagaccgtatgttgttctgttaaaggatcgtgagaaagaaaggagcaaggagaaggataaggacaaatcagttgataaggataaagcaacaggtgcagtcgctaaggtagtgtccggggacacagctgcaggatctcctgcaaatgctcaggggaaacagtctgatttgaattcaagaaacgtgaaatctcaccgcaagccaccccaaagttttgtcactgttatagagcatctcttagatctggtgatgtcctttgttccgccaccccgtccagaggatcaagctgatgttgtctctggtactgccttatcttctgacatggacattgactgcagttctgcaaaagggaaagggaaagctgtgtctgtcccacctgaagagagcaagcatgctatccaagagtctactgcatcccttgccaaagcttcatttttccttaagttgatgacagatgtgttgttaacttacacatcatccattcaagttgttcttcgtcatgatgctgatctgagcaacatgcacggtccaaatcgaacaaattctggtctaattagtggtggaatctttaaccatatcctgcagcatttccttcctcatgccacaaagcaaaagaaagagagaaaaagtgatggagattggatgtataaattggcaacaagggctaatcagttcttggtggcttcatctattcgttctgcagaggcccgaaaaaaagttttttctgaaatctgcaatatacttcttgatttcaccgactcgtctgcagcttacaaagccccagtagcaaggatgaatgtgtatgttgatttactgaatgatattctgtcagcccgatcaccaactggctcctcattgtcagcagaatctgcagttacatttgttgaagttggtcttgctccttcattattgaaaatgcttcaaaatcttgatttggatcaccctgattctgcaaagatcgttactgccattgttaaggccctggaactcgtcagtaaggaacatgttcattcagcagataatgcaaaaggagagaactcatcaaagattgcttccgacagcaacaatgtgaattcatcacctaataggttccaggctcttgacatgacttctcagcccacagagatgattactgatcacagggaaacatttaatgctgaccaaacttcacaaagttcagattcagtggcagatgagatggatcatgatcgtgatatggatggtggctttgctcgtgatggtgaagatgattttatgcatgagatggctggcgatggaactggtaatgaatctacaatggaaatcagatttgaaatttcacgcaatagagacgatatggctgatgatgatgatgatgatgacaacactgatgaagatatgtctgcagaggatgatgaggaggttaatgaagatgatgaagacgaagatgaggagaataacaatttggaggaagatgatgcccatcagatgtctcatcctgacacagaccaggaagaccgtgaaatggatgaagaagaatttgacgaggatctactagaagatgatgacgatgaggatgaggagggagtcatccttcgcctggaggaggggattaatggcattaatgtgtttgaccatattgaagtatttggtggtagcaacaatttgtctggggatacactgcgtgtgatgcctctggacatttttggtacaagaaggcaaggccgaagtacctccatatacaatcttcttggcagggctagtgatcatggtgttcttgatcacccacttcttgaagagccttcctcgacattgaatttttcacatcaagaacaaccagagaatcttgttgagatggctttctctgatcgaaatcacgaaggtagctcctcccgtttggatgctatattccgcagcttgcgaagtgggcgtaatggacatcgctttaatatgtggctagatgacggtccacaacgcaatggatctgctgcccctgcagtacctgaaggcattgaagaattgctgatctctcatttgagtcggcccactcaacaacctggtgcccagactgttggtggtactcaagaaaatgaccaacccaaacatggctcagctgctgaggcaagggaaggatcgccagctcagcaaaatgagaacagtgaaaatacaacgaatcctgtagatctgtcagaaagtgctggccctgcacctcctgatagtgatgcacttcaaagagttgtgtccaatgcaagtattgagcatgctacggagatgcagtatgaacgcagcgacactataacacgtgatgttgaagcagtgagccaagcaagcagtggcagtggtgctactttaggggagagcctcagaagtttagaggttgaaataggaagtgttgaagggcatgatgatggtgaccggcatggaacttcaggggcctcagaacgattacctttgggtgatattcaagctgctgctcgatcacgcaggccatctggaaatgctgtggctgtaagcagtagagatatgtctctggagagtgttagtgaggttcctcaaaatccagatcaagaacctgatcataatgctagtgaggggaatcaggagcctagaggggttggtgctgacacaattgatcctacatttttggaggctcttcctgaggacttgcgagctgaagttctttcttcacgtcaaaatcaagtgactcagacttctaatgaccaacctcagaatgatggtgatattgatcctgaattccttgctgcactcccccttgatataagagaggaggtgctagctcaacaacgtagtcaaaggatacaacaacaatcacaagaattagaaggacaaccagttgaaatggatgctgtttcaattattgcaacattcccttcagaaattcgggaagaggtccttttgacatctcctgacaccctcctagctacactcacacctgcactagttgctgaggccaacatgttaagggagagatttgctcatcggtatcacagtagttctctttttggtatgaactccaggaacaggagaggtgagtcctcccgacgtgacataatggcagcaggacttgataggaacacaggtgatccctccagatcaactagcaaaccaattgagattgaaggtgctcctcttgttgatgaagatggccttaaagctcttattcggttacttcgagttgttcagcccctatacaagggtcagctgcagaggcttcttgtgaacctttgcacgcatcgggataacagacaggccttggttcaaattctggtggacatgcttatgcttgatctgcaggggttttcaaagaaatcagtagatgcatctgagccaccatttaggttgtatggatgccatgcaaatatcacatattcacgtcctcaatcttcaaatggtgttcctccattggtttcacgtcgtgtgctcgaaacactgacaaacttggcaagaagccatccaaatgttgctaaactcttgctctttcttgagttcccttgcccatcaagatgtcgctctgaagcacatgatcataggcatggcaaggctgttctagaagatggtgaagaacggaaagcctttgcggttgttcttttgttaactctgttgaatcagccactttatatgagaagtgtagctcatcttgaacagttactaaacctccttgaagttgtcatgcataacgctgagaatgaaattaatcaagctaagctagaagcgtcatctgagaagccatctgagaatgcagtgaaagatgtcaaagataacaccagcatttctgattcatatggatcaaagtcgaatcctgaggatggtagcaaagcccttgctgttgacaataaaagtaacttgcgagctgttctgcgaagtcttccccaatcagagcttagattgctatgttcattgcttgcgcatgatggattgtcggacagcgcttatctccttgtaggtgaagtgttgaaaaagattgtggctctggcccctttcttctgttgccatttcataaatgagcttgcacgatcaatgcaaagcttgacattttgtgcaatgaaggagcttcgtttgtacgagaattctgaaaaggctcttcttagttctacatcagccaatggaactgcgattcttagagttgtgcaggctttgagttctcttgtcagtactcttcaagatagaaaggatccagaacagcctgctgagaaggaccattcagatgcagtttcccagatttctgaaattaacacagcattggatgctttgtggttggaattgagcaactgcataagcaaaatagaaagctcttcagagtatgcatcaaatctaactcctgcttctgcaagtgcagctacattaacagcaggagtagcacctccattgcctgcaggaactcaaaacatattaccatatatagagtcattttttgtgacatgtgagaagttgcgtcctgggcaacctgatgctgtacaagaggcttcgacttctgatatggaagatgcttcaacatctagtggtgggcagagatcatattcctgtcaagctagtcttgacgagaagcaaaatgcttttgtgaaattctcagagaagcacagaagattgctgaatgcattcatccatcaaaaccctggattactggagaagtcattctcgctgatgttaaaaattcctcgcctgattgattttgacaacaaacgtgcatatttccggtctaaaatcaagcatcagtatgatcatcatcatcataatcctgttagaatttctgtgcgtcgttcatatattcttgaggactcctacaatcagcttaggatgcgctctcctcaggacttgaagggtagactcactgttcattttcaaggagaagaaggaattgatgctggtgggctgacaagggaatggtaccaatcgctttcacgagtcatttttgacaagagtgcccttctatttacaacagtcgggaatgatttgacgtttcaaccgaatcctaattctgtatatcaaactgagcacctctcatactttaaatttgctggacgagtggttggcaaagctctcttcgatggtcagcttttagatgctcattttactagatctttctacaaacacatacttggtgtcagggttacataccatgacattgaagctatcgatcctgcatactacaagaatttgaaatggatgctcgagaatgacataagtgatgttttggatctcaccttcagcatggatgcggacgaagagaaactgatattgtacgagaaggcagaggtatttgctgtcactgattgtgagttgattccaggagggcgtaacatcagggttactgaggagaataaacatcaatatgtagatcgggtagcagagcatcgactgacgactgcaatcaggcctcaaattaatgccttcctggaagggtttaatgaactcattccacgggagctgatatctatcttcaacgacaaagagcttgaacttctgattagcggtcttccagatattgacttggacgatttgaaagcaaatacagaatattctggctacagcatagcctctccagtcatccagtggttctgggaaatcgttcaggggttcagcaaggaagacaaagcccggttcctccagttcgtcactggcacttcaaaggtaccgttggaaggttttagtgcacttcaagggatctctgggccacaaaggtttcagatacataaggcctacggcagcacgaaccatctgccttcagctcatacttgctttaaccaactagacttgcctgagtacacatccaaagagcagctccaggagcggttactattggcaatccacgaagcaaatgaaggtttcggatttggctaatcagttatactcgtttgtccgtgccctgagaactgcaataggcgagcagcacgtgtgtggctgatcacattatgaactccacgtgtgtgatgagagatggccggagagaacatgtccaggatagacgaatgcccgtgggagaggtcatcttacgctggaatgttatacctcccctaatctgttaaaacaactgtaaattccgaaggactatttattctaatattattagagcgaaaattctctctttcgctctcccaatcctgtccatctcctactgcctcttattccgtcgtctctctcttacgcttcgttctttcagttatatataaaacctttgtcattaatgttgttattgtgtggccgctccggccttttttgtgtcg

SEQ ID NO: 30244 - DNA, 2383 bp, Zea Mays
aaatatttagagttattccttttgatagtaaatatccaaagatggggtctttaatggcatggatctttccctttaaaaaatatatccgaacataccctaaaagcagagccgtctgcgttgccgctaacaaggccgccgccgatggacgccttcgtcgccggttcgcgcggccgcccagccctcagcttcctttgccctaagatatcgctattctccccgccctcgcactcctggttccgctggctcgtcggtgcgcctcgcgttctccctcccttcaccgtcgctgctgtcttacgtcccattcacggcgaccatgacgccattgatcttcccagggaagcagacgaaatccgggggttgctgccacgcggtttcgacatcataggggtgctgctcgtggggggagagggttctgatgcggacgtcactcgcgcactggagcaggctcgggcgctgagggagctgctgtttggtgtggcagcgagccatggcttggtaggaggccacatggatgcagccactggggagattcgatttgttgtatctgagagtggatggacgaactcggtggaaggatctgtggttacatgggaggatgagcccgggaggttgttgtgggagaagggatgcctcctgcgctgcgaactgctgctgaagcttccactctatcttaggcctgacgtgaattctggcatcgaaggacagttttcttcacttattgaatctacagttgctaaactcagagatcctcatgtatattatttagttgaggggccaattacatctagtcaatcacatcgttctattatcttgcgtggcgatgatttaagctttgattcacatacacatggaaactcaagaacagacagttgtaccacaagtattgtaacttgttcagaattcttcacagaaaagaggtatgacctctcattgacaagagagactgcagatgcaattgcaataactgtcaaccaatcagcgcctagcttgaagcctggcggtacccctgtggtagagtattttcctgcacctgccagcctcatagtaatcaccttgaagcttgacatactatgctactcatcaatagactttccagtggcggctgctgtatctgaacttgttattccaggattagcagatcagatgattgtaatgaagagaattattgcttcagagataactcaacaagcacagcttcaaccattccattttattccttctggttggcatgttccagtaacagctatatacaatacaagatatggtgagactgaggagaggcaaagtgagctgcgaaaagaactgcatttaaggctaggacttcccttagatcggcctttgttgcgaatttctaatgcattgactttcggtggcatgggaaggaggaagaaaagcatgccaagaagtggttcttcgctgcttcgagacatccacagagaacttccatctagtggtgtatccggaggtgttatgtctttgattgatggttcatatgagtattatcattatcttcacgatggtattgatgacaatggatggggatgcgcatatcggtctctacaaacaattgtctcttggtacagattgcaacaatattcatcaatagatgttccttctcacagggagattcagcaagttcttgttgaaattggtgacaaggatccatcatttattggatcttgtgagtggatcggagccattgagttaagctttgtcctcgacaaactgctgggcgtgagttgtaaggttatcaatgtgaggtctggcgatgagcttcctgaaaagtgcagagaacttgccaggcattttgaaacccagggaactcctgtgatgattggtggtggagtcttggcttacacccttttgggagttgattataacggagccagtggagactgtgcatttcttatccttgatccgcactacactggtactgacgatctcaaaaagattgtaaatggcggatggtgcggatggaagaagtctgtcgacagcaaaggccgaagcttcttcttgaaagacaagttctacaaccttctactaccccaaaggccaaacatggtgtgaaacctatattgttcaatatgttaatagtgcagacgtgcaggttcacgaggcacagatatttatgcttgtgatagaggtttatggttgcgatagcagaagttatgatttgtaaaaaaaatttagtgagacattatattgtttttttaataaatttgtagtgagtaaattaaattaaattaacgaatgagagttttacaggcataacactaaaagcagacgttttgcttgagacgtcatgcttaacatgtggagtctgtgtatttggtaaactaagggtctgtctgtatccattggcactgaaaattagcacgtaaaa

SEQ ID NO: 30245 - DNA, 2550 bp, Zea Mays
cctaaaagcagagccgtctgcgttgccgctaacaaggccgccgccgatggacgccttcgtcgccggttcgcgcggccgcccagccctcagcttcctttgccctaagatatcgctattctccccgccctcgcactcctggttccgctggctcgtcggtgcgcctcgcgttctccctcccttcaccgtcgctgctgtcttacgtcccattcacggcgaccatgacgccattgatcttcccagggaagcagacgaaatccgggggttgctgccacgcggtttcgacatcataggggtgctgctcgtggggggagagggttctgatgcggacgtcactcgcgcactggagcaggctcgggcgctgagggagctgctgtttggtgtggcagcgagccatggcttggtaggaggccacatggatgcagccactggggagattcgatttgttgtatctgagagtggatggacgaactcggtggaaggatctgtggttacatgggaggatgagcccgggaggttgttgtgggagaagggatgcctcctgcgctgcgaactgctgctgaagcttccactctatcttaggcctgacgtgaattctggcatcgaaggacagttttcttcacttattgaatctacagttgctaaactcagagatcctcatgtatattatttagttgaggggccaattacatctagtcaatcacatcgttctattatcttgcgtggcgatgatttaagctttgattcacatacacatggaaactcaagaacagacagttgtaccacaagtattgtaacttgttcagaattcttcacagaaaagaggtatgacctctcattgacaagagagactgcagatgcaattgcaataactgtcaaccaatcagcgcctagcttgaagcctggcggtacccctgtggtagagtattttcctgcctcagcacctgccagcctcatagtaatcaccttgaagcttgacatactatgctactcatcaatagactttccagtggcggctgctgtatctgaacttgttattccaggattagcagatcagatgattgtaatgaagagaattattgcttcagagataactcaacaagcacagcttcaaccattccattttattccttctggttggcatgttccagtaacagctatatacaatacaagatatggtgagactgaggagaggcaaagtgagctgcgaaaagaactgcatttaaggctaggacttcccttagatcggcctttgttgcgaatttctaatgcattgactttcggtggcatgggaaggaggaagaaaagcatgccaagaagtggtattcaccatgcatatgttgcgacatatgcttcattactctgttttccccctaaattacatgtgggatcttgtggtaactttgtgcaaaaaatgtttcaaagtataatatatataagaactgcaaaatatcatattatactatgtgagaagttaataacttcatctaacatgaagataagaacttatctttgtatatgtaattcctcaggaagtagaatttgttttcatccattgtggtatgttatcacattcaggttcttcgctgcttcgagacatccacagagaacttccatctagtggtgtatccggaggtgttatgtctttgattgatggttcatatgagtattatcattatcttcacgatggtattgatgacaatggatggggatgcgcatatcggtctctacaaacaattgtctcttggtacagattgcaacaatattcatcaatagatgttccttctcacagggagattcagcaagttcttgttgaaattggtgacaaggatccatcatttattggatcttgtgagtggatcggagccattgagttaagctttgtcctcgacaaactgctgggcgtgagttgtaaggttatcaatgtgaggtctggcgatgagcttcctgaaaagtgcagagaacttgccaggcattttgaaacccagggaactcctgtgatgattggtggtggagtcttggcttacacccttttgggagttgattataacggagccagtggagactgtgcatttcttatccttgatccgcactacactggtactgacgatctcaaaaagattgtaaatggcggatggtgcggatggaagaagtctgtcgacagcaaaggccgaagcttcttcttgaaagacaagttctacaaccttctactaccccaaaggccaaacatggtgtgaaacctatattgttcaatatgttaatagtgcagacgtgcaggttcacgaggcacagatatttatgcttgtgatagaggtttatggttgcgatagcagaagttatgatttgtaaaaaaaatttagtgagacattatattgtttttttaataaatttgtagtgagtaaattaaattaaattaacgaatgagagttttacaggcataacactaaaagcagacgttttgcttgagacgtcatgcttaacatgtggagtctgtgtatttggtaaactaagggtctgtctgtatccattggcactgaaaattagcacgtaaaa

SEQ ID NO: 30246 - DNA, 2262 bp, Zea Mays
ctaaaagcagagccgtctgcgttgccgctaacaaggccgccgccgatggacgccttcgtcgccggttcgcgcggccgcccagccctcagcttcctttgccctaagatatcgctattctccccgccctcgcactcctggttccgctggctcgtcggtgcgcctcgcgttctccctcccttcaccgtcgctgctgtcttacgtcccattcacggcgaccatgacgccattgatcttcccagggaagcagacgaaatccgggggttgctgccacgcggtttcgacatcataggggtgctgctcgtggggggagagggttctgatgcggacgtcactcgcgcactggagcaggctcgggcgctgagggagctgctgtttggtgtggcagcgagccatggcttggtaggaggccacatggatgcagccactggggagattcgatttgttgtatctgagagtggatggacgaactcggtggaaggatctgtggttacatgggaggatgagcccgggaggttgttgtgggagaagggatgcctcctgcgctgcgaactgctgctgaagcttccactctatcttaggcctgacgtgaattctggcatcgaaggacagttttcttcacttattgaatctacagttgctaaactcagagatcctcatgtatattatttagttgaggggccaattacatctagtcaatcacatcgttctattatcttgcgtggcgatgatttaagctttgattcacatacacatggaaactcaagaacagacagttgtaccacaagtattgtaacttgttcagaattcttcacagaaaagaggtatgacctctcattgacaagagagactgcagatgcaattgcaataactgtcaaccaatcagcgcctagcttgaagcctggcggtacccctgtggtagagtattttcctgcctcagcacctgccagcctcatagtaatcaccttgaagcttgacatactatgctactcatcaatagactttccagtggcggctgctgtatctgaacttgttattccaggattagcagatcagatgattgtaatgaagagaattattgcttcagagataactcaacaagcacagcttcaaccattccattttattccttctggttggcatgttccagtaacagctatatacaatacaagatatggtgagactgaggagaggcaaagtgagctgcgaaaagaactgcatttaaggctaggacttcccttagatcggcctttgttgcgaatttctaatgcattgactttcggtggcatgggaaggaggaagaaaagcatgccaagaagtggttcttcgctgcttcgagacatccacagagaacttccatctagtggtgtatccggaggtgttatgtctttgattgatggttcatatgagtattatcattatcttcacgatggtattgatgacaatggatggggatgcgcatatcggtctctacaaacaattgtctcttggtacagattgcaacaatattcatcaatagatgttccttctcacagggagattcagcaagttcttgttgaaattggtgacaaggatccatcatttattggatcttgtgagtggatcggagccattgagtgagttgtaaggttatcaatgtgaggtctggcgatgagcttcctgaaaagtgcagagaacttgccaggcattttgaaacccagggaactcctgtgatgattggtggtggagtcttggcttacacccttttgggagttgattataacggagccagtggagactgtgcatttcttatccttgatccgcactacactggtactgacgatctcaaaaagattgtaaatggcggatggtgcggatggaagaagtctgtcgacagcaaaggccgaagcttcttcttgaaagacaagttctacaaccttctactaccccaaaggccaaacatggtgtgaaacctatattgttcaatatgttaatagtgcagacgtgcaggttcacgaggcacagatatttatgcttgtgatagaggtttatggttgcgatagcagaagttatgatttgtaaaaaaaatttagtgagacattatattgtttttttaataaatttgtagtgagtaaattaaattaaattaacgaatgagagttttacaggcataacactaaaagcagacgttttgcttgagacgtcatgcttaacatgtggagtctgtgtatttggtaaactaagggtctgtctgtatccattggcactgaaaattagcacgtaaaa

SEQ ID NO: 30247 - DNA, 1952 bp, Zea Mays
aaaagcagagccgtctgcgttgccgctaacaaggccgccgccgatggacgccttcgtcgccggttcgcgcggccgcccagccctcagcttcctttgccctaagatatcgctattctccccgccctcgcactcctggttccgctggctcgtcggtgcgcctcgcgttctccctcccttcaccgtcgctgctgtcttacgtcccattcacggcgaccatgacgccattgatcttcccagggaagcagacgaaatccgggggttgctgccacgcggtttcgacatcataggggtgctgctcgtggggggagagggttctgatgcggacgtcactcgcgcactggagcaggctcgggcgctgagggagctgctgtttggtgtggcagcgagccatggcttggtaggaggccacatggatgcagccactggggagattcgatttgttgtatctgagagtggatggacgaactcggtggaaggatctgtggttacatgggaggatgagcccgggaggttgttgtgggagaagggatgcctcctgcgctgcgaactgctgctgaagcttccactctatcttaggcctgacgtgaattctggcatcgaaggacagttttcttcacttattgaatctacagttgctaaactcagagatcctcatgtatattatttagttgaggggccaattacatctagtcaatcacatcgttctattatcttgcgtggcgatgatttaagctttgattcacatacacatggaaactcaagaacagacagttgtaccacaagtattgtaacttgttcagaattcttcacagaaaagaggtatgacctctcattgacaagagagactgcagatgcaattgcaataactgtcaaccaatcagcgcctagcttgaagcctggcggtacccctgtggtagagtattttcctgcctcagcacctgccagcctcatagtaatcaccttgaagcttgacatactatgctactcatcaatagactttccagtggcggctgctgtatctgaacttgttattccaggattagcagatcagatgattgtaatgaagagaattattgcttcagagataactcaacaagcacagggatggggatgcgcatatcggtctctacaaacaattgtctcttggtacagattgcaacaatattcatcaatagatgttccttctcacagggagattcagcaagttcttgttgaaattggtgacaaggatccatcatttattggatcttgtgagtggatcggagccattgagttaagctttgtcctcgacaaactgctgggcgtgagttgtaaggttatcaatgtgaggtctggcgatgagcttcctgaaaagtgcagagaacttgccaggcattttgaaacccagggaactcctgtgatgattggtggtggagtcttggcttacacccttttgggagttgattataacggagccagtggagactgtgcatttcttatccttgatccgcactacactggtactgacgatctcaaaaagattgtaaatggcggatggtgcggatggaagaagtctgtcgacagcaaaggccgaagcttcttcttgaaagacaagttctacaaccttctactaccccaaaggccaaacatggtgtgaaacctatattgttcaatatgttaatagtgcagacgtgcaggttcacgaggcacagatatttatgcttgtgatagaggtttatggttgcgatagcagaagttatgatttgtaaaaaaaatttagtgagacattatattgtttttttaataaatttgtagtgagtaaattaaattaaattaacgaatgagagttttacaggcataacactaaaagcagacgttttgcttgagacgtcatgcttaacatgtggagtctgtgtatttggtaaactaagggtctgtctgtatccattggcactgaaaattagcacgtaaaa

SEQ ID NO: 30248 - DNA, 2183 bp, Zea Mays
aaaagcagagccgtctgcgttgccgctaacaaggccgccgccgatggacgccttcgtcgccggttcgcgcggccgcccagccctcagcttcctttgccctaagatatcgctattctccccgccctcgcactcctggttccgctggctcgtcggtgcgcctcgcgttctccctcccttcaccgtcgctgctgtcttacgtcccattcacggcgaccatgacgccattgatcttcccagggaagcagacgaaatccgggggttgctgccacgcggtttcgacatcataggggtgctgctcgtggggggagagggttctgatgcggacgtcactcgcgcactggagcaggctcgggcgctgagggagctgctgtttggtgtggcagcgagccatggcttggtaggaggccacatggatgcagccactggggagattcgatttgttgtatctgagagtggatggacgaactcggtggaaggatctgtggttacatgggaggatgagcccgggaggttgttgtgggagaagggatgcctcctgcgctgcgaactgctgctgaagcttccactctatcttaggcctgacgtgaattctggcatcgaaggacagttttcttcacttattgaatctacagttgctaaactcagagatcctcatgtatattatttagttgaggggccaattacatctagtcaatcacatcgttctattatcttgcgtggcgatgatttaagctttgattcacatacacatggaaactcaagaacagacagttgtaccacaagtattgtaacttgttcagaattcttcacagaaaagaggtatgacctctcattgacaagagagactgcagatgcaattgcaataactgtcaaccaatcagcgcctagcttgaagcctggcggtacccctgtggtagagtattttcctggattagcagatcagatgattgtaatgaagagaattattgcttcagagataactcaacaagcacagcttcaaccattccattttattccttctggttggcatgttccagtaacagctatatacaatacaagatatggtgagactgaggagaggcaaagtgagctgcgaaaagaactgcatttaaggctaggacttcccttagatcggcctttgttgcgaatttctaatgcattgactttcggtggcatgggaaggaggaagaaaagcatgccaagaagtggttcttcgctgcttcgagacatccacagagaacttccatctagtggtgtatccggaggtgttatgtctttgattgatggttcatatgagtattatcattatcttcacgatggtattgatgacaatggatggggatgcgcatatcggtctctacaaacaattgtctcttggtacagattgcaacaatattcatcaatagatgttccttctcacagggagattcagcaagttcttgttgaaattggtgacaaggatccatcatttattggatcttgtgagtggatcggagccattgagttaagctttgtcctcgacaaactgctgggcgtgagttgtaaggttatcaatgtgaggtctggcgatgagcttcctgaaaagtgcagagaacttgccaggcattttgaaacccagggaactcctgtgatgattggtggtggagtcttggcttacacccttttgggagttgattataacggagccagtggagactgtgcatttcttatccttgatccgcactacactggtactgacgatctcaaaaagattgtaaatggcggatggtgcggatggaagaagtctgtcgacagcaaaggccgaagcttcttcttgaaagacaagttctacaaccttctactaccccaaaggccaaacatggtgtgaaacctatattgttcaatatgttaatagtgcagacgtgcaggttcacgaggcacagatatttatgcttgtgatagaggtttatggttgcgatagcagaagttatgatttgtaaaaaaaatttagtgagacattatattgtttttttaataaatttgtagtgagtaaattaaattaaattaacgaatgagagttttacaggcataacactaaaagcagacgttttgcttgagacgtcatgcttaacatgtggagtctgtgtatttggtaaactaagggtctgtctgtatccattggcactgaaaattagcacgtaaaa

SEQ ID NO: 30249 - DNA, 2195 bp, Zea Mays
aaaagcagagccgtctgcgttgccgctaacaaggccgccgccgatggacgccttcgtcgccggttcgcgcggccgcccagccctcagcttcctttgccctaagatatcgctattctccccgccctcgcactcctggttccgctggctcgtcggtgcgcctcgcgttctccctcccttcaccgtcgctgctgtcttacgtcccattcacggcgaccatgacgccattgatcttcccagggaagcagacgaaatccgggggttgctgccacgcggtttcgacatcataggggtgctgctcgtggggggagagggttctgatgcggacgtcactcgcgcactggagcaggctcgggcgctgagggagctgctgtttggtgtggcagcgagccatggcttggtaggaggccacatggatgcagccactggggagattcgatttgttgtatctgagagtggatggacgaactcggtggaaggatctgtggttacatgggaggatgagcccgggaggttgttgtgggagaagggatgcctcctgcgctgcgaactgctgctgaagcttccactctatcttaggcctgacgtgaattctgttgaggggccaattacatctagtcaatcacatcgttctattatcttgcgtggcgatgatttaagctttgattcacatacacatggaaactcaagaacagacagttgtaccacaagtattgtaacttgttcagaattcttcacagaaaagaggtatgacctctcattgacaagagagactgcagatgcaattgcaataactgtcaaccaatcagcgcctagcttgaagcctggcggtacccctgtggtagagtattttcctgcctcagcacctgccagcctcatagtaatcaccttgaagcttgacatactatgctactcatcaatagactttccagtggcggctgctgtatctgaacttgttattccaggattagcagatcagatgattgtaatgaagagaattattgcttcagagataactcaacaagcacagcttcaaccattccattttattccttctggttggcatgttccagtaacagctatatacaatacaagatatggtgagctgcgaaaagaactgcatttaaggctaggacttcccttagatcggcctttgttgcgaatttctaatgcattgactttcggtggcatgggaaggaggaagaaaagcatgccaagaagtggttcttcgctgcttcgagacatccacagagaacttccatctagtggtgtatccggaggtgttatgtctttgattgatggttcatatgagtattatcattatcttcacgatggtattgatgacaatggatggggatgcgcatatcggtctctacaaacaattgtctcttggtacagattgcaacaatattcatcaatagatgttccttctcacagggagattcagcaagttcttgttgaaattggtgacaaggatccatcatttattggatcttgtgagtggatcggagccattgagttaagctttgtcctcgacaaactgctgggcgtgagttgtaaggttatcaatgtgaggtctggcgatgagcttcctgaaaagtgcagagaacttgccaggcattttgaaacccagggaactcctgtgatgattggtggtggagtcttggcttacacccttttgggagttgattataacggagccagtggagactgtgcatttcttatccttgatccgcactacactggtactgacgatctcaaaaagattgtaaatggcggatggtgcggatggaagaagtctgtcgacagcaaaggccgaagcttcttcttgaaagacaagttctacaaccttctactaccccaaaggccaaacatggtgtgaaacctatattgttcaatatgttaatagtgcagacgtgcaggttcacgaggcacagatatttatgcttgtgatagaggtttatggttgcgatagcagaagttatgatttgtaaaaaaaatttagtgagacattatattgtttttttaataaatttgtagtgagtaaattaaattaaattaacgaatgagagttttacaggcataacactaaaagcagacgttttgcttgagacgtcatgcttaacatgtggagtctgtgtatttggtaaactaagggtctgtctgtatccattggcactgaaaattagcacgtaaaa

SEQ ID NO: 30250 - DNA, 2337 bp, Zea Mays
aaaagcagagccgtctgcgttgccgctaacaaggccgccgccgatggacgccttcgtcgccggttcgcgcggccgcccagccctcagcttcctttgccctaagatatcgctattctccccgccctcgcactcctggttccgctggctcgtcggtgcgcctcgcgttctccctcccttcaccgtcgctgctgtcttacgtcccattcacggcgaccatgacgccattgatcttcccagggaagcagacgaaatccgggggttgctgccacgcggtttcgacatcataggggtgctgctcgtggggggagagggttctgatgcggacgtcactcgcgcactggagcaggctcgggcgctgagggagctgctgtttggtgtggcagcgagccatggcttggtaggaggccacatggatgcagccactggggagattcgatttgttgtatctgagagtggatggacgaactcggtggaaggatctgtggttacatgggaggatgagcccgggaggttgttgtgggagaagggatgcctcctgcgctgcgaactgctgctgaagcttccactctatcttaggcctgacgtgaattctggcatcgaaggacagttttcttcacttattgaatctacagttgctaaactcagagatcctcatgtatattatttagttgaggggccaattacatctagtcaatcacatcgttctattatcttgcgtggcgatgatttaagctttgattcacatacacatggaaactcaagaacagacagttgtaccacaagtattgtaacttgttcagaattcttcacagaaaagaggtatgacctctcattgacaagagagactgcagatgcaattgcaataactgtcaaccaatcagcgcctagcttgaagcctggcggtacccctgtggtagagtattttcctgcctcagcacctgccagcctcatagtaatcaccttgaagcttgacatactatgctactcatcaatagactttccagtggcggctgctgtatctgaacttgttattccaggattagcagatcagatgattgtaatgaagagaattattgcttcagagataactcaacaagcacagcttcaaccattccattttattccttctggttggcatgttccagtaacagctatatacaatacaagatatggtgagactgaggagaggcaaagtgagctgcgaaaagaactgcatttaaggctaggacttcccttagatcggcctttgttgcgaatttctaatgcattgactttcggtggcatgggaaggaggaagaaaagcatgccaagaagtggaagtagaatttgttttcatccattgtggtatgttatcacattcaggttcttcgctgcttcgagacatccacagagaacttccatctagtggtgtatccggaggtgttatgtctttgattgatggttcatatgagtattatcattatcttcacgatggtattgatgacaatggatggggatgcgcatatcggtctctacaaacaattgtctcttggtacagattgcaacaatattcatcaatagatgttccttctcacagggagattcagcaagttcttgttgaaattggtgacaaggatccatcatttattggatcttgtgagtggatcggagccattgagttaagctttgtcctcgacaaactgctgggcgtgagttgtaaggttatcaatgtgaggtctggcgatgagcttcctgaaaagtgcagagaacttgccaggcattttgaaacccagggaactcctgtgatgattggtggtggagtcttggcttacacccttttgggagttgattataacggagccagtggagactgtgcatttcttatccttgatccgcactacactggtactgacgatctcaaaaagattgtaaatggcggatggtgcggatggaagaagtctgtcgacagcaaaggccgaagcttcttcttgaaagacaagttctacaaccttctactaccccaaaggccaaacatggtgtgaaacctatattgttcaatatgttaatagtgcagacgtgcaggttcacgaggcacagatatttatgcttgtgatagaggtttatggttgcgatagcagaagttatgatttgtaaaaaaaatttagtgagacattatattgtttttttaataaatttgtagtgagtaaattaaattaaattaacgaatgagagttttacaggcataacactaaaagcagacgttttgcttgagacgtcatgcttaacatgtggagtctgtgtatttggtaaactaagggtctgtctgtatccattggcactgaaaattagcacgtaaaa

SEQ ID NO: 30251 - DNA, 2264 bp, Zea Mays
aaaagcagagccgtctgcgttgccgctaacaaggccgccgccgatggacgccttcgtcgccggttcgcgcggccgcccagccctcagcttcctttgccctaagatatcgctattctccccgccctcgcactcctggttccgctggctcgtcggtgcgcctcgcgttctccctcccttcaccgtcgctgctgtcttacgtcccattcacggcgaccatgacgccattgatcttcccagggaagcagacgaaatccgggggttgctgccacgcggtttcgacatcataggggtgctgctcgtggggggagagggttctgatgcggacgtcactcgcgcactggagcaggctcgggcgctgagggagctgctgtttggtgtggcagcgagccatggcttggtaggaggccacatggatgcagccactggggagattcgatttgttgtatctgagagtggatggacgaactcggtggaaggatctgtggttacatgggaggatgagcccgggaggttgttgtgggagaagggatgcctcctgcgctgcgaactgctgctgaagcttccactctatcttaggcctgacgtgaattctggcatcgaaggacagttttcttcacttattgaatctacagttgctaaactcagagatcctcatgtatattatttagttgaggggccaattacatctagtcaatcacatcgttctattatcttgcgtggcgatgatttaagctttgattcacatacacatggaaactcaagaacagacagttgtaccacaagtattgtaacttgttcagaattcttcacagaaaagaggtatgacctctcattgacaagagagactgcagatgcaattgcaataactgtcaaccaatcagcgcctagcttgaagcctggcggtacccctgtggtagagtattttcctgcacctgccagcctcatagtaatcaccttgaagcttgacatactatgctactcatcaatagactttccagtggcggctgctgtatctgaacttgttattccaggattagcagatcagatgattgtaatgaagagaattattgcttcagagataactcaacaagcacagcttcaaccattccattttattccttctggttggcatgttccagtaacagctatatacaatacaagatatggtgagctgcgaaaagaactgcatttaaggctaggacttcccttagatcggcctttgttgcgaatttctaatgcattgactttcggtggcatgggaaggaggaagaaaagcatgccaagaagtggttcttcgctgcttcgagacatccacagagaacttccatctagtggtgtatccggaggtgttatgtctttgattgatggttcatatgagtattatcattatcttcacgatggtattgatgacaatggatggggatgcgcatatcggtctctacaaacaattgtctcttggtacagattgcaacaatattcatcaatagatgttccttctcacagggagattcagcaagttcttgttgaaattggtgacaaggatccatcatttattggatcttgtgagtggatcggagccattgagttaagctttgtcctcgacaaactgctgggcgtgagttgtaaggttatcaatgtgaggtctggcgatgagcttcctgaaaagtgcagagaacttgccaggcattttgaaacccagggaactcctgtgatgattggtggtggagtcttggcttacacccttttgggagttgattataacggagccagtggagactgtgcatttcttatccttgatccgcactacactggtactgacgatctcaaaaagattgtaaatggcggatggtgcggatggaagaagtctgtcgacagcaaaggccgaagcttcttcttgaaagacaagttctacaaccttctactaccccaaaggccaaacatggtgtgaaacctatattgttcaatatgttaatagtgcagacgtgcaggttcacgaggcacagatatttatgcttgtgatagaggtttatggttgcgatagcagaagttatgatttgtaaaaaaaatttagtgagacattatattgtttttttaataaatttgtagtgagtaaattaaattaaattaacgaatgagagttttacaggcataacactaaaagcagacgttttgcttgagacgtcatgcttaacatgtggagtctgtgtatttggtaaactaagggtctgtctgtatccattggcactgaaaattagcacgtaaaa

SEQ ID NO: 30252 - DNA, 2541 bp, Zea Mays
aaaagcagagccgtctgcgttgccgctaacaaggccgccgccgatggacgccttcgtcgccggttcgcgcggccgcccagccctcagcttcctttgccctaagatatcgctattctccccgccctcgcactcctggttccgctggctcgtcggtgcgcctcgcgttctccctcccttcaccgtcgctgctgtcttacgtcccattcacggcgaccatgacgccattgatcttcccagggaagcagacgaaatccgggggttgctgccacgcggtttcgacatcataggggtgctgctcgtggggggagagggttctgatgcggacgtcactcgcgcactggagcaggctcgggcgctgagggagctgctgtttggtgtggcagcgagccatggcttggtaggaggccacatggatgcagccactggggagattcgatttgttgtatctgagagtggatggacgaactcggtggaaggatctgtggttacatgggaggatgagcccgggaggttgttgtgggagaagggatgcctcctgcgctgcgaactgctgctgaagcttccactctatcttaggcctgacgtgaattctggcatcgaaggacagttttcttcacttattgaatctacagttgctaaactcagagatcctcatgtatattatttagttgaggggccaattacatctagtcaatcacatcgttctattatcttgcgtggcgatgatttaagctttgattcacatacacatggaaactcaagaacagacagttgtaccacaagtattgtaacttgttcagaattcttcacagaaaagaggtatgacctctcattgacaagagagactgcagatgcaattgcaataactgtcaaccaatcagcgcctagcttgaagcctggcggtacccctgtggtagagtattttcctgcacctgccagcctcatagtaatcaccttgaagcttgacatactatgctactcatcaatagactttccagtggcggctgctgtatctgaacttgttattccaggattagcagatcagatgattgtaatgaagagaattattgcttcagagataactcaacaagcacagcttcaaccattccattttattccttctggttggcatgttccagtaacagctatatacaatacaagatatggtgagactgaggagaggcaaagtgagctgcgaaaagaactgcatttaaggctaggacttcccttagatcggcctttgttgcgaatttctaatgcattgactttcggtggcatgggaaggaggaagaaaagcatgccaagaagtggtattcaccatgcatatgttgcgacatatgcttcattactctgttttccccctaaattacatgtgggatcttgtggtaactttgtgcaaaaaatgtttcaaagtataatatatataagaactgcaaaatatcatattatactatgtgagaagttaataacttcatctaacatgaagataagaacttatctttgtatatgtaattcctcaggaagtagaatttgttttcatccattgtggtatgttatcacattcaggttcttcgctgcttcgagacatccacagagaacttccatctagtggtgtatccggaggtgttatgtctttgattgatggttcatatgagtattatcattatcttcacgatggtattgatgacaatggatggggatgcgcatatcggtctctacaaacaattgtctcttggtacagattgcaacaatattcatcaatagatgttccttctcacagggagattcagcaagttcttgttgaaattggtgacaaggatccatcatttattggatcttgtgagtggatcggagccattgagttaagctttgtcctcgacaaactgctgggcgtgagttgtaaggttatcaatgtgaggtctggcgatgagcttcctgaaaagtgcagagaacttgccaggcattttgaaacccagggaactcctgtgatgattggtggtggagtcttggcttacacccttttgggagttgattataacggagccagtggagactgtgcatttcttatccttgatccgcactacactggtactgacgatctcaaaaagattgtaaatggcggatggtgcggatggaagaagtctgtcgacagcaaaggccgaagcttcttcttgaaagacaagttctacaaccttctactaccccaaaggccaaacatggtgtgaaacctatattgttcaatatgttaatagtgcagacgtgcaggttcacgaggcacagatatttatgcttgtgatagaggtttatggttgcgatagcagaagttatgatttgtaaaaaaaatttagtgagacattatattgtttttttaataaatttgtagtgagtaaattaaattaaattaacgaatgagagttttacaggcataacactaaaagcagacgttttgcttgagacgtcatgcttaacatgtggagtctgtgtatttggtaaactaagggtctgtctgtatccattggcactgaaaattagcacgtaaaa

SEQ ID NO: 30253 - DNA, 1632 bp, Zea Mays
gtaaatataaaatatatgaaaggcagctgctaatgagactgcagatgcaattgcaataactgtcaaccaatcagcgcctagcttgaagcctggcggtacccctgtggtagagtattttcctggattagcagatcagatgattgtaatgaagagaattattgcttcagagataactcaacaagcacagcttcaaccattccattttattccttctggttggcatgttccagtaacagctatatacaatacaagatatggtgagactgaggagaggcaaagtgagctgcgaaaagaactgcatttaaggctaggacttcccttagatcggcctttgttgcgaatttctaatgcattgactttcggtggcatgggaaggaggaagaaaagcatgccaagaagtggtattcaccatgcatatgttgcgacatatgcttcattactctgttttccccctaaattacatgtgggatcttgtggtaactttgtgcaaaaaatgtttcaaagtataatatatataagaactgcaaaatatcatattatactatgtgagaagttaataacttcatctaacatgaagataagaacttatctttgtatatgtaattcctcaggaagtagaatttgttttcatccattgtggtatgttatcacattcaggttcttcgctgcttcgagacatccacagagaacttccatctagtggtgtatccggaggtgttatgtctttgattgatggttcatatgagtattatcattatcttcacgatggtattgatgacaatggatggggatgcgcatatcggtctctacaaacaattgtctcttggtacagattgcaacaatattcatcaatagatgttccttctcacagggagattcagcaagttcttgttgaaattggtgacaaggatccatcatttattggatcttgtgagtggatcggagccattgagttaagctttgtcctcgacaaactgctgggcgtgagttgtaaggttatcaatgtgaggtctggcgatgagcttcctgaaaagtgcagagaacttgccaggcattttgaaacccagggaactcctgtgatgattggtggtggagtcttggcttacacccttttgggagttgattataacggagccagtggagactgtgcatttcttatccttgatccgcactacactggtactgacgatctcaaaaagattgtaaatggcggatggtgcggatggaagaagtctgtcgacagcaaaggccgaagcttcttcttgaaagacaagttctacaaccttctactaccccaaaggccaaacatggtgtgaaacctatattgttcaatatgttaatagtgcagacgtgcaggttcacgaggcacagatatttatgcttgtgatagaggtttatggttgcgatagcagaagttatgatttgtaaaaaaaatttagtgagacattatattgtttttttaataaatttgtagtgagtaaattaaattaaattaacgaatgagagttttacaggcataacactaaaagcagacgttttgcttgagacgtcatgcttaacatgtggagtctgtgtatttggtaaactaagggtctgtctgtatccattggcactgaaaattagcacgtaaaa

SEQ ID NO: 30254 - DNA, 705 bp, Zea Mays
cgaactcatcacgacatccttcatgctcctcattttggggtacctgatcttgacctacgggggttgtgagtacatcaagggtgagctcacatatgttcattgctcaacaagttgtggggagtaatgtgcatgagctcacttaaagtggggctcatgtgaagtgtaaggcttaccaaagaagatggttaaagttgagcattgcttttaaagttggtcaaagttttattagcagttactaagtataagtagatatcaacccaattaaataagagatcaaaattaataataacacccacaatgcaatgcaaatgacaaattaagtttacttccataaattactcatgtgagggtctaagccactcatgaccgtgagcacggctgatataccaattttacactctacagaggttgtgccctttacccacaagtcgtattacccatttgccaaggaatcgtgactccccattcatccttgccgaggagatgaggcagtgtagcactacgaggcctttacaaagttccactagcttcggaaaagccactatggtttctgaggagagcgatataggaatcccttgtctaaaaagccatcgcagcatgatgaacccgagaacctccctataccgacaacttccctacgtcgttccccttttcgggtaaggtactcatgcactagatttcctaattagtcagctaagggcgtcc

SEQ ID NO: 30255 - DNA, 524 bp, Zea Mays
tgataataatatattttatgatataaatcaagtcaaaagtatattacaaataaataactaattcaactttagtctaggttataacttgattagatatcatattttagtcagattataattataaattgattaactttgattagcaatattaatctgctaaacatagattaaacaatatctagttgttattgtgtagataatgttattacgaagattacacaactagaacggagttattccgagttacaatgtgcaatatatgaatttccaaagtctattgaattacttttatactaaaaatccattttggagcctaatttatataaatcagataaccattttatttcttagatccctggggctaaaatcgtaaacctaaggacccatatgtaattattttcctacttgtgtggatggcgggttgaataaacaaaagcacaaggagtttttaacaaaaccacgcggccgaaagggtatgatgacacctaggccatgggatccaaagctcacgacctagattagat

SEQ ID NO: 30256 - DNA, 1051 bp, Zea Mays
tgccaacttcctagcggcaggccccacacgtcagcgtctagccagtataaactttcctccctccgtccctcctccttccccgtcttatcccctcgcccctcctcccctccgccgctccccccagtccccacctcacctcgtcaaccccctccttggatagggttagagttcccccggcacgagcgcgagccatggcctccttcacctgctcccaggtcggcgctgcggcagcgggcggagcctcgcccttcctcggctaccggcggcggagcggccccgggggcgccattccgtcgagctccctcttcgtgggccggcggttggcggcggtgcagatgcgcgcgccctctcgcggggtccgcgggggctccgcgctgcgggtcacgtgcgagaaggtggtggggatcgacctgggcaccaccaactccgcggtcgccgccatggagggcggcaagccgaccgtcgtcaccaacgctgagggtgcgcgcacgactccctccgtagtggcgtacaccaagacaggggagcgcctggtggggcagatcgctaagcgccaggcggtcgtgaaccccgagaacaccttcttctctgtcaagcgcttcatcggccgcaagatgtctgaggtcgacgacgaggccaagcaggtctcgtacggcgttgtcaaagacgacaacggcaacgtcaaactcgactgccccgctattggcaaacagtttgctgccgaggagatctctgcgcagttttactagagaatagctcctggacctggcaaatcatttgttaaggtacaccagatccagatggatgctttttgtaatgcaagtggttacattgcgtttgaggtaaaaggtgtattttgccacataaacactgagtgaatttaaagtaagttgtttttgtgttactaggcacccagtctgtgttagaatatttggtaatgctatactgttctgattctttggagagttagtgccagttttgaatgcatggattttttccccagaaggctgcatatgtaaaattctgggtgcaccaaactgggtttatgtat

SEQ ID NO: 30257 - DNA, 707 bp, Zea Mays
ccagtataaactttcctccctccgtccctcctccttccccgtcttatcccctcgcccctcctcccctccgccgctccccccagtccccacctcacctcgtcaaccccctccttggatagggttagagttcccccggcacgagcgcgagccatggcctccttcacctgctcccaggtcggcgctgcggcagcgggcggagcctcgcccttcctcggctaccggcggcggagcggccccgggggcgccattccgtcgagctccctcttcgtgggccggcggttggcggcggtgcagatgcgcgcgccctctcgcggggtccgcgggggctccgcgctgcgggtcacgtgcgagaaggtggtggggatcgacctgggcaccaccaactccgcggtcgccgccatggagggcggcaagccgaccgtcgtcaccaacgctgagggtgcgcgcacgactccctccgtagtggcgtacaccaagacaggggagcgcctggtggggcagatcgctaagcgccaggcggtcgtgaaccccgagaacaccttcttctctgtcaagcgcttcatcggccgcaagatgtctgaggtcgacgacgaggccaagcaggtctcgtacggcgttgtcaaagacgacaacggcaacgtcaaactcgactgccccgctattggcaaacagtttgctgccgaggagatctctgcgcaggtttttat

SEQ ID NO: 30258 - DNA, 3416 bp, Zea Mays
agattcgacaatgaaccaactgctgcatcattggcctatgggttcgagaagaaaaataatgaaacaattctagtgtttgatttgggaggtggtacctttgatgtctctgccgttctgcagtattggaagttggagatggtgtgtttgaggtgctttccacatcaggtgatacacaccttggtggtgatgactttgataagagaatagtagattggcttgctagcaacttcaagaaagatgaaggtattgatcttctgaaggataaacaagcccttcagaggcttactgaggcatcagagaaagctaagatggaactgtcaacgctgacacaggcaaatattagcctgccattcattactgctactgctgatgggccaaaacacattgaggcaaccctctcgagagccaaattcgaggaactatgttcagaccttatagacaggcttaaaactcctgttaataatgccttaagagatgccaagttgtctgtcagtgatctagatgaagttattcttgtgggtggatccacccgaatccctgcagttcaagaacttgtgaggaagcttactgacaaagatcccaatgttacggtcaaccctgatgaggttgtttctcttggggcagctgtgcaggtgattttctttatcctcaaatgttgtttattgttgcagagcataatcctcacatggagagcccctacaactacaacaaagccttttagtcccaagcaaggttggtagggtagagttgaaacccaaccaaaaccacaagtcaaggttcagacacatggatagctgttttccatgcactcttatttaaggctaaatcttgggtatattccaccctcctttagtcctttttctctcttcccatgtcaaattcggccttcccttgcccctctttccattgctatcgcgccttaggatcccactacgcattcatgcctctgggagtcttcgttggattcgtccaaaccatctcagttagtgttggacaagtttttcttcaactggtgctatgcctagcacttgtatcatcatttcagactagatcccttcttgtatggccacaaatcaaacgcaacatgcgtattttcacaacaattatctgttgaacatgtcgtctttttgtagattaacattctgcaccttatcaattcagttgcttcttagaatgaactaaaaacaggcaataagcagaagttgctttcaccagcttctcagataagctgctttttcaataagcaacagctgtaccaaactatgccttgatcttccaaactgacatatccttcctcatgtttagtagtgccaaaatcacatctcatatattcggttttagttctactaggtaaaaccttttggatctagagtctcccgctacaactctagttttctatttactcttgcccgacttcatcaactagcactacattgttcgctaaggcaaaaatgtaagggctcaaagccgattcttgatatggtcctattataattgtgaagttatctatgtgtgcacttgttcgaacactagtcacaacattgttgtacatatacttagagctcgtttggcagggcttcggctctagctttcctctggaaaaaatccagagccctgccaaacactttttttaaacgtcttactgcgaaagcacctaaaagctagagccatttttgtactacagagaagaagctacaaatagtagcttcaccggctttggcactttaatacagggagatggctctgactctaggataagccgtttctgccaaatgatttgtgaaatggcttcagctctaccaaaaagatgctatttaggaaaagctagagccagagttgtttttgggcaaaccagagtctaatgtactttgttgaaacttatgtttgtccaaagcccaccatataacattctcgggtattttgtcataagtcttctccaagtcaatgaaccatgtgtaggtccttcttttgctccctatattgctctattgtcttattaagaaaatgacttccatggttgacctttcgggcatgaaaccaaatttgttcatagagattatcattatttatcgcagaggatgcttgtaactctgtcccgtagcttcatagtatggcttatcaacttaattgcccggtaattggtacaaatttgaatatctcccttgtttttgtagatttgtaccattatacttctcatcaagcatcttgttcgatcggaagatatggttgaacaacttggttagccatagttgtccccaaggcactccatgcctcaattgggataaccatcaaggcacattgcttaccccttttatcctgtttagtgcctctctaatctcatattcttggaccctacgcacaaagcgcttgatgtcatcaaaagagtcatccaactggaaggttgtgtcccccattttccccattgaacaaattgtcaaaatactcctaccatctatgtttgatctcatccttcccaagaggtgctctctttcatccttaatgcacttaacttggttgaaatccttatcttcctctcatggaccctacccatcctatatgtcctctccttccttcgtactcaatcgatggcaaggatccttctacgtcctaccctttgccacacttatagcttgttttgcggttttcttcactatcttgtacgtctctatgatgtccatactcctaccatggtacaatcatctacaacattctttcttctccttaatagctctttggacttccttgttctaccaccaagtatctttagtttcgcctccactccctttgttttctccacacacctgtgaggccatctttcgaatgcaggttgccatcttctctcacatgtttgcatcatcttctcccttccaagtgccctctttgatgaccctttctttgaagacttctgtcgtgtccccttttaattttcaccaatcaccactttgttctcgcaatcttggctttgtttatccctacatgtaggcttgaaaacaaaaaccaccaccataagcttatgttgagaggcaacattccctatatatcaccttgcaaagccagacatcctcgtttattcttcgttcttgtgaggacgaagttattctgactagagtagtggccactactatagttcactaaatgggattctcttcctaaagaaagtgttggctatcaacaggtcaaaagttaccatgaagtccaaaactttctccctcatgattcgtactaccatacccaaaacctccatgaatcgccttgaaatatgcactcgtacctacatgcccattgagatataatatgaaaagcttctcactaataggtataactctaaccatgccatgtaagtcttcctagaaacgtctcttagcactcttatcgtggcctagttttggagcatatacactaattacgttaaagac

SEQ ID NO: 30259 - DNA, 2101 bp, Zea Mays
ctttgagtttgttctcttggtccctcaactgtagccagtgattcttccaaggtcagacataaatcattgttggtatatcaattgacagcaccaaatatggtaatcaaatgcaaatggaaacagcagcaaaacaacagtgaggtagacagaaatgtgtaattgacttagttggcactttatgaacaacaaaaatgcattaggatcaataccaaggttacagaaatcattagggtacccctccactagggttccgccccggttccgcgctgcgctccgctcgcggcagccttggcgccttgccgcccttcgtcttctccccgcgctagtggccacccctccactagggtaccccggtgacgtaccagatctgttgttgctgcgtcttttcgtttttcccaggtcagagatcgggtttgagtctccatcgcccgtcggctcaggcgtcatcgacatcggctttgacaacaccggctccatcttctccgactgtgccacatggcgtggctagcggcgtgccaggggacacccgacatgctgtttttgtgcctcttcgtcggcacgtcgatctctgccggttcatcgtcgccgctactgaccgggaggttctgccatagacatcgccatcatcgtcttcgccccgcacaccgtcagtctggctaaccaatctagcgcgacctcaccctcccgtgacgtttgtcgtctgccgcgagtttcttaaccaagcacaaaggtcgccgttgtgtcgcctcttcgggcagcaacgtcgccgttcgtcgtcacccccgccgttgcatctacatcgttgtcgactcagtcgctgcgcgtctcctgcgcacggtctgcgagttgttcgacacatgagatgtgtcggcaacccgtcgatctgcgttgcatgctgcgtcgacaccctccatcgctggtctacaccacgttcattatctagttcttcaccgacaagtatcgtcgtcatgctccactggcgtggctgagtcttttcttcctgtgtgtcgtggctctcgccgtcgtgactctaggatcctcgatgcgtcgccacgcctacctcttcgccttcttccagcacaaccttgttgccagcgtcgtcgtcttatcctcgactacttcgtctactctgttctgacagccgtgagctgcgatggcactcccgccataccgaaccataagaccgtgtccagcaatctacccatagtttacccaaaacattgtttttgcactgttctgcactgttcgcggagtggagtttgaatatgagtatggggatgggtaagctattggagatagtctaatcgtcgtggaggtcttctttgttggtcccttcaaacgctgacacttggttggggccttctacctagtacgtgcgatactggcaacatcggcacgtgcattcgtctacgacacgtttccaggcgtgccaaacctggagcacgcctcgtccacgacagtttgacagcatcatcttcggcatcggctacttcctctacgacttcctcgattgtgtcactgtcttcgtctatggcgccctctttctgcgacaccatcatcctagcgcctcctgacgctccgcgggccttcccacatgctacgcctgcgcccgcgacttgtgcggcttgtcttcttcggtgtcctcgacagctacatcgaccataggtacccgatgcactgcacctcgacaacggctcgacgcccttgcactcggccacctcgacattatcgacacaaagggctatcatttgcatgggctactccagtcgcagcattcgcaccggtgttccgactgcgggggatgttagagtatattaggagactcctgatatggttggtttaggattgattgtaatcctgggataaccttccttgtatctaggataaccttatgtctaggatagcctttttgccctctaagtcatgtactcctgtatattttccctagaggcccaatgcaatacatccaacacattatacacaatctctccttacaattttctcccaaaaaatgcacatcacttgcaagaatactaagaacatgattaaaaaacataactttttggagctaacaagtgagtacaaaaaaattagcaagtca

SEQ ID NO: 30260 - DNA, 1399 bp, Zea Mays
ggctttcccttcccccttgctccccctctgctccgtgctcacgcacgccctgtgcagtgctgcaggccagcagcctgcatttgcggacctgcaggcagcgctcacgcaagcaggcaccacatcggcaccacccactaccgaaccatagaagcgaagttacgccgcaaccagcactactgctcgtgctcggctagtcgactagctagcatccgcacaccacaccgcagcagaagcacgcactgcacgggcaggaagaggagagagaggtggaggggaagggccgaaggggagatggatggagacttgcagcgcagcccaccctgcgccagcgccgcacacacggctcgctccccaaattacagacgaccaaggagcaagcccaaccaccacttaaacccgaccagtcgaccaccaccaccaccaccgccaccgttattcgctctgcagtctgcaccctcctcctcgctttccgacccccaaaccctagatccccttcgccgtggcggtggcgccgcggtgacccggcgcggcggcggcggcgatggcggccgtgccggaggacctccgctgcaagcgctccgacggcaagcagtggcgctgcagcgcgccctccatgcccgacaagaccgtctgcgagaagcactacgtccaggccaagaagcgctccgcctcctccgcgctccgcgcctcgctccgccgctcctcagcctcctccctcgcgcccgtcttcccattctcctcctccccctcctccgccgctcgcctccgcgccgccgacgaggacccgcccatggcggtcgcgaggcccctctacggcagggtcgccggggaggcggtgtacgtggctgaaccggtgccggcgcccgcgcggagggaggtcgcctacgaagggctgcctcggggcaatgcggctggtggcaggactgcggcggggctggtcggcagaggcccactatggtttcctggtggcggctctgaagggataaggagttgccaccagtgccggaaggctgggggtgtcatctggtgtaccagctgtgacaggagaggctactgtgccagatgcatctccagatggtactctgacattccgatggatgaagttcgaaatgtttgtccagcatgccgtggtatttgtaattgcaaagtttgcttacaaggagacaacttaataaaggctagggtgcaagaaatatcagctgttgataagttgagatatcttcattgccttttggtttatgttcttccagtactgaagggaatttattctgaccaatgctttgaaataggtgttgaaacaagatcttctggaccaaagacagatgtcctcagagcaaagataacttctgatgagcagatgtgctgtgacttttgcaaagtgccagtgtttgattatcac

SEQ ID NO: 30261 - DNA, 994 bp, Zea Mays
cgaccagtcgaccaccaccaccaccaccgccaccgttattcgctctgcagtctgcaccctcctcctcgctttccgacccccaaaccctagatccccttcgccgtggcggtggcgccgcggtgacccggcgcggcggcggcggcgatggcggccgtgccggaggacctccgctgcaagcgctccgacggcaagcagtggcgctgcagcgcgccctccatgcccgacaagaccgtctgcgagaagcactacgtccaggccaagaagcgctccgcctcctccgcgctccgcgcctcgctccgccgctcctcagcctcctccctcgcgcccgtcttcccattctcctcctccccctcctccgccgctcgcctccgcgccgccgacgaggacccgcccatggcggtcgcgaggcccctctacggcagggtcgccggggaggcggtgtacgtggctgaaccggtgccggcgcccgcgcggagggaggtcgcctacgaagggctgcctcggggcaatgcggctggtggcaggactgcggcggggctggtcggcagaggcccactatggtttcctggtggcggctctgaagggataaggagttgccaccagtgccggaaggctgggggtgtcatctggtgtaccagctgtgacaggagaggctactgtgccagatgcatctccagatggtactctgacattccgatggatgaagttcgaaatgtttgtccagcatgccgtggtatttgtaattgcaaagtttgcttacaaggagacaacttaataaaggctagggtgcaagaaatatcagctgttgataagttgagatatcttcattgccttttggtttatgttcttccagtactgaagggaatttattctgaccaatgctttgaaataggtgttgaaacaagatcttctgacagatgtcctcagagcaaagataacttctgatgagcagatgtgctgtgacttttgcaaagtgccagtgtttgattatcac

SEQ ID NO: 30262 - DNA, 3455 bp, Zea Mays
cttgtagagttgaatctgcttcaaacaaataactacaaacctttaaataatattcaaggctgcaatgaatttgagctgtgcaattcacttgcagattatcgaagtgatttaatgataaccggtattatcacaaaggatattgagtctactgttttggctttggaactgaagcaacacaaactacagctgcaagagcaacgagttatgtttaccgatgtccttgaagaattgatggcactggcagaagcaactctatggaaagtgaaccagcatttggagaatattgcaatctgcactttacatgaggagaacaatgaggcaagggttgatttggagaacctgaagcaaaattgtgaagaaattatgaaaaaattgcatgccatgaacgaggaaaacacaacacttaaatgtttaatgtcctccttccaaacaaatttggatgcaaaaaacaaagctttgatggagttggaatgctctcatgcaaccatatgtacggagctggaactgacaattgatgccatgaatcgcagaagtactagagaaaattatttcatttctgaaaatgaaacgttgaagcaggaaattcggaatattttgtgcaaggatcagtgcatggttgaattaatggataacattgaagcagataagttattttccaccattgaaggtcgcttgcaattggttactgatcatgtgcacaattacattactgagcaaataaacacgatgagcaagttatccaatgacttagacattatcgaagtatcagcccaggagttaagcacacagaattcacttctcaagtccgaattaatcagaaaagaggaattaacaaagggcttatcatttgatcttagcctgttacaagagtctgcatctgtagcgaaagatcaagcagctgagattacagggttgagaaaagtaataaaatctttggaactagagcttgcatctaagtcgcttgaacttgatgatgttgtttctgataggcaacaattggaagcaatgattttgaagtgtaatcaaaatgttgctgccctagaggaggagctgggaaagaagattgatgaattaaacatagtttctatggagaatgctgaactaaaatcgcagatccagcatattgaagagattagttgcactatggaggagttagctgataaaagtgaagtaattagaagacttgaagaaaagttgattgaatcaagaactttaattgatgaaaggagtgtctgtcttcagagcttgcaaaatgatttctccaaactctcagatgaaaagacatcatgtgacactgagttgcttatcttgaaagagaagctggagatggctcaggcacttgcagaagaaagtgaagcaattgctacagaatctcggcagatagctgaggagcataaggcatatgccgaagggaaggatgaagaagtaaaggtattggagaggtcaattgaagaacttgagaatactgtatgcgttttagaaagcaaagtggaaattgtcaaggaagaagcagagcggcaaagaatgcagcgagaagaactagaagtggagctgcagaaagttaggcaacaaatgctagctgtaccaccctctgggaaagcaaggagatatatggaagatggaatgattgatttagctgactcatccaggcacccagtagatatgcacaatgagctcctcagtgctcaagagactattagaatacttagaaaggaggtttctgagaaggaatcagagattgctcagtgcaatgcacatatctcagaactaaacattcatgctgaggcagcggcacaagaatacaagcacaagatattcatgttgaatgcgaaactagcaacaacagagagcatgacgcacgatgtgattcgagatatgcttggggttaaaatgaacatgacaacctgggcggctctagctgacaaccagcaaaagctggagacaaaagagcccatcacttctcaagcacaggaaatcaaagactccaatgagctgatgaatttgaagcggcagcttgatgaattcattgaagagagacagagctggcttgacgaaataaaccagaagcaatcagagcttggagctgcccgcattactatagagaagttacgacaacgggaacactttatggtagctgaaatagagttgctaaaggctgagaattcaaactacaaaaccatcatccttaaccttgaagccgaagtgaagaaccttaccagacaacagaacctccagctccgaataaatcaccacgttaaaacgaaggaagagaacatcctgctgaagaggcagaacgaagagctaagtgcaaagctgaaacagctggggggcatccttacccgtacgaaggaagagctcgcccgctacagggtttcaaatggaagagatccgcacgaactgatcgaggaggaggagcttctgaggaagaaactagacgagagcgaacgagatagaagccagctggcggaaaacctatcaagcctatgctccagcattctgaaggtcgctggagtttcggactcagaatctgacgctactcttttgaaagcatcggagtgcttggatcagctccagtgccgtatcgcttctttggaaggccaagttgaggatctaaatctaaagtgcaaactagtgcgtgaaaaggcccgcctgtgcgagctccggagcaactcgtcgtctctgcgcacaggggcgaagggcaatctgacatcgcccagtccggacacatcgccaagcatttcgtccttccgatgacacaagcggacggatacatcgccgagaagctagtgtacattagtacgtacataacacattccgtgtaactattctagtgcagccgggctgcttagggaggattagttcagtccaacaatctccctttgctgattttatatatatctgctgtacaatatatataccgtgtgtgtacttgatgcagttccattcaacacttgtcttctctcttcgtctgtcgttttctttcttctaatgtacagcaggacttaaaaattggaatacacatgcaatcaaagcagtgccatgtttatgcagttcttttaggggtgtttggtttgaagaatcaatctgctatagatggggtggtgtaatacccaaagatttgagaaataaagtaaccctttagacaaagtgtttgagcgattttgtttattttttagcatctcaacaaatacaaggcctgaataaagcaattaataaataattaaataaaacaaatatgtattcatgctgataatcttggctgttgcatttatatgtgaacggttaaactgggatttgaatttggaattggatatttaaactagaacaaaaataggaaatagaaacaaggaaagaaaaaaaagaaaaagaaaaaactcttacctaggccgcaacccctatggtggcccaatatacctcacgcgacgctagcccaacctgggagagttggcgccgac
